United States Patent Application Publication US 2005/0196754 A1 - sequence listing, part 6

SEQ ID NO: 10756 - DNA, 3943 bp, Homo sapiens
  SIMILAR (22)..(183): 981254mologous to Homo sapiens Amino acid sequence of chimeric TIE ligand 2N1C1F (chimera 4),accession number W47526,Smith-Waterman Score=260.
tcacagtcgttgccagtctggagtatccaatgtagctccgtaatgcatctgaaagcctccgtacagggtgaagatggccgtaaccaaatcctgacgatgggttgctacggtcatcggggtaacgcgtgtggtcagctgcggcgcattgagcagaacgaaaatgatcatagtcacatcgaacgcgattttcttttcatcgccgcactcctggccttcgcgatctacgatcagttcatcatgccccgccgtaacggccccaccctgctggcaattcctttgctccggcgtggtcgcatcgatagcgttatcttcgtcggattgattgtcattcttattgcaaagcggtccagtttccggaatattacacagcggttgttgcagatggcgacgggcatggcgtaactggcgcagcgtgttggagtaaatgccggtgatcgcactgttgtgcaccatggtgtagaacatacgcaagatggcttccggctggcgcataaatagtgtttcatcacgcaggtcgattagcgtaccgcgtagctgaaactcatcgtcgattggacgtggtttttcgtcggcgggaagggcgaggatggcttcatcgaacagttgcagcagcatctggttgagttcactgacgcggcgtgtaacgcggaagtaatccttcatcatccgctcgaccggttcgttaccttcaccactgtaattcagacgctgggcgacgctaagctggcgatcgaataacaggcgattatcgtaacggctgacgaccagatgcagggcaaagcgaatacgccacaatatatgcagacattcgtttaattccgcccgctccgccatttcatccagcgatgttgcgccaaaatgacggcgggccacccattgcagagtgtggatatcgcgcaagccgccagggctgcttttgatgtctggttcaaggttgtagctggtgccatggtaacgctgatggcgctggttctgttcttcaactttcgccgcgtagaacttgtcggaaggccagaatccttcgctgaaaatatgtttttgacagttcgaggaacagcgcaacatcgccaataataagcgggattcgattaaattggtggcgacggttaaatccgataacccttccagcatgcactcttcaagcgtgcgcacgctatgaccgacttccagctttacatcccagagcagcgttaacagctcgcccactttttgcgcctgatcgtccgggagctttttacggcttaaaatcagtaaatcgacgtctgaaagtggatgcagctcgccacgaccgtagccaccgacggcgaccaatgccaggtcggcaatctggctgaatcccgcttcaatccataatcgttgcaggagctggtcgataaactcggtgcgcgcctcaatcaactgttctgcagagatcccattgtcaaaggcatcacccagccaacgctggaaagtatcgatatgggcttttatcccaccgacggttaattcatcacggggccagacgcatggattttgcggttgaccgggcagggtggggagagcggtgtttgcgtactgttcgtaatttccaagctgctgagagatgcttatttgttcctgaccacgcttactggtagacagattaaaataatcaataaaatgtgtccgctcattggtgtctccggtaggagcctttgacggtgtaaccactcattcgactgtaggcactgtcggataagttataaaaaccttgcgtagaatagcgatatcctgcgaccagataaacatcgcggaagatccccgctgaccaccacatatcctggtcttccacgtaggtagagtccgcccactgcatcacgcgcacacacaacaggttgtcgccggttttaaccatcgcgctgatgtcaaactctgcggtcaggcgactgcccttgctgaaacccacatactgaccgttaacatagacttcaaaataggtttcgacgccgtcaaatttaatcagcgtctgtttaccctgccagccgtcgctgagggtgaaaatacgttgataggcaccggttgggttatcgctggggacaaacggcacatcgatggggaacggaaaaccttcgtcggtatattgcagtttgccgtgacccgaggggggatcctctagagtcagggacttcctcgcgataacgcagttcgtcttcgtccatccacggtagcggattgtgtccccactcacctgccgtgccattgcgcgccgatatgcgcccgcccattgaattggctttatcgcctctatgctccatcttggttcaccaatgcgcgcttttaactcgctcaaccggttaggggcttcagcactcagtaacgaaatcgccagcggttcgatcttttttcccgtagccggcatcggctggttgctggcaatgctgaaaaagctgtcaccggcattgcgtacgctgtggctgatagtgacgatggttcttggcgtcatctttgtctggatgatggtgcgtgtgtataacagcattgataccgttccgacctggtacagcatctggacgccgatgggcttcttcctgttgttgagtctggctggcgtcgatggctgggcgatgcgtctgctgccagcaatttctgtactggcacaaacattctgttgccatcgtttctgtcccgtgaatgaagagtcagttgttggaatattcagcttgtgcgacgtggatttgtcgggagcttcaaacctcttcgttagcagccatccataatccataaaggttggccagcaaatagccttcttcacacgggttaactgatgcaattgcacaacggcttgccagtggctggattgcgccagttctgccagcaactcgttatccagcggctctatttcttcaccacggcgactgcgcatcagtgcactcgccatatgtgtcatcgccatcgttccttgctcactgcgcaccggcagatggcactctgtttccagtacgttgacgacctgcatcatgcctttgcagatgtccttatcaataacgcctgctacccgttgttgatgggcgagcagggcgtgtttatctacaacggcacgcagcagttgttgcattgggtaatcatcgactcgcgtcaggaccacggcttcggtggcctgtaaaaatcgcggatcgtctgtgagcggcgtcgcctctaatcccagcatggtcagttcgttttccgccaccacgttccagatcaccgcatcgacatcgcctttaacaatgcgttgtaaactctcgtgataagagagatcagctcggtcccggccagtgttggggtgggtatcgatttccccgggggggcggccacttgggcgggcccggttgtaattaagcccggacaatcttaagccgtgatcatcgggtgtacccaaccacgaaacgggcttcaaagtgtgccagttaggacccacggcatgggccattatcaggaaagccggaaaaatattcggtcgtgaggagccaaaacgcgtatccgttccctgcatatatggcgacgcggcggaaagggcgataaagtgcggcacaaatcgtgacaagccgtgcagcaaataaatggcgtcatcgccactggcgcagccaacatggacatgctgaccaaaaacggtcgcctgctgaatgagataaccaaagttttccagcgtgcgttgatagcgttcgttatcgcatacctcctgacgctgccatttctgaaacgggtgcgtgccaccgccgcaaatttccagatgatggtctgtggctgcctgcaatacgactttctgcatcgctgaaaactgcccggcagcctggttgatatcacggcaaacatccgtcgccagctccagcatactttcggtgatatcgtgctttacctctccggccgtgatcttatttttaaccgcgtcaatcagcattgaagagtcctggcttaagtcatagcccggcggattaaccacctgcat

SEQ ID NO: 10757 - DNA, 1119 bp, Homo sapiens
  SIMILAR (820)..(1116): 901254mologous to Escherichia coli K12 putative outer membrane protein,accession number AE000204,Smith-Waterman Score= 505.
atggcgtcagcacgttttactgcatcgctgatgttgacgcgcacgatggtcttgccagcaaaacgctcttcaaacttgatgccgatatctttggtcgtcttctttttcatcagtcgaagacccatttttacgcgccagacttttcagcacgttctgacacactttagctcggtacccaaaaaagattaccacagccgtcgtggtctgctgcgcatggtttctcagcgtcgtaaactgctcgactacctgaaacgtaaagacgtagcacgttacacccacctcatcgagcgcctggaggttcgcgcggctaatgagaggctttacccacatagagctgggttagggttgtcattagtcgcgaggatgcgcagaagatcgggtattaacaccagtgccgtaaggtactgtctaagaaagagaaaggatattacattgcttaatccgatcgttcgtaaattccagtacggccaacacaccgcgactctggaaaccggcatgatggctcgtcaggctactgccgctgttatggttagcatggatgacaccgcggtattcgttaccgttgttggccagaaaaaagccagaccaggtcaagacttcttcccactgaccgttaactatcaggagcgtacctacactgctggtcgtatcccgggatatcgctattctacgcaaggtttttataacttatccgacagtgcctacagtcgaatgagtggttacaccgtcaagcctcctaccggagacaccaatgagcagacacaatttattgattattttaatctgttctacatctgtattacgaacaaaatacagagacacgatacccggggctacaggcctataaaaacgttggatattgttccggcatttgaggcaagccatttgttatggcaaagctatgaaaatagctgggagcaaatattcagcgcaagtgttggtgcctcctggcaaaaacattatggcacggatgtccttacccaactcggctacgggcaacgcattatttggaatgacataattgatgctggcgcaacgctacgctgggaaaaacgaccttatgacggtgacagagaacacaacttatacgttgaattcgatatgacattcagattttaa

SEQ ID NO: 10758 - DNA, 636 bp, Homo sapiens
  SIMILAR (184)..(465): 821254mologous to Escherichia coli periplasmic protein,accession number U28377,Smith-Waterman Score=454.
tcacctgtggcgaacggcgagcattgttgatcgtattcgtggcttctttgagccatccagtattctggtttctaccctggtgctaacgctgcgcccaaccggccttctgccgctggtcacagacagtcttccgatgcgcttgctgccaactgaaatcatggctggttcgccaattcgcagtcggatatcagtctgggtgatgacccgggtattaatggacagcgcgcacaaggaacgtgggaacgctggacggtacgcgcggacgagccgcaagcgttccatattgaaggcgtaatgttccagatccgtaacgtgaatggcgcgatgccgttcccggaagacagaggctggaaagataccgtttgggttgacggacaagtggagctgcttgtatatttcggtcagccttcctgggcgcacttccagttctacttcaacagtcagacgcacaaggttgggccacgcgcggtagcctagtacaggatccctgaaacggcgggaggcccaagcgagatggtctcgtgatgacaggattccacgacgagcctcgcgaacatggcgcaactctatctctactaagccgatgcaagaatcagctaagtgtggtggtccctgcctgttgtcacagctgcacat

SEQ ID NO: 10759 - DNA, 838 bp, Homo sapiens
  SIMILAR (199)..(1125): 691254mologous to Homo sapiens angiopoietin-2,accession number AF004327,Smith-Waterman Score=973.
tgagaagggcgttggccgaaaagtgtagcctaccacgccacgaatgagtgccattaggttttaaacagcggctggcgttggctagttcgctgatgcataagccgaacattctgtctcccggcaaaccgacttccggcgttgaccccctcacccgccgtgaattttggctgcacatcaacagcatggtagagaaaggcgtcacggtgatggtcaccacccactttatggatgaaccggaatattgcgaccgcatcggcctggtgtaccgcgggaaattaatcgccagcggcacgccggacgatttgaaagcacagtcggctaacgatgagcaacccgatcccaccatggagcaagcctttattcagttgatccacgattgggataaggagcatagcaatgagtaacccgatcctgtcctggcgtcgcgtacgggcgactgtgcgttaaagagacgcggcagatcgttcgcgatccgagtagctggctgattgcggtagtgatcccgctgctactgctgtttatttttggttacggcattaacctcgactccagcaagctgcgggtcgggattttcctggaacagcgtagcgaagcggcgctggatttcaacccacaccatgaccggttcgccctacatcgacgccaccatcagcgataaccgtcaggaactgatcgccaaaatgcaggcggggaaaattcgcggtctggtggttattccggtggattttgcggaacagatggagcgcgccaacgccaccgcaccgattcaggtgatcaccgacggcagtgagccgaataccgctaactttgtacaggggtatgtcgaagggatctggca

SEQ ID NO: 10760 - DNA, 1260 bp, Homo sapiens
  SIMILAR (559)..(2): 1001254mologous to Homo sapiens Dyrk1B protein kinase,accession number Y17999,Smith-Waterman Score=987.
tgcgggcggcgggctcatactccagcatgcgcagcaccaggtcctggaagcggaggtagtcggcggggctgtggcccggctcccccgcccgccggcccccgggcccgcccgtctgcacgcccagcacctcctgcagccgccgtgtcccggggccctggtaatccttcctgagttctttcgtccttcgtagggtccagccacccccaggcagccgttcaaagtacttgcgagccttgggcgcctggtccagcatggcggccggtgggatgcccagcacctccacaatgcggttcatctggtcgacctcattggagccactgaagaggggctctccggtgtgcatctccacaaggatgcagcccagggaccacatgtcaatggccaggtcgtagggtgtgcccaggagcacctcaggtgagcggtagaagcggctctggatatactggtagatcctctggccaagctggcaggagctgccgaagtccacaatcttgatggcgctgcgcttggggttgcacagcaagatgttttcgggcttgaggtcgcagtgaatgatgctgaagctcaggcgtggccagaaagagcagtgccgtgcagagctgctgcgccagcttccgggtcaggttcagcgagacgccgcggaagtgggtgttgcgcaggaggtcgtacaggttgtaggacagcagctcaaataccaagcacaagtgggttccggaacatgaagtgccgcttcaggtgtactatatagtacttcatctccgtgtcatgctggttcatcagctccagcagccgcagctcaatctgggcctggttcaggaaagcctttttgttcttgatgatcttgatggccacaagctcctgggtctgatgatcataggctttcaccacctggccaaaggagcctttgccaatgagcgagtcaatttcgtagcgctccagccagcgctcgccactgcgcacgatgtagtcatggttgtcgtcatcataaccatggttcaggaccttcttctccttcttgttgctcgaatcctggggtggcgcctgctgggcccgccgcttcttcttcgcatagtatacctcattgatgtgcttgtaggtcttgatgaggtccacagagagcttacgcagcggggctgaggttgcatcccggaaggccaggggcagcctccgaggcagtagccgcacatcaggcaatacctgcgtgtgctcctggggccctgggaagccagagaagggaccatggcccggtgggacggccat

SEQ ID NO: 10761 - DNA, 2724 bp, Homo sapiens
  SIMILAR (96)..(956): 561254mologous to Homo sapiens fanconi anemia protein E,accession number AF265210,Smith-Waterman Score=654.
atgcatccacgttttcaaaccgcttttgcccaacttgcggataacttgcaatctgcactggaacctattctggcagacaagtacttccccgctttgttgaccggggagcaagtctcatcgctgaagagcgcaacggggctggacgaagacgcgctggcattcgcactacttccgctggcggcggcctgtgcgcgtacgccattgtcgaattttaatgttggcgcaattgcgcgcggtgtgagcggaacctggtatttcggtgccaatatggaatttattggtgcgacaatgcagcaaaccgttcatgccgaacaaagcgcgatcaaccacacctggttgagtggtgaaaaaacgcttgcaaccatcaacggtagagagtcgacttgctgtctgcagtcgatgttcactttagatagacactctggtatgtttctggtgtcaaaatcctttccaagtcagttctttaccaacgatatgggtggcaacatgatgatgtacatcaacctgatttgggcctggggccacccggaagtttacatcctgatcctgcctgttttcggtgtgttctccgaaattgcggcaaccttctcgcgtaaacgtctgtttggttatacctcgctggtatgggcaaccgtctgtatcaccgtgctgtcgttcatcgtttggctgcaccacttctttacgatgggtgcgggcgcgaacgtaaacgccttctttggtatcaccacaatgattatcgccatcccgaccggggtgaagatcttcaactggctgttcaccatgtatcagggccgcatcgtgttccattctgcgatgctgtggaccatcggttttatcgtcaccttctcggtgggcgggatgactggcgtgctgctggccgtaccgggcgcggacttcgttctgcataacagcctgttcctgattgcgcacttccataacgtgatcatcggcggcgtggtcttcggctgcttcgcagggatgacctactggtggcctaaagcgttcggtttcaaactgaacgaaacctggggtaaacgcgcgttctggttctggatcatcggcttcttcgttgcctttatgccactgtatgcgctgggcttcatgggcatgacccgtcgtttgagccagcagattgacccgcagttccacaccatgctgatgatttgcgccagcgaggaagcgcagcggatgcagcaggcaagtgaagacgaatttaatcgcgcgttaaatatcgcttttgataatcgcctgggcttatgcaaggttgagagcgcgcgtcaggtgttcccactgacggggcgttatgcgcgccagtttgcctcgcaccgtctggcgctggtgggcgacgccgcacataccattcacccgctggcggggcagggggtaaatctcggctttatggatgctgcagagctgattgccgaactgaaacggttgcatcgtcaggggaaagacatcgggcagtacatttatctgcgtcgctatgagcgtagccgcaagcacagtgcggcgttgatgctggctggcaggcatcacccgctacgcaatttccagctcactgcatttcagcacagcactcatcagccatccaacacatcatttttcaatatccagacaaacctggcatttaccaccaatgggacctggacctgggagcaagacttggcttacgcccaagattcccgggcagaacgggttaaacatccgctatttatcagtctgctgattatcacgttgtcgtttatcccgatcttcaccctggaagggcaggaagggcgtctgtttggcccgttggcgttcaccaaaacgtatgcgatggcgggtgcggcgctgctggcgatcgtagtgatcccgatcctgatgggctactggatccgtggcaaaattccgccggaaagcagtaacccgctcaatcgctttttgattcgtgtttatcatccgctgttgctgaaagtactgcactggccgaaaaccacgctgctggtggcggcgctttcggtgctgacggttctctggccgctcaataaagttggcggggaatttttaccgcagatcaatgaaggcgacttgttgtatatgccatcgacgctgccggggatttccgcagcagaggcggcgagtatgctgcaaaaaaccgacaagctaattatgagcgtacctgaagtggcgcgggtatttggcaaaaccgggaaagcggaaaccgccaccgattctgctccgctggagatggtagaaacgaccatccagcttaagccgcaggagcagtggcggccaggcatgacgatggacaaaatcattgaggaactggataacaccgtgcggctgccggggctggcgaatctgtgggtgccgccaattcgtaaccgtatcgatatgctctcaaccggcattaaaagccccatcggcattaaagtttccggcactgtgctggcggatatcgacgcgatggctgagcaaattgaagaagtagcgcgaacggtgccaggcgtaatttctgagcttgacgagcggctggaaagtaccgagctagaagtcgtatccaacagcgcgcggttctggcagagtcgggttgaatgcggcgttttcagcgtagctgccactgaaaatacgaccgtctttacattccagcgcgacaccgcttggcgacttactgtaaggcatgtgcgaacggtttgccgccgcaatcaataccgctaccggcgctcagaccaacgcctgccataa

SEQ ID NO: 10762 - DNA, 2458 bp, Homo sapiens
  SIMILAR (2796)..(1528): 991254mologous to Homo sapiens glycosylphosphatidylinositol anchor attachment 1 (GPAA1),accession number AB002135,Smith- Waterman Score=2152.
cgacgggatcgatcatccgaaggtattgagttatctcgatgtactgcgcgacaaagcgccggttggcaacaaagttgccatcatcggttgtggcgggattggttttgatacggcgatgtatttaagtcagccgggcgaatccaccagccagaatatcgccgggttctgtaatgaatgggggatcgacagtagcctacaacaggctggtggcttaagcccgcagggaatgcagatcccccgtagcccacggcagattgtgatgctccagcgcaaagccagcaaaccaggacaggggttaggcaaaaccaccggctggatccatcgcaccaccctgctctcgcggggtgtgaaaatgatcccaggcgtaagttatcagaagattgacgatgacgggctgcatgtggtgatcaacggcgaaacgcaggtattagcagtggacaatgtggtgatctgcgcagggcaagagccaaaccgcgcgctggcgcaaccgctgattgatagcgggaaaacggtgcatttaattggcggctgcgatgtggctatggagctggacgcacgacgggcaattgcccagggaacacggctggcggacctgcaggcagcaagtcaaggcacttgcattgatgaccaggatatcactatcgatacttatgaattcactactgactatctggagaatcccacctgtggtgaaaaagtagtggaagagacgcttgtcagccacctgctgaaatcaaactgcctgatcacccatcaaccagattggggttcgctccaaattcagtatcgtggacgccaaattgacagagaaaaactgctgcgttacctggtctcattccgtcatcacaacgagttccacgaacagtgcgtggaacgcatctttaatgacctgttacgcttctgccagccagaaaaattgagcgtttacgcacgttatacccgtcgtggcggtctggacattaacccgtggcgcagtaatagcgattttgtcccatcgaccacaagactgctggaagtggatatgcttaaacgcaccgccagcagcgacctctatcaactgtttcgcaactgttcacttgccgtactgaactccggtagtttgaccgataacagcaaagaattgctgtctcgttttgaaaatttcgatattaacgtcttgcgccgtggggggggcagtatgctaaacatcgtactttacgacccagaaattccgccaaatactggcaacatcatccgtctttgcgctaataccggctttcgtctgcatatcatcgaaccgatgggatttgcctgggacgataagcgcttgcgccgcgcggggctggactatcacgagtttaccgccgttacgcgtcatcatgactatcgcgcgttcctcgaagcagaaaatccccagcgcctgttcgccctcaccacgaaaggtacacctgctcacagcgccgtaagctatcaggatggcgattatctgatgttcggcccggaaacacgcggcctgccagcgagcattcttgatgccctgcccgctgaacaaaaaattcgcattccgatggtgccggacagccgcagcatgaatctgtccaatgcggtgtcggtagtggtgtatgaagcctggcggcagttggggtatccgggagcggataccggggcgtatcacatcattccgtggtcttcgataaccacctttgctaactttgtccgcggcattgtttcggtggtggcaaattatgatgttgatcgccatgaagatgctgataaagccaatcaggcactgaaagatgcggtagcggaattaatggaaaacgaagaaattcgcgggctgattattggtgaaccgaattttgccgggattgtcggcttaagcaataccgcgtttacactgcgtgtttcgttcaccacgctgccactcaaacagtggacgagcgacctgcaggcacattgccttggccgcaaatccaaaagaatatcccactcgaagacgaccagggcagtcacttccgtctggtggttcgtgatactgaaggccggatggtctggcgggcatggaactttgagccggatgccggtgaaggtcttaaccgctatatccgcacctcaggcatccgtacagacacggccacccgctgatcgcgaagcatttacccgcattcacctccccgaacacactttatatccccatacgccagccatcgccgctggcgtttttattgacggagacatacccatgacaacacagacgcagcacgacctcgcacccgctaaccaacccgaatttgaactgaccgtcacgccggtccccgatgaacagcgtatcgatttctggccacagtactttggcgctatcccgcagtggctactcctggagccgcatatcttcgcctggatggaccgcttctgtgagggctacagcggtgtatctggtcgttctacggggtcctcaagaggcgacctgcaggcatga

SEQ ID NO: 10763 - DNA, 1317 bp, Homo sapiens
  SIMILAR (73)..(507): 931254mologous to Homo sapiens laminin-binding protein,accession number J03799,Smith-Waterman Score=723.
atgctagctgactgcaaaaactttgattcgtcagacctgatttccgacctcgcgggcgattgccaacgtcaacggcaaatcagctgcggtagtttgctcaaccggacacgccagcgctattgttcccgtcaatcggcccttgctgtcaaacaacggcgttgcacaaaaggcccagttccagagtacctgtttgaaatgttgatcggccatcgtttgcggatcgccattacggctgagaatgcaggcggtttcatcgaggataaacagcgcacactctcgcggtgccatatattcccaggcatcttccagcgcagcctgcccgagcgtcagcatcgctttcttacgccgataaatagaagcaaatgtcagttgatacgaaccctgctaagtaccctgtgtactccaaaatgtggtccaggattcaagcatcggattgttctgtgcaagagcagtgacctttctaagacattcccagctgcacaatgtccagaggaaagcaaacctcctgtccgcatccgctgcagtttgggccgctgccctcctcctcgctgggtcacaggagactggggccagtcgactctagagatccccgacctggtcgaagacggcgggacttttgccgaaacggtagagctggcgcaggccattgaagcggcgggcgcgaccattatcaacaccggcattggctggcatgaagcacgtattccgaccattgccacgcccgtgccgcgcggcgcatttagctgggtcacgcgcaaactgaaaggccacgtctcgctgccgctggtaaccaccaaccggattaacgatccgcaggttgccgacgatattctctcgcgcggcgatgccgatatggtatcgatggcgcgaccgtttcttgctgatgcggagctgctgtcaaaagcgcaatcgggacgagccgatgagatcaacacttgtattggctgcaatcaggcctgtctcgatcaaatcttcgttggcaaagtcacctcgtgcctggtgaatcctcgcgcctgccacgaaaccaaaatgccaatccttcccgccgtgcagaaaaaaaatctggcggtggtcggtgcgggacctgctgggctggcgtttgccattaacgcggcggcgcgtgggcatcagatccccggcaaagaggagttgtacgaaacgctgcgctattaccgccggatgatcgaagtgacgggcgtgacgctaaaactcaatcacaccgtgacggcggatcagttacaggctttcgatgaaacgatcctcgccagtgggatcgtgccgcgcactccgcccatcgacgggatcgatcatccgaag

SEQ ID NO: 10764 - DNA, 2055 bp, Homo sapiens
  SIMILAR (3)..(2477): 971254mologous to Homo sapiens putative p150,accession number U93563,Smith-Waterman Score=4283.
atggaatttattggtgcgacaatgcagcaaaccgtcatgccgaacaaagcgcgatcagccacgcctggatgcctttgggccgaagatctggagattaaaaccctgctgatggacgaacaggattcacgctttgcgcgaccggtgaagcgctttcttcagcaacgattgcggccgcagaacgtcgccaagccttacaagaaggttgcgacgatattctctcgacggcgatgccgatatggtatcgatggcgcgacgtttcttgctgatgcggagctgctgtcaaaagcgcaatcgggacgagccatgagatcaacacttgtattggctgcaatcaggcctgtctcgatcaaatttcgttggcaaagtcacctcgtgcctggtgaatcctcgcgcctgccacgaaccaaaatgccaatccttcccgccgtgcagaaaaaaaatctggcggtgtcggtgcgggacctgctgggctggcgtttgccatttaatatcgccaaacagatccccggcaaagaggagttttacgatacctggctattaccgccggatgatcgaagtgacgggcgtgacgctaaaactcaacacaccgtgacggcggatcagttacaggctttcgatgaaacgatcctcgcagtgggaatgtgccgcgcactccgcccatcgacgggatcgatcatccgaggtattgagttatcccgatgtactgcgcgacaaagcgccggtttgaacaagttgccatcatcggttgtggcgggattggttttgatacggcgatgtattaagtcagccgggcgaatccaccagccagaatatcgccgggttctgtatgaatgggggatcgacagtagcctacaacaggctgattgtgatgctccagcgaaagccagcaaaccaggacaggggttaggcaaaaccaccggctggatcctcgcaccaccctgtctcgcggggtgtgaaaatgatcccaggcgtaagtttcagaagattgacgatgacgggctgcatgtggtgatcaacggcgcaaaccagggcagcgacatgctcaggcttcaaggcgagctagattcagccagtagaatcgggcgacggtctgcggctccgaagttgggaagcctgaacgacggccggtgcttcattaactgccacattctggacaggttaccctataaaggtctggtccccgcctgcagctggaatggaggctctctggaccctttagaaggtcgaccagatgaaccgcatgtggaggtgctgggcatcccaccggccgccatgctggaccaggcgcccaggctcgcaagtactttgaacggctgcctgggggtggctggaccctacgaggacgaaagaactcaggaaggattaccagggccccgggacacggcggctgaagaggtgctgggcgtgcagacgggcggggccgggtcgcgtgggcgggtgcgcgggccacagcccgccgacctaccctccgcttcaggacctggtgctgcatgctggagtatgagcccgccgcccgatcagcccccctgcgtcctggcacacggcttctttcgccgcacgcccaccagcacccaacaacggcccgcagagcagtgcttccactcgcccgcgcccctcgaactgcccctttcaagcaccagctccatcctcagttttgcggaatatggcaacgccatggcctggttgtaccgcgggaaaatattgccaagcggcacgccggacgatttgaaagcacagtcggctaacgatggcaaccccgatcccaccatggagaaagcctttattcagttgatccacgatgggataaggagcatagcaatgagtaacccgatcctgtcctgccgtcgctacgggcgctaccaagaatggtgtttaaccatccctgcggtgttcatcagcgcgccatacgtacggcgttacgtgcgattccacgaacatcaggaaggtggaggtgtacggcaggaagccaccgtgagggagataccgttagcaatcgcggtcataccgaactcgcgaacaccgtgtggatgtagttacccgcagcatcttcgttga

SEQ ID NO: 10765 - DNA, 534 bp, Homo sapiens
  SIMILAR (1)..(483): 661254mologous to Escherichia coli ilvE,accession number M32253,Smith-Waterman Score=469.
gatgcgatggtttcctcctggaaccgcgcagcaccaaacaccatcccgacggcggcaaaagccggtggtaactacctctcttccctgctggtgggtagcgaagcgcgccgccacggttatcaggaaggtatcgcgctggatgtgaacggttatatctctgaaggcgcaggcgaaaacctgtttgaagtgaaagatggtgtgctgttcaccccaccgggttcacctcctccgcgctgccgggtattacccgtgatgccatcatcaaactgggcgaaagaagctgggaattgaagtacgtgagcaggtgctgtcgcgcggaaatccctgtacctggcggatgaagtgtttattgtccggtacgggcgggcgaaatcacgcccagggcgcagcggaaacgggtattcagggttggcgaaaggccgttgtggcccggttaccaaacgcattcagcatgcgttgcaaggcgtttatagctgggtaaccccaggatatttcgagtcggttcgttgtacagcgtacggacattgaatctcg

SEQ ID NO: 10766 - DNA, 576 bp, Homo sapiens
  SIMILAR (1)..(375): 821254mologous to Escherichia coli K12 putative activating enzyme,accession number AE000508,Smith-Waterman Score=501.
atgttgaagggaaccggcgggggaaaatggccccccggtgtgcgacggcgcaatgctcgatctcaaagcgtggggagcgaatgtcatcaacaactcaccggacgcgataatcagcagattaagcgcagcatctatttgctgccagagcgcgccaagctggcggaactgcgtttgctggtgatccctggccaggtggattatttgcaacacatcgaagaactggcggcgtttatcaagggactcggcgatgttccggtacgcctgaacgcgtttcatgcccacggcgtgtatggcgaggcgcaaagctgggcgagcgccacgccggaagacgttgagccgttggctgatgcgttaaaggtgcgcgggacttgtaggcctgataagacgcgtcaagcgtcgcatcaggcattgtgcgccaactgccggatgcggcgcgaacgccttatccggcctacggttcggcacaaacctgtaggcatgataagacgcgacaagcgtcgcatcaggcattatgcgccgactgccggatgcggcgtgaacgccttatccggcctacggttcggcacagacttgtag

SEQ ID NO: 10767 - DNA, 501 bp, Homo sapiens
  SIMILAR (1)..(366): 991254mologous to Escherichia coli ribonucleotide reductase,accession number X06999,Smith-Waterman Score=629.
tctaacgccactaacggtattgaaccgccgcgcggttacgtcagcatcaaagcgtcgaaagacggtattttgcgccaggtggtgccggactacgagcacctgcacgacgcctatgagctgctgggggaaatgccgggtaacgatggttatctgcaactggtgggtatcatgcagaaatttatcgatcagtcgatctctgccaacaccaactacgatccgtcacgcttcccgtcaggaaaagtgccgatgcagcagttgctgaaagacctgctcaccgcctacaaattcggggtcaaaacactgtattatcagaacacccgtgacggcgctgaagacgcacaagacgatctggtgccgtcaatccagggacgatgggctgcgaaagcggcgcatgtaagaatcctggatatttgagaatgcccggatgccggcgtaaaacgcccttaatcccggccttaccgggcttcgggttttggtaggccccttgataagaaggccgcc

SEQ ID NO: 10768 - DNA, 445 bp, Homo sapiens
  SIMILAR (35)..(106): 1001254mologous to Homo sapiens Human secreted protein, SEQ ID NO: 7185,accession number G03104,Smith-Waterman Score=123.
atggacagcctcatggacatgctggccagtaccccagggccgccgcatggatgaccaacgtgtgacagtcagcagcctgcccggcttccagcccgtggggtccaaggcctacaaaccgagccgtaggccggataaggcgtttacgccgcatccggcatctcaatatcagatcttacatgcgccgcttgtcgcagccatcgtctctggattgacggcagccagagtcgtctttgtgcgtcttcagcagccgtcactgggtgtgctgagtaatacgagtggttgtgacgccacgaatgttgtaggacggttgcaggataacgcatcggttagcccaggcattgtccacacagacagcgtcatatggcggtcgtgtcaggtgcgtcgtagtgccgtgcacacactctggcggcaaaagacacgtctgttcgacgctgttgatgcgtga

SEQ ID NO: 10769 - DNA, 323 bp, Homo sapiens
  SIMILAR (71)..(232): 661254mologous to Escherichia coli Acetyl-CoA:acetoacetyl-CoA transferase b subunit (EC 2.8.3.-),accession number D90851,Smith- Waterman Score=180.
atggatctggtgaccgggtcgcgcaaagtgatcatcgccatggaacattgcgccaaagatggttcagcaaaaattttggcgccgctgcaccatgccactcactgcgcaacatgccgggcatatgctggttactgaactggctgtcgtgcgttcgtttgacggcaaaatgtggctcaccgaaattgccgacggaccaacttcacaggctcaaccagctgccacctacagaatccctctatcgaactctagggttcgccgtcgttatcgacatcgctactatcgctacaacctttcaatacgaaaaaagcggcaccgcccattag

SEQ ID NO: 10770 - DNA, 1485 bp, Homo sapiens
  SIMILAR (37)..(510): 981254mologous to Escherichia coli K12 putative enzyme,accession number AE000390,Smith-Waterman Score=808.
ctatccacaaccatgcgaatgtcttctcccgcaccgggcttgatatcggcgcgcgctatctttatgcaacatctgccagagaatctcgaaggggagatagtcgatctcggttgcggtaatggcgttattggtctgacgctgcttgataaaaacccgcaggcgaaagtggtgtttgtcgatgaatcgccgatggcggttgcttccagccgtttgaacgttgaaaccaacatgccagaggcgttggatcgctgcgagtttatgatcaacaacgcgctctccggcgtggagcctttccgctttaatgctgtgctctgcaacccgccgtttcaccaacaacatgcgctgaccgataacgtcgcctgggagatgttccaccacgcccgccgctgcctgaaaatcaacggcgagctgtatatcgttgccaaccgtcacctggattacttccataaactgaagaagattttcggcaactgcaccactatagcgacgaataataaatttgtggtactgccggatgcggcgtaaacgccttatccggcctacgttcagcacgtaactccaggccggataagacgcggcaagcgtcgcatccggcaatgtctgccagttctggaatcgcgcttccataacacgcagaaatcccggggcgagacagagggcgcctcgggcttctcgctccagcaccatctcggggacagctcccgcgccgcaccgggtccctatcgggtcagcactgcagcggcggacagcggcggccgggcgggctcctccgcaccctccgcactggttccgcgcggctgctaaggaccgtccctcgcccccgcgggccgctcccaacgctagcaccgcggcggcggacagctctctccggcggcaccgcgaaccgcgaacaaagccgcgggtctggggcccccagcgcgcctcaatttcttcattagagcgcaatgcgacagccgcatcaacgacatcacgcgttaaatgcggtgcaaaacgctgaatgaaatcatacatataactgcgcaagaaagtactacggcgaaaaccaattttggttgtactgtggctgaagatatcgtgagcatcaacacgcacaaggtcgggatcggcgaccggatccaccgccatgctggcaatgacccctacccccagccctaaccggacgtaagttttaatgacgtcagcatccgttgccgtgaaaacgatacgcggcgttaaccctgcgcgattaaaggcagtatccagttctgaacgtccggtaaagccgaaggtatatgtcaccaacggatattgcgccagttcttcaatggtaatggcttttttgcccgcatgcatatctcgttgtacggcggcagagccaggctttgtagagccctgaagcttacatgagctggagtgtatctcccgaagaaaaagagtacaaaaggataaatgggacaatgaagtccagagtcctagaaaacgagggtccctgaagcttcgggccat

SEQ ID NO: 10771 - DNA, 2049 bp, Homo sapiens
  SIMILAR (807)..(1628): 691254mologous to multiple sclerosis associated retrovirus polyprotein,accession number AF009668,Smith-Waterman Score=947.
tcagtgctcgttgataatgatgacagtggtagtggcagtggtgatgattacgatgatgaaggcaagagaaacaactgccactaccttttcacaaactttggactttttattatctacactaggtctttcgtgatgagtggtagttatacccagctcaaacttcaggtacactatgactcgacagtcagttctcttcagggcctcaggagggtgtggaaaacgcgaagctcgggatttattcaaactgataccgtagctctcttcatagacaaagagcttgatatcatcaatgtcatcaatatcttcgccgccggtggtattgatttgcagaaactcatcgcctgaagtgtagtagcggaaaatctgactaccgccgcccagatcgatgtggctgacggcggctaccgtaaattcctcacccggcagcgcaatcagcaattcatcttccagcaaacgaaacgctaacgtgtcgagcgtaaagccactattgagatgaagtcccagcggaccacgagcgatagctggcttattatccttgccaaacagacgttttattgctaccgccaattccggcttcggccagcttttcgtcaaggtcgcgaccgtctgcgactttctccaactgtgcggcacatccaagcgagcctgacgttcggcctgacgcgtttgcaggcgttttaaagatttctgcgctgtccgaacgtttaaggtccggatatcgtgtccagcatgggacgcccttggtttttcaatgggtttccccttggggaaaaagattcccccgggaaaaaaatttttaagccccttattggttaacaagcggacttcattgacgccaaggagtttgaacatatcagcgcaaagagtgaagtcgcgctcatcagcggcgaagcctaactggtggttagcctctacggtatcgtaaccttgatcctgcagtgcgtaagcgcggattttattcagcagaccaatgttacgaccttcctgacggtgatacagcaaaataccacggccttcctcggcaatttgcgtcaatgccgcttcgagctggaagccacaatcgcagcgcaagctgaacagggcgtcaccggtcagcgccagttctgttgaacccatatgatccaggatcttctgattctttttcagccccttccgctgatgaatagctttctgatctaatccaccatacagcccctggtaaccatgattctgaaatatggcgaaatcagtagctgtcgctaccccagcttgctgtgctgcctcaaccaattgtttgttatgttctttcaactcatttctcagaaacagacgcttttcgtcttcacgaagttgcttaaatgcttcatcgtcagcaagctcctgccgtcgggtctggatagcaaaataagtctgccctgccgcaatgaccggtttcgcagggtcgccgttttgtactgcagtggtgacatttcccgacatcacaccgctgttatggatattaatgtgttgacttgccatattaatggcagagtcggaaccgaaagcaatttccccccccacgatatccgtcgtaccctgatacgccgcggaatcgttgttaagagtcaggatcccggtacccagttttgtcacatcaccgctaccgctgatactgtgcgtcatcgcccagctacgctcagtggagatggtgagcaggccattattgataacggaagcatcacccaggtttttctgctcgttgacgctgagcgcgctgcctgtatcaatgttgaattgccccacaaagcggctattatcgccatccaactctacatctgtcctggcggttgcgctcacgatacccttcccgcttatgctattacgcagttcgccagtcacgttttttagcgttaacagaccgtcatgggcaatatttcctctgcctaacccctgagtattatcgaggctgacttccgcatttgggctaatgctggttaacgcatggtagcgggcattaagccctcgatagccagggtccccctggtacttcaggtttccgcactggaagtccctgaacaatgctaccgccat

SEQ ID NO: 10772 - DNA, 1746 bp, Homo sapiens
  SIMILAR (928)..(1596): 991254mologous to Escherichia coli lysophospholipase L2 (aa 1 -340),accession number X03155,Smith-Waterman Score=1190.
atgccaaaaccaaatacacgctggagcgcgtgggggttgagacgtttaaagcggaagtggagcgtcgcgcggggatcaaatttgaaccgatccgtccaatatgagttcaccggacgaggcgatcgtattggctgggttaagggcattgatgataactggcacctgacgctgtttatcgaaaatggtcgcatccttgattatccggcgcgtccgctgaaaaccggcctgctggagatcgcgaagatccacaaaggcgatttccgcattaccggcgaaccagaatctgatcatcgccggtgtcccggaaagcgagaaagcgaagatcgagaagatcgccaaagagagcgggttaatgaatgccgtctcgccgcagcgtgaaaactcgatggcttgcgtgtcattcccgacttgcccgctggcgatggcggaagcagagcgtttcctgccgtcttttatcgacaacatcgataatttaatggcgaaacatggtgtcagcgatgagcatatcgtgatgcgtgtaacaggctgcccgaacggttgtggtcgcgcgatgctggcggaagtgggcctggtgggtaaagcgccgggtcgctacaacctgcatcttggcggcaaccgcattgggacacgtatcccacaaatcacgcgccggatcgagcaccgggcgaatgatgcccgcacgcaccgtaaagtcgccgaagccttcacccgcttcgcgctctttcgcccagcgccctatcagttcatcaagcgacgccaggatttccggctcgtgatgttttcaatatacatgccggtaccgagctgatctgcttcatcacgctgacgccagaaatcagtcagcggtcccatggtaaaagcagcaaacgcgttttctcttgtttcccagtctttttgctgctgaaacatcggcgtattgtggcacaaaaatatgcggaactggcctatgacctgttccatttggggtttgatgtcttaatcatcgaccatcgcgggcagggacgttccggtcgcctgttagccgatccgcatctcgggcatgttaatcgctttaatgattatgttgatgatctggcggcattctggcagcaggaggttcagcccggtccgtggcgtaaacgctatatactggcacattcgatgggcggtgcgatctccacattatttctgcaacgccatccaggtgtatgtgacgccattgcgctaactgcgccaatgtttgggatcgtgattcgtatgccgtcatttatggcacggcagatcctcaactgggccgaagcgcatccacgtttccgtgatggctatgcaataggcaccgggcgctggcgcgcgttgccgtttgctatcaacgtactgacccacagcagacagcgatatcgacgtaacttacgcttctatgctgatgacccaacgattcgcgtcggtgggccgacctaccattgggtacgcgaaagtattctggctggcgaacaggtgttagccggtgcgggtgatgacgccacgccaacgcttctcttgcaggctgaagaggaacgcgtggtggataaccgcatgcatgaccgtttttgtgaactccgcaccgccgcgggggtaccgagacgatggtatacaacaggaggtttttccgatgcttatctttatcccgattctcatttttgtcgcgctggtcattgtcggcgcgggtgtcaaaatcgtaccgcagggctatcagggtttacgccgtctattactctagatagagagtaa

SEQ ID NO: 10773 - DNA, 1004 bp, Homo sapiens
  SIMILAR (1)..(474): 991254mologous to Escherichia coli similar to ~start codon is not identified yet,accession number D90869,Smith-Waterman Score= 796.
atgcgctttgacatgatgggttttctgcgcgggctggattgcggtaagaacggtgaaaccactgtaatgataggcaattcaggtaataaaaaagccggagctccctttccggcacgtctcattgccgtatcacttcctcccgaaaaagcattaatcagtaaaacccgactgctcagcgagaatcgtcgaaaaggacgagtagttcaggcggaaacgctggaagcagcgggccatgtgctattgctaacatcattaccggaagatgaatattcagcagagcaagtggctgattgttaccgtctgcgatggcaaattgaactggcttttaagcggctcaaaagtttgctgcacctggatgctttgcgtgcaaaggaacctgaactcgcgaaagcgtggatatttgctaatctactcgccgcatttttaattgacgacataatccagccatcgctggatttcccccccagaagggcggaaatcactattgctgccgatggcacaatctcggcgctcaatccgggcgatccggcaaatacggttgcgccagtagggcgtcttaaactggtgaaagccacgggcagcgaagtgcagcgcggtgacgacggcatttttcgtttaagcgcagaaacccaggccacgcgtgggccggtactgcaggcagatccaaccttgcgtgtgatgtcgggggttctggaaggcagtaacgtcaatgccgttgcggcaatgagcgacatgattgccagcgcgcggcgttttgaaatgcagatgaaggtgatcagcagcgtcgatgataacgcaggccgtgccaaccaactgctgtcgatgagttaattgaaaggatacatgacaagtataagttgcccgatgcgcaagtttatcgggtctatgggggcaatcgcaatttatcgattttgcgagcacttgtaggccggataaggcgtttacgccgcatccggcaagaagacatatgcactttgtcaataatccactacaggacattttat

SEQ ID NO: 10774 - DNA, 862 bp, Homo sapiens
  SIMILAR (1)..(5070): 1001254mologous to Homo sapiens KIAA0423,accession number AB007883,Smith-Waterman Score=8610.
atgaacttatcaaaccacgataccgtgacgacacatacccgcaactatgaatcgccgcagattacgacgatatacagcaattacggacatgacaaccctactaacctgggaaccccgcgatttccgaggggttaccctgccaaattggcaggctgcccatttccgaaggcccagtggcacgttaaggacccgaggtggaccttggaggtcccgcgcgtgttgtggggtagctggggggttggacttggaggtgggggtcacgtcgcggttcggacgcgcgtgggcctgccggggatgtcgggggtgcccaggttggttggggttggctctcggggggacagattaaatcgagctcggtacccgacatcacacgcaagtaccggcccacgcgtggcctgggtttctgcgcttaaacgaaaatgccgtcgtcaccgcgctgcacttcgctgcccgtggctttcaccatttaagacgccctactggcgcaaccgtatttgccggatcgcccggattggcgccgagattgtgccatcggcagcaatagtgatttccgccccttccggcacagcaattggcccagcctcgcctatcaccggatgcccctgaattgtcagttgcccggtgggatcaacctgaatgctgccattacgcgtatacccttcgctgccgtcagcggtctgcacggccagccagccatcctgctgcaacgcgacgtccagcgggcgcgagagaaagcccttccctggcaccgcgcgtaaagcattcaactgcgcgcgaaaaccgggcgttgagcattggccagattactggcggttaccgcctgttgattcagtgtctggcggctgctcccatcgcggtataa

SEQ ID NO: 10775 - DNA, 678 bp, Homo sapiens
  SIMILAR (82)..(675): 861254mologous to Escherichia coli inner membrane copper tolerance protein,accession number Z36905,Smith-Waterman Score=853.
atggagattgtaattccggaagttgcaagtatgttggctgccaagaccccatttgcgcccgtggtggacatgcaagccgcgttggtttggatcctgcctgcgcgtcttcctgctgagcgagtgattgtgatgtatgggattacgcttgtggtcggcgctgggtgtcgcattctttggctggcctttatcaccagcctacaggctaaacgcggctggatgcgtattgtgccaattattctgctggcagcggcattggttagcgtgcgcccacttcaggattgggcatttggtgcgacgcataccgcgcaaactcagacgcatctcaactttacacaaatccaaacggtagatgagttaaatcaggcgctcgttgaagcccaaggcaaaccggtgatgttagatctttatgccgactggtgcgtcgcctgtaaagagtttgagaaatacaccttcagcgacccgcaggtgcaaaaagcgttagcagacacggtcttacttcaggccaacgtcacggccaacgacgcacaagatgtggcgctgttaaagcatcttaatgtccttggcctaccgacaattctcttttttgacggacaaggccaggagcatccacaagcacgcgtcacgggctttatggatgctgaaaccttcagcgcacatttgcgcgatcgccaaccgtga

SEQ ID NO: 10776 - DNA, 1416 bp, Homo sapiens
  SIMILAR (1534)..(1842): 941254mologous to Homo sapiens unnamed protein product,accession number AK001990,Smith-Waterman Score=488.
gggatggcgctgacctacacggcgctgggtctggtggttgccgccgcagggttacagttccaggcggcgctacagcacccatacgtgctcattgggcctcgccatcgtctttaccttgctggcgatgtcaatgtttggcttgtttaccctgcaactcccctcttcgctgcaaacacgtctcacgttgatgagcaatcgccaacagggcggctcacctggcgcgcgattctgctgtatatcgcccaaagcgggaacatgtggctgggcggcggcacgctttatctctatgcgttgggcatgggcctgccgctgatgctaattaccgtctttggtaaccgcttgctgccgaaaagcggcccgtggatggaacaagtcaaaaccgcgtttggttttgtgatcctcgcactgccggttaatatcgcaccgggatcgctcgataaagcgctcaatcagtatgccgcacacagcggatttaccctctcggttgacgccagcctgacgcgcggcaagcagagcaacggcctgcacggcgattacgacgtcgagagcggcctgcaacaactgctggacggcagcggactgcaggtaaaaccgctgggaaataacagctggacgctggagcccgcgcccgcaccaaaagaagatgccctgaccgtggtcggcgactggctgggtgatgcgcgtgaaaacgacgtatttgaacatgctggcgcgcgtgacgtgatccgccgtgaggatttcgccaaaaccggcgcaaccaccatgcgtgaggtacttaaccgcatccctggcgtcagcgcgccggaaaacaacggcaccggcagccacgacctggcgatgaactttggcatccggggcctgaacccgcgcctcgccagccgctcgaccgtcctgatggacggcatcccccgtccccttcgccccttacggtcagccgcagctttcactggctcccgtttcgctcggcaacatggatgccattgtacgtggtacgcggtggtggtgcggtgcgttacggacacgcagagcgtgggcggcgtggtgaactttgttacccgtgccattccgcaggactttggtatcgaggcggggatccttatgagcgaccttaagcatgggtcgctcgtgggcgcttgtttggggcggcttgggccgggggcggtgttgtatctggccgtggcggtgttgggtgtgcgcgtgcggcgtggggtagtgcttgtgtgtccgttgggaggcaccggcttgggttacagttgccaagggggagcgttccagtttgcagcctcttgctttcttggacggtacggcgtcgtccagggggtgatccatgtctgttttggtcctcgatcggtattcctcgacgactgtttacggttcgacttaccttgtctggtatggctcagctgtcctcgttga

SEQ ID NO: 10777 - DNA, 910 bp, Homo sapiens
  SIMILAR (1)..(609): 771254mologous to Homo sapiens ribosomal protein L13,accession number BC000851,Smith-Waterman Score=778.
ttgctcaaaccgtttcacgtgatagcaatcgccacagggcggtcactggcggtgttttgtatggggcgattgcggactatctgttcacatgccacaccgcccgctagcgcgattctctgtatatcgccaaagcggaacatggggtgggggcggcacgctttatctctatgcgttgggcatgggcctgccgctgatgctaattaccgtctttggtacccgcttgctgccgaaaagcggcccgtggatggaacaagtcaaaaccgcgtttggttatgtgatcctcgcactgccggtcttcctgctggagcgagtgattggtgatgtatggggattacgcttgtggtcggcgctgggtgtcgcattctttggctgggcctttatcaccagcctacaggctaaacgcggctggatgcgtattgtgcaaattattctgctggcagcggcattggttagcgtgcgcccacttcaggattgggcatttggtgcgacgcataccgggcaaactcagacgcatctcaactttacacaaatcaaaacggtagatgagttaaatcaggcgctcgttgaagccaaaggcaaaccggtgatgttagatctttatgccgactggtgcgtcgcctgtaaagagtttgagaaatacaccttcagcgacccgcaggtgcaaaaagcgttagcagacacggtcttacttcaggccaacgtcacggccaacgacgcacaagatgtccctacttcagccccctttatatcgcccccaaacgccttggtggcgatcattgtacagttgcgctttggagacttctataatcgggtctctaagggaagtaggcccacagtgttcggacgtacactcaaggctagaaggattacgcttagtgagaaaagcattttgaaagccaagatacactga

SEQ ID NO: 10778 - DNA, 922 bp, Homo sapiens
  SIMILAR (166)..(327): 1001254mologous to Homo sapiens dJ488C13.1 (RNA guanylyltransferase and 5'-phosphatase (mRNA capping enzyme, CAP1A)),accession number AL133408,Smith-Waterman Score=296.
tttcgtccggtggccacggccgccgcgctgctggtcggctccagcaccctcttcttcgtgttcacgtgcccgtggttgacacgagctgtgtccccagctgttcccgtctacaatggcatcatcttcctctttgtcctggccaacttcagcatggccactttcatggaccctggtgttttcccccgagcggatgaggatgaggacaaggaggacgacttccgggctccgctgtacaagaacgtggatgtgcgaggtatccaggtccgcatgaagtggtgtgccacgtgccacttctaccgcccgccgcgctgctcccactgcagcgtctgtgacaactgtgtagaggactttgaccaccactgcccctgggtcaacaactgcatcgggcgtcgaaactatcgctacttcttcctgttcctgctgtcactcagtgcacacatggtgggcgtcgtggccttcggcctggtctacgtgctgaaccacgctgaggggctgggagccccgcacaccaccatcacgtatccttggttcctgtgggcctcattgcagaggcgatgtggaccggggacacgttcacccaggagaatgagccttccaaagcttggttccttgccaagggacccccaaggggccaatggcccctccctaagttggcaggggggttagtccaccggaacccgagttgaagctgctctctcttgcgaatcgcctccgcatgcacgacaaagcatgtgctttaacctccacacacatagcatagatcccaaacagtcgcgtcgaccctactcggataatgttgggaaagagtaaacgacataactcgtgatatacctgcatcagttcgacaagcaaccgcactacgagcacgtatagtgacgctgtacgtcctccaccagctccgtcttatcactctgtaccttcc

SEQ ID NO: 10779 - DNA, 699 bp, Homo sapiens
  SIMILAR (568)..(756): 1001254mologous to Homo sapiens NAALADase II protein,accession number AJ012370,Smith-Waterman Score=322.
atgctcttggcagcctgcggtgcccacccagccccagcctgcagggcccagcgctccccgccagggcctgcctggacactcccgaggtgcccagcccgcactggtgtccccacacaagggactcaccccggtgcccgggacgccggcacaccgcttcaactcccccagccccagcgggtggagagggactgccatcgcctgcagccggcgccccgcccgcccactgcccggggccccgccagcccccgcgaccgctgcccccgtgcccgggctgtgcgggccctgcccatcgctgcccgcgtgcccccagacgcggcgccgactcacgtgaacacgaagaagagggtgctggagccgaccagcagcgcggcggccgtggccaccgggatgtacttggcggggtgccaggactgtcaccttcctccaccagctgaaccctggagtaaactgccaaatgctgacagtgggaagaagcggaatcaggcctacttgcaccatcgcatcctgcagtgtcaacaagctgcatcctcaaatgcaccctgcaacacagccccaccacaggatggcactgtctcccagccattccgaggggccttctcactgctggggactctcccttggagacatttctcccatccccagatgaaggaagtcagcctggaattttattggaaccccaaatcaaatacagaatgctaa

SEQ ID NO: 10780 - DNA, 550 bp, Homo sapiens
  SIMILAR (181)..(984): 261254mologous to Cercopithecine herpesvirus 1 glycoprotein G (homologue of HSV-2 US4),accession number Z46268,Smith-Waterman Score=141.
ggcttctcaacactcaatcttttccctgttctcttatgcagctcttgcaggaggctaccatgagctctctctggtgctcagggactggagatgtcatcgaggactggtgtcgatgtgactccactgcttttggaagttgtgtccctgtttcatgttccttcctgtctgcacacaggctgagactctccacggttcacgagcccagcagcactcttgtggtcctggagtgggaacactcagagccaccaatcggggtgcagattgtagattacctcctccgtcaagagaaagtcactgacaggatggaccactccaaagtggagacaggtgagcaccttctacttcatgggcttgtcttgatccaaggtgataaaactaaaacaaagaaaaatgccctgcctcatggctttgctccaggtccccagtatcccagggcaatgcaggaggagcagggagaagaagaagctgttcttcttctccaggaagcagctgttcttctgccactgagggttagagacatacgcagctgctgcttcaggcatagagagct

SEQ ID NO: 10781 - DNA, 1155 bp, Homo sapiens
  SIMILAR (104)..(226): 1001254mologous to Homo sapiens NHP2 protein,accession number AJ293309,Smith-Waterman Score=217.
cttgtgcctggtgatgatcctgtatactcgccggcgctggtgcaaacgccgccgggtcccgcagccccagaagagtgccagtgctgaggcagccaatgagattcactacattccttctgtgctgatcggcgggcacggacgggagagcctgcgcaatgcccgcgtgcagggccacaactccagtggcaccctgagcatccgggagacacctatcctggacggctatgagtatgacatcactgatctgcgccaccatctgcagagggagtgcatgaacggaggggaggactttgccagccaggtcacgcgcaccctcgactccctgcagggctgcaatgaaaagtcggggatggacctcacaccaggtggggatgggagaaaggcaaggctgatgaacaagtataaagataatattatagccactagccctgtggactccaaccaccagcaagccacccttctctctcacacctccagcagccagagaaagcggatcaacaacaaagcaagaggtatgcatgtctgacattagggcgaaggggattctggcacagaggcagaaaacgacccccagctgaccttttacacggatccttcaaggagcaggaggcgtagtagaggtaggaatgatagaggtggcagaaataagaccaccttgaccctgatcagcatcaccagctgtgtgattggcctcgtgtgctcctctcacgtcaactgccctctcgttgtcaagatcaccctgcatgtccctgagcacctgattgctgatggtgagcctgttcttctgaggatggggagccagctggatgccagtgactggctgaaccctgcccaagtggttctcttctctcagcagaactccagcggaccctgggccatggacctctgtgcccggcggctcctggacccctgtgaacaccaatgtgaccccgaaactggtaggcgggagcaccgggcagcgggtaactgtcagagagatcatgccagggcacactctgtctggctgggctctcctccgtaccatgacacgtctctccgttggagtcctatgtacaccaccatggagtcggcgcctcatgcgttcccaccatctgtcacagcagatgcagagactgtaacacttctagcttaggagggcatccaacacccttgtgg

SEQ ID NO: 10782 - DNA, 4229 bp, Homo sapiens
  SIMILAR (2614)..(4470): 931254mologous to Homo sapiens putative p150,accession number U93572,Smith-Waterman Score=3026.
cccacgcgtccgggccggggctcaagatggctttagccgggctctgcgccctgctcgcctgctgctgggggccggcggcggtgctggccacggccgccggcgacgtggatccatccaaggagctggagtgcaagctcaaaagcatcacggtgtcggcactgcccttcctgcgcgagaacgacctgagcatcatgcacagcccctcggcctcggagcccaagctcctcttctcggtgcgcaacgacttcccgggagaaatggtcgtggtggacgacctggagaacacggagctgccctacttcgtgctggagatctcagggaacacagaggatatccctttggtgcgctggaggcagcagtggctggagaatggcactttgctttttcacattcatcaccaagatggtgccccaagccttcctggacaagaccccactgaagaaccccaacatgagtcggcagaagaggagctgaggatcctccacatctcagtcatgggtggcatgatcgctctgctgctgtccatcttgtgcctggtgatgatcctgtatactcgccggcgctggtgcaaacgccgccgggtcccgcagccccagaagagtgccagtgctgaggcagccaatgagattcactacattccttctgtgctgatcggcgggcacggacgggagagcctgcgcaatgcccgcgtgcagggccacaactccagtggcaccctgagcatccgggagacacctatcctggacggctatgagtatgacatcactgatctgcgccaccatctgcagagggagtgcatgaacggaggggaggactttgccagccaggtcacgcgcaccctcgactccctgcagggctgcaatgaaaagtcggggatggacctcacaccaggaagtgacaatgccaagctgtcactgatgaacaagtataaagataatattatagccactagccctgtggactccaaccaccagcaagccacccttctctctcacacctccagcagccagagaaagcggatcaacaacaaagcaagagctggttccgccttcttgaaccctgaaggggattctggcacagaggcagaaaacgacccccagctgaccttttacacggatccttcaaggagcaggaggcgtagtagagtgggttctccccgaagtcctgtgaataagaccaccttgaccctgatcagcatcaccagctgtgtgattggcctcgtgtgctcctctcacgtcaactgccctctcgttgtcaagatcaccctgcatgtccctgagcacctgattgctgatgggagccgcttcatcttgctggaggggagccagctggatgccagtgactggctgaaccctgcccaagtggttctcttctctcagcagaactccagcggaccctgggccatggacctctgtgcccggcggctcctggacccctgtgaacaccaatgtgaccccgaaactggtaggcgggagcaccgggcagcgggggaatgcctctgctatgaaggctacatgaaggatccagtacataagcacctttgcattcggaacgaatgggggacaaaccaggggccatggccttacacaatatttcagcgaggctttgacctggttttgggagagcagccctctgataaaatatttagattcacctacactcttggggagggcatgtggttgcccctcagcaagagctttgtgattccaccagccgaactggccatcaatccatcagcaaagtgcaagacggacatgactgtgatggaggatgctgtggaggtcagagaggagctgatgacttcatcctccttcgacagcctggaggttctcttagattcctttgggccggtgcgcgactgcagcaaagataacgggggctgcagtaagaatttccgctgtatttcagatcgcaagctggactccactggttgcgtgtgcccatctgccctgcaagctagtgaaggacagctctggctgctatgaccgccacatcggggtggactgttccgacggcttcaacggcggctgtgagcagctgtgcctccagcagatggcgcccttcccggacgaccccaccttgtataacatcctcatgttctgtgggtgcatcgaggactacaagcttggtgtggatggacgctcttgccaactcatcacggagacctgtccagagggaagtgactgtggggaaagcagggagcttcccatgaaccagaccctctttggggagatgttctttggttacaacaaccattccaaggaagtggctgccggacaggtgctgaaaggaacattcaggcaaaacaactttgctcgtggtttagaccagcaactgccagatggtcttgtggtggccactgtgcccctggagaatcaatgcctagaggagatctcggagcccacccctgaccctgacttcctgactgggatggtgaacttcagtgaagtgtctgggtaccctgtgctgcagcactggaaggtccggtctgtgatgtaccacatcaaactcaaccaagtggccatctctcaggccctcagcaatgctctccactcgctggatggggctacatctcgtgcagattttgtggcgctgttggaccagttcggcaaccattacatccaggaagctatctacggctttgaggagtcctgttctatctggtacccaaacaagcaggtccagcggcgactctggctggagtatgaagacatcagtaaaggcaactccccatcagatgagtctgaggagcgggaaagagaccctaaggtgctgacattcccagaatacatcaccagcttgtcagactccggcaccaagcgcatggcggctggagtccgcatggagtgccagagcaagggacgatgcccctcgtcctgccccctgtgtcatgtgacatccagccctgacacccctgctgagccggttctgctggaggtgaccaaagcagcccccatctatgaactagtgaccaacaaccagacccagaggctcttgcaggaggctaccatgagctctctctggtgctcagggactggagatgtcatcgaggactggtgtcgatgtgactccactgcttttggagctgatggactccccacctgtgcgcctctcccacagcctgtgctgagactctccacggttcacgagcccagcagcactcttgtggtcctggagtgggaacactcagagccaccaatcggggtgcagattgtagattacctcctccgtcaagagaaagtcactgacaggatggaccactccaaagtggagacagaaacagtgctgagctttgtggacgacatcatctctggagcaaagtctccttgtgcaatgccatctcaggtgccggacaagcagctcaccaccatctctctgatcatacgatgcctggaacctgacaccatttacatgttcacgctgtggggagtggacaacacaggacggcgctccaggccaagcgacgtgatcgtgaagaccccatgccccgtggtggatgatgtcaaggctcaagaaatagcagacaagatctacaatctcttcaatggctacactagtgggaaggagcagcagaccgcctacaacaccctcctggatctgggttcccccaccttacaccgggtcctctaccactataaccagcactatgagagttttggggaattcacctggcgatgtgaggatgagttaggtcccaggaaagctggtctcatcctttcccagcttggggacctcagcagttggtgcaatggactccttcaggaacccaagataagcttgcggcgcagctcactcaagtacctggggtgccgctacagcgagatcaaaccctacggacttgactgggcggagctcagccgggacctcaggaagacgtgtgaggagcagaccctgagtatcccctacaacgactatggggacagcaaagagatctagcaccataaggccagggagctgctgccagaatgaagtaggaaagaggagggatccatctgggttggtctgtggatttttaatattttttaatggaacatgaaaacctccacagcaacatcgaaaccagggagaaagtgatccttgctccctgtcagaacttcttcagtatgatgtttctccatctgcattgattggggaaatctgccaagccagtggtttcatgcagtgccatatttctttagaggattactttggggtttgctttgccattaatttggtccattcattttttt

SEQ ID NO: 10783 - DNA, 443 bp, Homo sapiens
  SIMILAR (382)..(251): 361254mologous to Homo sapiens Human secreted protein, SEQ ID NO: 4454,accession number G00373,Smith-Waterman Score=44.
cggcacgagggcaggaatgacagaagcagcagcgagagcccttcagaggaccgcgaaacgcgaactcccgccccctcaaacccaggacattcagtgtaaatgactgtgagcctcaggctggaaagatcgtttcccttcccagctagaaagactcatccatcaggctgtgtcagacgcacctgagccctccaggggtggtcaaagaatctgcatcacagaagatatccagttgggcaagaccccgcctccctgacaggtggcacaggagggtggttggagcaggagggtgggaagtgatacgtggatcttggaagaacagcctggctctaccactcgccgtgtgtctgtgggtatgtgagtccccactctgtgctgtggcctcctcatgcagagaaaggagctgataaaagtcaccgagttaaacttaaaaaaaaaaaaaaaaa

SEQ ID NO: 10784 - DNA, 779 bp, Homo sapiens
  SIMILAR (71)..(202): 381254mologous to Rattus norvegicus metallothionein i,accession number J00750,Smith-Waterman Score=68.
agaaatgagccccccgtgcctggctcaaagttcattcttacactttgctcagtaaaggaagaccctcttgtgcagcaggttttgttgtggtggtggggtgtgtgtgtatgcatgtgcctgtggccataggtgtaaaaatgtctccaagcactattgctgtcagaggactccatgtcactaagcatcctgctaagagcactgtgagctcttctgggtcttttctgagtcatcctctcctcctttgatctcatcaagcatggtatccttttggaaatatcagacagcatccaatttagaggatgcaagaggtccagaattcccgagctgggaggcttagaagagttgtggtgaccaggtgactgccgccaaccacgtcctgtggagagctgtgtcgacacctgcagccaggctctctgggcagccttgtgtccaaacaccagctcagaggcagcaggaagacgctaactctgcgttccggaaatgtcacctgctcagtgtttgggaagggaaacctctcaagatctaacggggtgatcaggtagcagactctagtcagaagaagcaacttgcagctgatgcccatacaccctacaggggaggagacatttgagatgggtgagataagaaaagtcctcaaggtagttaaaaccagtcccaaccaaatgtcggtctaaaaggaaggaaaccaacatttgctaaatgcctactatgtgccataagctttcacaggtaagaaaagattttttaaagtatgttttaaaaaaggaatattcctcgaa

SEQ ID NO: 10785 - DNA, 1320 bp, Homo sapiens
  SIMILAR (160)..(234): 921254mologous to Rattus norvegicus GKAP/SAPAP interacting protein,accession number AF141903,Smith-Waterman Score=123.
atgagtggaagcttcctgaagctctcaccagaagcagatgctggcaccatgcttcctgggcagcctgcagaactggcaacaccacactgctggaaaagggaaagggttcttggaacatgtgcttttggtgaacagctggctgcctctgggcacatgaaagaaacccgcgctgaccgcagcaagaagcttttcaggcactacaccgtgggctcctatgacagcttcgacacttccagaggtgggagggtccggaagccctacgctgggttcttccccgacctccaggatatctgtgatgagcagcccagacccctgcactcgactcttagacctgcctgtggagggatccaacctggcaaacaacagcccatgccttttgccaagaccgacacctgtgcctcagacaaacacgtggagaagaagctagaaagactcatccatcaggctgtgtcagacgcacctgagccctccagggtggtcaaaggaatatttattggtggcctgccatgtgctcggctctgggtggtcccttatctgatggggcatgtgcaggaagtgactatggcagagggttatgagcgggcatcacaggcaactttcagggagcagatgcaggaggtgccctgttgtcttcagaggtctaccgggtcatccatgaagacagggaataaaatacgtagagttaccgacaatgtgctgacaagaagtgggcctttgataaatgacattctcagtgttgctgtggatagcagtgtttctgtgttgatatggatgcatcttttctcctcgcatcctcttgggatcgtgcggtattgggggtgtatgggcatcagctgcaagttgcttcttctgactagagtctgctacctgatcaccccgttagatcttgagaggtttcccttcccaaacactgagcaggtgacatttccggaacgcagagttagcgtcttcctgctgcctctgagctggtgtttggacacaaggctgcccagagagcctggctgcaggtctaggagagacagtttcacccatagagtattttatagtgttacaccaacctctggagatgtccctggatcacatccattttgtgataaaccagttagacgaggtgatgacccctacatcagaaatgaccgtggcactttgtacagtactctacagtttataagcacgtgtgtgcaggtagtcggtgtttatgggcatctcccaggttttaaatcagacgccgctcaggctgtgcccaggctgctgagccaaaagcgggatcagaaccacaaggaggaagaaattactgatggggatgaaagaccgaaataa

SEQ ID NO: 10786 - DNA, 5976 bp, Homo sapiens; identical to SEQ ID NO: 5415
  SIMILAR (1)..(369): 1001254mologous to Homo sapiens GTP-binding protein RAB21,accession number AF091035,Smith-Waterman Score=643.
  misc_feature (1)...(5976): n = a,t,c or g

SEQ ID NO: 10787 - DNA, 3657 bp, Homo sapiens; identical to SEQ ID NO: 6045
  SIMILAR (441)..(848): 891254mologous to Mus musculus fetal globin inducing factor,accession number AF028722,Smith-Waterman Score=664.

SEQ ID NO: 10788 - DNA, 5130 bp, Homo sapiens; identical to SEQ ID NO: 2332
  SIMILAR (6928)..(6113): 921254mologous to Homo sapiens protein kinase,accession number X85545,Smith-Waterman Score=1338.

SEQ ID NO: 10789 - DNA, 3819 bp, Homo sapiens; identical to SEQ ID NO: 3971
  SIMILAR (229)..(351): 601254mologous to Homo sapiens EVG1,accession number AF324466,Smith-Waterman Score=109.

SEQ ID NO: 10790 - DNA, 3666 bp, Homo sapiens; identical to SEQ ID NO: 2174

SEQ ID NO: 10791 - DNA, 3213 bp, Homo sapiens; identical to SEQ ID NO: 2322
  SIMILAR (487)..(314): 321254mologous to Plasmodium falciparum knob-associated histidine-rich protein,accession number AF275687,Smith-Waterman Score=71.

SEQ ID NO: 10792 - DNA, 3357 bp, Homo sapiens; identical to SEQ ID NO: 6062
  SIMILAR (1552)..(1109): 991254mologous to Homo sapiens EVG1,accession number AF324466,Smith-Waterman Score=754.

SEQ ID NO: 10793 - DNA, 5076 bp, Homo sapiens; identical to SEQ ID NO: 3974
  SIMILAR (169)..(279): 1001254mologous to Homo sapiens Pin1,accession number U49070,Smith-Waterman Score=186.

SEQ ID NO: 10794 - DNA, 3235 bp, Homo sapiens; identical to SEQ ID NO: 2323
  SIMILAR (148)..(507): 601254mologous to Escherichia coli similar to,accession number D90870,Smith-Waterman Score=297.

SEQ ID NO: 10795 - DNA, 3300 bp, Homo sapiens; identical to SEQ ID NO: 3975
  SIMILAR (264)..(635): 661254mologous to Cloning vector pEH1 lac repressor,accession number AJ007659,Smith-Waterman Score=363.

SEQ ID NO: 10796 - DNA, 4989 bp, Homo sapiens; identical to SEQ ID NO: 6054
  SIMILAR (985)..(1305): 771254mologous to Homo sapiens NAG13,accession number AF194537,Smith-Waterman Score=421.

SEQ ID NO: 10797 - DNA, 3420 bp, Homo sapiens; identical to SEQ ID NO: 6055
  SIMILAR (1024)..(1692): 961254mologous to unidentified cloning vector 29kD protein essential for the replication of mini F plasmid,accession number AB015619,Smith-Waterman Score=1109.
  misc_feature (1)...(3420): n = a,t,c or g

SEQ ID NO: 10798 - DNA, 4374 bp, Homo sapiens; identical to SEQ ID NO: 2325
  SIMILAR (1410)..(736): 901254mologous to Cloning vector pZC320 SopA,accession number U26464,Smith-Waterman Score=1054.

SEQ ID NO: 10799 - DNA, 4830 bp, Homo sapiens; identical to SEQ ID NO: 6058
  SIMILAR (145)..(912): 951254mologous to Cloning vector pBACe3.6 levansucrase,accession number U80929,Smith-Waterman Score=1298.

SEQ ID NO: 10800 - DNA, 4452 bp, Homo sapiens; identical to SEQ ID NO: 6059
  SIMILAR (196)..(411): 551254mologous to Homo sapiens Human secreted protein HCHPF68, SEQ ID NO:163,accession number Y86248,Smith-Waterman Score =162.

SEQ ID NO: 10801 - DNA, 3693 bp, Homo sapiens; identical to SEQ ID NO: 3978
  SIMILAR (145)..(612): 261254mologous to Arabidopsis thaliana contains similarity to phytocyanin/early nodulin-like protein~gene_id:K19P17.3,accession number AB007644,Smith-Waterman Score=122.

SEQ ID NO: 10802 - DNA, 3300 bp, Homo sapiens; identical to SEQ ID NO: 3981
  SIMILAR (424)..(744): 571254mologous to Homo sapiens line-1 reverse transcriptase,accession number U83303,Smith-Waterman Score=295.

SEQ ID NO: 10803 - DNA, 4794 bp, Homo sapiens; identical to SEQ ID NO: 3980
  SIMILAR (851)..(519): 311254mologous to Caenorhabditis elegans RRM-type RNA binding protein,accession number U24189,Smith-Waterman Score=94.

SEQ ID NO: 10804 - DNA, 3316 bp, Homo sapiens; identical to SEQ ID NO: 6063
  SIMILAR (1786)..(2649): 571254mologous to Homo sapiens unnamed protein product,accession number AK001559,Smith-Waterman Score=754.

SEQ ID NO: 10805 - DNA, 3457 bp, Homo sapiens; identical to SEQ ID NO: 6064
  SIMILAR (2329)..(2805): 871254mologous to Escherichia coli Formate dehydrogenase, nitrate-inducible, cytochrome B556(FDN) subunit (formate dehydrogenase-N g subunit),accession number D90788,Smith-Waterman Score=730.

SEQ ID NO: 10806 - DNA, 4797 bp, Homo sapiens; identical to SEQ ID NO: 6066
  SIMILAR (248)..(108): 651254mologous to Homo sapiens Human secreted protein, SEQ ID NO: 7678,accession number G03597,Smith-Waterman Score=152.

SEQ ID NO: 10807 - DNA, 3384 bp, Homo sapiens; identical to SEQ ID NO: 6067
  SIMILAR (1722)..(1543): 501254mologous to Homo sapiens reverse transcriptase,accession number L27428,Smith-Waterman Score=157.

SEQ ID NO: 10808 - DNA, 3348 bp, Homo sapiens; identical to SEQ ID NO: 6068
  SIMILAR (629)..(1426): 961254mologous to Bacteriophage P7 RepA protein,accession number J03308,Smith-Waterman Score=1295.

SEQ ID NO: 10809 - DNA, 3783 bp, Homo sapiens; identical to SEQ ID NO: 6069
  SIMILAR (1)..(3156): 951254mologous to Homo sapiens putative p150,accession number U93565,Smith-Waterman Score=5296.

SEQ ID NO: 10810 - DNA, 3723 bp, Homo sapiens; identical to SEQ ID NO: 6070
  SIMILAR (1)..(3003): 971254mologous to Homo sapiens unknown,accession number AF149422,Smith-Waterman Score=5062.

SEQ ID NO: 10811 - DNA, 3897 bp, Homo sapiens; identical to SEQ ID NO: 6071
  SIMILAR (1)..(2748): 971254mologous to Homo sapiens unknown,accession number AF149422,Smith-Waterman Score=4641.

SEQ ID NO: 10812 - DNA, 3726 bp, Homo sapiens; identical to SEQ ID NO: 6072
  SIMILAR (1072)..(12039): 991254mologous to Homo sapiens HRX,accession number L04284,Smith-Waterman Score=19006.

SEQ ID NO: 10813 - DNA, 3783 bp, Homo sapiens; identical to SEQ ID NO: 6073
  SIMILAR (307)..(744): 871254mologous to Homo sapiens hypothetical protein,accession number AJ249980,Smith-Waterman Score=627.

SEQ ID NO: 10814 - DNA, 3855 bp, Homo sapiens; identical to SEQ ID NO: 6074
  SIMILAR (317)..(478): 331254mologous to Hordeum vulgare=barley, M564, Peptide, 310 aa C-hordein,accession number S66938,Smith-Waterman Score=88.

SEQ ID NO: 10815 - DNA, 3348 bp, Homo sapiens; identical to SEQ ID NO: 6075
  SIMILAR (310)..(861): 431254mologous to multiple sclerosis associated retrovirus element gag polyprotein,accession number AF123881,Smith-Waterman Score=404.

SEQ ID NO: 10816 - DNA, 6136 bp, Homo sapiens; identical to SEQ ID NO: 6076
  SIMILAR (308)..(1057): 721254mologous to Homo sapiens gag,accession number AF156961,Smith-Waterman Score=842.

SEQ ID NO: 10817 - DNA, 3924 bp, Homo sapiens; identical to SEQ ID NO: 6077
  SIMILAR (790)..(2040): 511254mologous to Homo sapiens Human signal peptide containing protein HSPP-120 SEQ ID NO:120,accession number Y87343,Smith-Waterman Score=1158.

SEQ ID NO: 10818 - DNA, 7383 bp, Homo sapiens
  SIMILAR (2)..(1603): 981254mologous to Homo sapiens putative p150,accession number U93564,Smith-Waterman Score=2788.
atgacaggatcaaattcacacataacaatattaactttaaatataaatggactaaattctgcaattaaaagacacagactggcaagttggataaagagtcaagacccatcagtgtgctgtattcaggaaacccatctcatgtgcagagacacacataggctcaaaataaaaggatggaggaagatctaccaagcaaatggaaaacaaaaaaaggcaggggttgcaatcctagtctctgataaaacagactttaaaccaacaaagatcaaaagagacaaagaaggccattacataatggtaaagggatcaattcaacaagaggagctaactatcctaaatatttatgcacccaatacaggagcacccagattcataaagcaagtcctgagtgacctacaaagagacttagactcccacacattaataatgggagactttaacaccccactgtcaatattagacagatcaacgagacagaaagtcaacaaggatacccaggaattgaactcagctctgcaccaagcagacctaatagacatctacagaactctccaccccaaatcaacagaatatacatttttttcagcaccacaccacacctattccaaaatcgaccacatagttggaagtaaagctctcctcagcaaatgtaaaagaacagaaattataacaaactatctctcagaccacagtgcaatcaaactagaactcaggattaagaatctcactcaaagccgctcaactacatggaaactgaacaacctgctcctgaatgactactgggtacataacgaaatgaaggcagaaataaagatgttctttgaaaccaacgagaacaaagacaccacataccagaatctctgggacgcattcaaagcagtgtgtagagggaaatttatagcactaaatgcctacaagagaaagcaggaaagatccaaaattgacaccctaacatcacaattaaaagaactagaaaagcaagagcaaacacattcaaaagctagcagaaggcaagaaataactaaaatcagagcagaactgaaggaaatagagacacaaaaaacccttcaaaaaatcaatgaatccaggagctggttttttgaaaggatcaacaaaattgatagaccgctagcaagactaataaagaaaaaaagagagaagaatcaaatagacacaataaaaaatgataaaggggatatcaccaccgatcccacagaaatacaaactaccatcagagaatactacaaacacctctacgcaaataaactagaaaatctagaagaaatggatacattcctcgacacatacactctcccaagactaaaacaggaagaagttgaatctctgaatggaccaataacaggctctgaaattgtggcaataatcaatagtttaccaaccaaaaagagtccaggaccagatggattcacagccgaattctaccagaggtacaaggaggaactggtaccattccttctgaaactattccaatcaatagaaaaagagggaatcctccctaactcattttatgaggccagcatcattctgataccaaagccgggcagagacacaaccaaaaaagagaattttagaccaatatccttgatgaacattgatgcaaaaatcctcaataaaatactggcaaaccgaatccagcagcacatcaaaaagcttatccaccatgatcaagtgggcttcatccctgggatgcaaggctggttcaatatacgcaaatcaataaatgtaatccagcatataaacagagccaaagacaaaaaccacatgattatctcaatagatgcagaaaaagcctttgacaaaattcaacaacccttcatgctaaaaactctcaataaattaggtattgatgggacgtatttcaaaataataagagctatctatgacaaacccacagccaatatcatactgaatgggcaaaaactggaagcattccctttgaaaactggcacaagacagggatgccctctctcaccgctcctattcaacatagtgttggaagttctggccagggcaatcaggcaggagaaggaaataaagggtattcaattaggaaaagaggaagtcaaattgtccctgtttgcagacgacatgattgtttatctagaaaaccccattgtctcagcccaaaatctccttaagctgataagcaacttcagcaaagtctcaggatacaaaatcaatgtacaaaaatcacaagcattcttatacaccaacaacagacaaacagagagccaaatcatgggtgaactcccattcacaattgcttcaaagaggataaaatacctaggaatccaacttacaagggatgtgaaggacctcttcaaggagaactacaaaccactgctcaaggaaataaaagaggacacaaacaaatggaagaacattccatgctcatgggtaggaagaatcaatatcgtgaaaatggccatactgcccaaggtaatttacagattcaatgccatccccatcaagctaccaatgactttcttcacagaattggaaaaaactactttaaagttcatatggaaccaaaaaagagcccgcattgccaagtcaatcctaagccaaaagaacaaagcaagaataaagctggaggcatcactattcaaactatactacaaggctacagtaaccgaaacagcatggtactggtaccaaaacagagatatagatcaatggaacagaacagagccctcagaaataatgccgcatatctacaactatctgatctttgacaaacctgagaaaaacaagcaatggggaaaggattccctatttaataaatggtgctgggaaaactggctagccatatgtagaaagctgaaactggatcccttccttacaccttatacaaaaatcaattcaagatggattaaagacttaaatgttagacctaaagccataaaagtcctagaagaaaacctaggcaataccattcaggacataggcatgggcaaggacttcatgactaaaacaccaaaagcaatggcaacaaaagccaaaattgacaaatgggatataattaacctaaagagcttctgcacagcagaagaaactaccatcagagtgaacaggcaacctacagaatgggagaaaaattttgcaatctacccatctgacaaaggactaatatccagattctacaaagaactcaaacaaatttacaagaaaaaaacaaacaaccccatcaaaaagtgggcgaaggacatgaacagacacttctcaaaagaagacatttatgcagccaaaaaacacatgaaaaaatgctcatcatcactggccatcagagaaatgcaaatcaaaaccactatgagatatcatctcacaccagttagaatggcaatcatgaaaaaagtcaggaaacaacaggtgctggagaggatgtggagaaataggaacacttttacactgttggtgggactgtaaactagttcaaccattgtggaagtcagtgtggcgattcctcagggatctagaactagaaataccatttgacccagccatcccattactgggtatatacctaaaagattataaatcatgctgctataaagacacatgtacacagctacgcggcggcggcggagcgcaggcctcgtgccgttacggccatcacggcggccgcagtggcgtcctggagccctcctcaggtagctcttcaacaagcaggcataaacacttctctgatgagggacgcgatggggaaaggctttgttctctgaaaactccctgtaggaactgcctttcttctgagtgtccacttgtgtccggaattggtgggttcttgatctcactgacttcaagaatgaagccgcagaccctcgcggtgagtgttacagttcttaaagatggtgtgtccggagtttgttccttcagatgttcagatgtgtctggagcttcttccttccagtgggttcgtggtcttgctgacttcaggagtaaagctgtgctcacaccacaaatgtaatcaaagggctgatcaactggtttctgagttagttcaactaatttgcatagtatctgcagagcaaccacataacttgttcctccatcttcaattatgaaaattgggattcctctccctttcaacccaggttctgttatcaatataattgcaataataatttctccctgaagagataaacggttgttcttctctgcatttttgtctttgctgatagcctgctcagttttagtaggcttttcctctttttctaagtgtctctttaaatcataatttaacttggggacaagtccaccaatattccacctgttgtttcctgactttttaatgattgccattctaactggtgtgagatgatatctcatagtggttttgatttgcatttctctgatggccagtgatgatgagcatttcttcatgtgttttttggctgcataaatgtcttcttttgagaagtgtctgttcatgtccttcgcccacgttttgatggggttatttgtttttttcttgtaaatttgtttgagttcattgtagattctggatattagccctttgtcagatgagtaggttgcgaaaattttctcccatgttgtaggttgcctgttcactctgatggtagtttcttttgctgtgcagaagctctttagtttaattagatcccatttgtcaattttggcttttgttgccattgcttttggtgttttggacatgaagtccttgcccacgcctatgtcctgaatggtaatgcctaggttttcttctagggtttttatggttttaggtctaacgtttaaatctttaatccatcttgaattgattttggtataaggtgtaaggaagggatccagtttcagctttctacatatggctagccagttttcccagcaccatttgttaaatagggaatcctttccccattgcttgtttttctcaggtttgtcaaagatcagacagttgtagatatgcggcattatttctgagggctctgttctgttccattgatctatatctctgttttggtaccagtaccatgctgttttggttactgtagccttgtagtatagtttgaagtcaggtagtgtgatgcctccagctttgttcttttggcttaggattgacttggcgatgcgggctctattttggttccatatgaactttaaagtagttttttccaattctgtgaagaaagtcattggtagcttgatggggatggcattgaatctgtaaattaccttgggcagtatggccattttcacgatattgattcttcctacccgtgagcatggaatgttcttccatttgtttgtgtcctcttttatttccttgagcagtggtttgtagttctccttgaagaggtccttcacatcccttgtaaattggattcctaggtattttattctctttgaagcaattgtgaatgggagttcactcatgatttggctctctgtttgtctgttgttggtgtataagaatgcttgtgatttttgtacattgattttgtatcctgagactttgctgaagttgcttatcagcttaaggagattttgggctgagacgatggggttttctagataaacaatcatgtcgtctgcaaacagggacaatttgacttcctcttttcctaattgaataccctttatttccttctcctgcctgattgccctggccagaacttccaacactatgttgaataggagtggtgagagagggcatccctgtcttgtgccagttttgaaagggaatgcttccagtttttgcccattcagtatgatattggctgtgggtttgtcatagatagctcttattattttgaaatacgtcccatcaatacctaatttattgagagtttttagcatgaagcgttgttgaattttgtcaaaggctttttctgcatctattgagataatcatgtggtttttgtctttggctctgtttatatgctggattacatttattgatttgcgtatattgaaccagccttgcatcccagggatgaagcccacttgatcatggtggataagcttttggatgtgctgctggattcggtttgccagtattttattgaggatttttgcatcaatgtttatcaaggatattggtctaaaattctcttttttggttgtgtctctgcccggctttggtatcagaatgatgctggcttcataaaatgagttagggaggattccctctttttctattgattggaatagtttcagaaggaatggtaccaattcctccttgtacctctggtagaattcggctgtgaatccttctggtcctggactctttttggttggtaagctattggttattgccacaatttcagagcctgttattggtctattcagagattcaacttcttcctggtttagtcttgggagagtgtatgtgtcgaggaatgtatccatttcttctagattttctagtttatttgtgtagaggtgtttgtagtattctctgatggtagtttgtatttctgtgggatcggtggtgatatcccctttatcattttttattgtgtctatttgattcttctctctttttttctttattagtctggctagcggtctatcaattttgttgatcctttcaaaaaaccagctactggattcattgattttttgaagggttttttgtgtctctatttccttcagttctgctctcattttagttatttcttgccttctgctaggttttgaatgtctttgctcttgcttttctagttcttttaattgtgatgttagggtgtcaattttggatctttcctcctttctcttgtaggcatttagtgctataaatttccctctacacactgctttgaatgcgtcccagagattctggtatgtggtgtctttgttctcgttggtttcaaagaacatctttatttctgtcttcatttcgttatgtacccagtagtcattcaggagcaggttgttcagtttccatgtagttgagcggctttgagtgagattcttaatcctgagttctagtttgattgcactgtggtctgagagatagtttgttataatttctattcttttacatttgctgaggagagctttacttccaagtatgtggtcaattttggaataggtgtggtgtggtgctgaaaaaaatgtatattctgttgatttggggtggagagttctgtagatgtctattaggtctgcttggtgcagagctgagttcaattcctgggtatccttgttgactttctgtctcgttgatctgtctaatgttgacagtggggtgttaaagtctcccattattaatgtgtgggagtctaagtctctttgtaggtcactcaggacttgctttatgaatctgggtgctcctgtattgggtgcataaatatttaggatagttagctcctcttgttgaattgatccctttaccat

SEQ ID NO: 10819 - DNA, 705 bp, Homo sapiens
  SIMILAR (790)..(1599): 981254mologous to Homo sapiens putative p150,accession number U93574,Smith-Waterman Score=1361.
ttattttactgatcgccttcgcgcccggctggctggcacgccgctgaaatgtttggcaccatcgcccgctccggtgtgcgtatcgtttctcgtgagccgctgaaccgtcgggcgattctgattatcgcgctgtcgctggcggttggtctgggcgtgtctcagcagccgctgattttgcagtttgcccctgaatggctgaaaaacctgctctcctccgggatcgccgcgggcggtattactgccatcgtgttttctcttgcggggcaccctgcgctggcgacaaatgcgcaaccgatggaagcctttcttcttcatcagaccacgttctttcagaacctgattagggtgaaggaagccatctgtagtgatcagttcaacacgacgatgttccgtggccttcaggggaacagcgcctgcacaaagtgcaatccccgatgcctgaatgaactgacgccgactgagtgacatatttttgttggaggcctggaacgcaccttcaacgttgtagctggcacgatagtttttggtcattttgttgccattctgcgcggtagcgatgatggcgatatccgctttggtcgcgatgttgtagcgcacgttgccctgggacacgtcagcatacagttggctaacgatgatttgcagattaacccggcaataaatgttgccgggagagatggtagggcggataagatgcgccagcat

SEQ ID NO: 10820 - DNA, 506 bp, Homo sapiens
  SIMILAR (1)..(384): 841254mologous to Homo sapiens FH1/FH2 domain-containing protein FHOS,accession number AF113615,Smith-Waterman Score=535.
cgtgaagtgcgcatcatgcagttctgccacacgctgcgggaatttgcgcttgagtatcggacttgccgggaacgagtgctacagcagcagcagaagcaggccacataccgtgagcgcaacaagacccggggacgcatgatcaccgagacagagaagttctcaggtgtggctggggaagcccccagcaacccctctgtcccagtagcagtgagcagcgggccaggccggggagatgctgacagtcatgctagtatgaagagtctgctgaccagcaggcctgaggacaccacacacaatcgccgcagcagatggcattggtccagagcagctccccaatcattgcccacaagtggggccctccactgcatccccagaagaacccccaggctccagtttacccagtgatacatcagatgagatcatgggacctttctgggttgcagttcagtgaccaagaagcagtcctcgtgcctttaggcttgcttagggaacgcaagcgtttccgc

SEQ ID NO: 10821 - DNA, 1981 bp, Homo sapiens
  SIMILAR (754)..(1494): 891254mologous to Homo sapiens putative p150,accession number U93564,Smith-Waterman Score=1137.
tcgcgatgaagttaacggatgtatccgtttagtctatgatatgtacagcacttttggtttcgagaagatcgtcgtcaaactctccactcgtcctgaaaaacgtattggcagcgacgaaatgtgggatcgtgctgaggcggacctggcggttgcgctggaagaaaacaacatcccgtttgaatatcaactgggtgaaggcgctttctacggtccgaaaattgaatttaccctgtatgactgcctcgatcgtgcatggcagtgcggtacagtacagctggacttctctttgccgtctcgtctgagcgcttcttatgtaggcgaagacaatgaacgtaaagtaccggtaatgattcaccgcgcaattctggggtcgatggaacgtttcatcaggtatcctgtccgaagagttcgctggtttcttcccgacctggcttgcgccggttcaggttgttatcatgaatattaccgattcacagtctgaatacgttaacgaattgacgcaaaaactatcaaatgcgggcattcgtgttaaagcagacttgagaaatgagaagattggctttaaaaatcgaagtggagaactctctcatcttccccccataaatcagtccaagccccggaatttccccagtgcagctctcccccaagttccacaacctactcatttgagtcagcgccccagagcctccccaaaaccgcccccaccagatccagagcgagtggagctgtccttggaagagcaccgggagatgctggagggcttctatgaagagatcagcaaagggcggaagcccacgctgatccttcggacccagctctctgtgagggtcaacgctatcttggccagcctggagtccgtgaaaccgctctacacaatggccctgggtctgctggtcaagtacccggactctgcgctgggccagcttcgcatcgagagcacggtagacggaagccgactgtacatcacagggaatggcgtcctctttcagcacgtcaagttccatgccttcctgctctacctgggctacaccccgcaggcggcccgtgaagtgcgcatcatgcagttctgccacacgctgcgggaatttgcgcttgagtatcggacttgccgggaacgagtgctacagcagcagcagaagcaggccacataccgtgagcgcaacaagacccggggacgcatgatcaccgagacagagaagttctcaggtgtggctggggaagcccccagcaacccctctgtcccagtagcagtgagcagcgggccaggccggggagatgctgacagtcatgctagtatgaagagtctgctgaccagcaggcctgaggacaccacacacaatcgccgcagcagagaccgccatgggccccggggctgccaggtctgcagtgctcagcccagccttcttcgtgcagtccctgtggcagacatgagggcactcatgacaggcaaggactgccccccatgtccgggaaagaggctccggggagcagaactaggacctctatgagtaggccttctcaatcagctatgaccgtggggaggaggaagcgtacctcaacttcattgccccctccaaacgggagttctacctgtggaaagatgggctcagtgccttgctgggcagttccatgggcaacgagcagacacggctggacctggagcagctgctgaccatggagaccaaactgcgtttgctggagctggagaacgtgcccatccccgagcggccacccccttgtgcccccaccccccaccaacttcaacttttgctatgactgcagcatcgctgaaccttgacagtgtggctggccatgggccccagctgcggcccctgcagcagccattaagggcagtgggtaaaggagtgcaggccccctgaccaccaaagattgctgcagaaataaagtctgcttggctcttgggatatgttgagccagctctgtaaaaaaaaaaaaaaaaaaaaaaaaaaaaaaaaaaaaa

SEQ ID NO: 10822 - DNA, 1833 bp, Homo sapiens
  SIMILAR (961)..(1629): 971254mologous to Homo sapiens putative p150,accession number U93563,Smith-Waterman Score=1104.
ctaaaaggcatcgttgatatgcggttgcagccgataatagatagcagccagtttagcccaggggtggacatagggactgcagcatgatgatttgccccactcgatgttaaaagtcaggcggctgtcctgatacgtttcccgtacataggcaatgtcgttagcgataatcgataatacgtcgcgcaaattactttcataacgtggataaaaacgtacggacgatgccccagttttcaacgcgatggcgacggcttcgtcaatagatgccttatctgaggcgctggtttcaatatgaatatcaaggttcagacggcgggctttatccccaaaggcagagagttctttatcgtccatattaccaagagaaaaacgctcgccatcgagaacatggattttgacgccacgtagattattttcacttgcgatatcaagtaaatcagcaggcaacactctttccagccgcatatttaaatgaaaggcataagcatgtaaataaagaggaagagtgtcgacacgttgtagaatctttcttgcgttatttattgtcaccataaaacacagattaatgatgaggtctacggcctcaaatcgccaatattcaatatctatttggacaatattgccttgctggtcggcgcgatgcttttcaattaagatcgctggcatacccgcagaaccgccaagatacttgctgatatcgcccggcattctgacgggtttgaaaatcaatttttttactaccgtctctttttggtagcacttttcccagactgcagaaaatgagtggttttcaagttgttcaataaagcccggagcaacttcaggattaatatatgtttcgtgatagaaaactttatgtccttccagcgccccccagccggtgatgcgatagagttcagttgatggcgtcactgcaatcagtggcgcgagcgtctcgggaatatcgctggtacggtttttctcggtaaacccccaggaaggctctcgcccttgctcaattgcggcccgctgaaagctcgccgacagctccggactgtaattaaatcgcggctgggtcacgaaccaccccttacgatccttacggaagattttggattctgcgtgcgcctgccgctggttcaggtctttcagctcctggaggttctccagcacctccatctccagcttggagtccttggtccggttctccagcacccccacgtttccatcctgctcagggaaccccctgcccatgcccagcgctgtgtccatttcacaggtgagaacactcaggtgttggctaatacgcttaaccagcattacggaaaccaccgcaccactgaatgcgaagcaggccataatgccaaacacgattttgtagccaataatccccggatttaaatccagaatgtagccatacagacgacattctaatatcgaagcccatatcgcaaccattttgcggatcagcgccagttgctgaaaatctttttcaccgaagcaggcgaatgtccggctggaccaggttgaacagcttgctgacaatagtcgaaacgccgcgaaaatgtcccggacggctggcaccttccagcatgtcgaaaggccaggaacgtcaacgtaagtgtgggtttcagtaccgttcgggtagatctcttttaccgaaggggcgaaaactaaatccactttacgtttgtttagcttctcgcagtcctcctgcaaggtccgtggataacgagccagatcttccgggcggtcgaactgcatcgggttaacgaaaatactgacgacgaccacatcggcgcgggctttggcttcgtcgaccagcttcatatggccatcgtgcaggttacccat

SEQ ID NO: 10823 - DNA, 898 bp, Homo sapiens
  SIMILAR (418)..(897): 961254mologous to Escherichia coli glucose-1-phosphatase precursor (agp),accession number M33807,Smith-Waterman Score=803.
atgggcttgccgtggcaggtcgggatgggcgcaatcttctggggcgcgataggtctgctgttactgacgattttccgcgttcgctactggatgatagccaacattccggtgagtctgcgtgtgggtattaccagcggtatcggtctgttcattggcatgatggggctgaaaaacgcaggtgtgattgtcgctaacccggaaacgctggtgagcatcggtaatctgacttctcacagcgtacttctgggtatcctcggcttcttcatcattgctattctggcctcgcgcaacattcacgcagcggtgctggtttctatcgtggtgacgacgctgctgggctggatgctgggtgatgtgcactacaatggcatcgtttctgcgccgccgagcgtaatgacagttgtgggtcatgtagatttagccgggccaattggcaactcgctggtagatgcccttactttgcaatattacgaaggttttccgatggatcaggtggcctggggagaaatcaaatctgaccagcagtggaaggtgttgtcgaagcttaaaaacggctaccaggacagcctgtttacctcaccggaagtggcgcgcaatgttgcgaaaccgctggtcagttatatcgacaaagctctggtcaccgatcgcaccagcgcaccgaaaattacagtgttggttgggcacgactccaacattgcctctctgttaacggcgctggatttcaaaccgtatcagttgcatgaccagaacgaacgcacgccgattggcggcaaaatcgttttccagcgttggcatgacagcaaagccaatcgcgatttgatgaaaattgaatatgtgtatcagagtgcggaacagttacgtaatgccgatgcgttaaccctgcaggcacctgcgcagc

SEQ ID NO: 10824 - DNA, 3489 bp, Homo sapiens
  SIMILAR (442)..(1884): 911254mologous to Homo sapiens putative p150,accession number U93569,Smith-Waterman Score=2277.
atggtgtggggaatgtctcccaacaagacaccttatcaagcgctctctctccactctgctgttcctaccacatattcccaggcagatgatgattattctccaccgtctaagagaccaaaggccaatgagctaccgcagccaccagtcccggaacccgccaatgctgggaagcggaaagtgagggagttcaacttcgagaaatggaatgctcgcatcactgatctacgtaaacaagttgaagaattgtttgaaaggaaatatgcggaagccttggggagcactgaagccaaggctgtaccgtaccaaaaatttgaggcacacccgaatgatctgtacgtggaaggactgccagaaaacattcctttccgaagtccctcatggtatggaatcccaaggctggaaaaaatcattcaagtgggcaatcgaattaaatttgttattaaaagaccagaacttctgactcacagtaccactgaagttactcagccaagaacgaatacaccagtcaaagaagattggaatgtcagaattaccaagctacggaagcaagtggaagagatttttaatttgaaatttgctcaagctcttggactcaccgaggcagtaaaagtaccatatcctgtgtttgaatcaaacccggagttcttgtatgtggaaggcttgccagaggggattcccttccgaagccctacctggtttggaattccacgacttgaaaggatcgtccacgggagtaataaaatcaagttcgttgttaaaaaacctgaactagttatttcctacttgcctcctgggatggctagtaaaataaacactaaagctttgcagtcccccaaaagaccacgaagtcctgggagtaattcaaaggttcctgaaattgaggtcaccgtggaaggccctaataacaacaatcctcaaacctcagctgttcgaaccccgacccagactaacggttctaacgttcccttcaagccacgagggagagagttttcctttgaggcctggaatgccaaaatcacggacctaaaacagaaagttgaaaatctcttcaatgagaaatgtggggaagctcttggccttaaacaagctgtgaaggtgccgttcgcgttatttgagtctttcccggaagacttttatgtggaaggcttacctgagggtgtgccattccgaagaccatcgacttttggcattccgaggctggagaagatactcagaaacaaagccaaaattaagttcatcattaaaaagcccgaaatgtttgagacggcgattaaggagagcacctcctctaagagccctcccagaaaaataaattcatcacccaatgttaatactactgcatcaggtgttgaagaccttaacatcattcaggtgacaattccagatgatgataatgaaagactctcgaaagttgaaaaagctagacagctaagagaacaagtgaatgacctctttagtcggaaatttggtgaagctattggtatgggttttcctgtgaaagttccctacaggaaaatcacaattaaccctggctgtgtggtggttgatggcatgcccccgggggtgtccttcaaagcccccagctacctggaaatcagctccatgagaaggatcttagactctgccgagtttatcaaattcacggtcattagagtcttcctgaaacacagctacacccgtattatccatggctgctttcctgtcacagctcagaggctcaggcaagagctacagatgctcatgaccgaatgtctcacctgggccaggaatggcagcagcaagcaccctctcagcctagcccagaagccagagttcctatttcatcagttgcaaagcagagacaatgccatctgcccgatagcagagcaaaaggcaggtaaagccttagggacaacagtgatggtgtctgttccctatgagaagatgctgcgagaccagtcggctgtggtagtgcaggggcttccggaaggcgttgcctttcaacaccctgagaattacgaccttgcaaccctgaaatggattttggagaacaaagcagggatttcattcatcataaatagacccttcctaggaccagagagtcagctgggtggccctgggatggtaacagatgcggagagatccatagtatcaccaagtgaaagctgcggccccatcaatgtgaaaactgaacccatggaagattctggaagccacccttcttccacaagcaatgaagtaatagaaatggaattaccaatggaagattccactccgctggtcccttcagaagaaccaaatgaggaccctgaagccgaggtgaaaatcgaaggaaacacaaattcatccagtgttacaaattctgcagcaggtgttgaagatcttaacatcgttcaagtgactgttccagaacctgctaaggccatcaaacctattgatcggaagtcagtccatcagatttgctctgggccggtggtactgagtctaagcactgcggtgaagaagatagtaggaaacagtctggatgctggtgccactaatattgatctaaagcttaaggactatggaatggatctcattgaagtttcaggcaatggatgtggggtagaagaagaaaacttcgaaggcttaactctgaaacatcacacatctaagattcaagagtttgccgacctaactcgggttgaaacttttggctttcgggggaaagctctgagctcactttgtgcactgagtgatgtcaccatttctacctgccacgtatcggcgaaggttgggactcgactggtgtttgatcacgatgggaaaatcatccagaaaaccccctacccccaccccagagggaccacagtcagcgtgaagcagttattttctacgctacctgtgcgccataaggaatttcaaaggaatattaagaaggtaattgcgcgacgtattatcgattatcgctacgacatgccctatgtacgggaaacgtatcaggacagcggcctgacttttacgatcgagcagcatgaagatttaaactgtgcgaccttgccattgtacttctccaaagctagtgtcttcaccgctctgcaaaatatggcaaagtcaacggtagctctcatcaccactgcggcccgagaccggagctcggccggcgcgggggcggcggcgcgggcgggccgacaaaagggaggagcccgccaattgcaaggggagcgcgggcgagggagcagcgccgcagagcagcagccgaggggcgagcggcggagcagccggcgcgcgaccggcgcggggggagcagctggtgttcgctgtaacaaacaacttgccactcaaacgccggtccccgctgcgcatgcggccgcgcgcggctgccggacttgtagtccgcctgggggggctcccccggtgctgctgctgctgctgctgttgctgctgttgctgccgcgggggctgggcggccggagctaccggcagcccggtgcacgggaaatgcaggagcgcgggcaccctcaggactaa

SEQ ID NO: 10825 - DNA, 2235 bp, Homo sapiens
  SIMILAR (219)..(115): 941254mologous to Homo sapiens Gene with similarity to rat kidney-specific (KS) gene,accession number AC003034,Smith-Waterman Score=166.
tcaatatctggctggaacaagtggattgtcgctgttaaatccttgagttggctgggaaacatcgttcgcgcagatcagatcaaggtttttacggatacgtttttgccgggcgtattcttccacattatttgtttcggcggcaaatccaacgacgtagggtcgatggtcttttagtgcggcaacggggcgcagcataaaaatattttgctgctgtacagaagcattcacggcggcttccatttccagcgcggtcatcacatcaacacgtttaacaaacggtggcgtcggtagtgaaaccggacctgataccagcgtgacgttcgcgccacgacgggcagcggcggcggcgatagaaaaacccatcttgccggagctgtgattagagatataacgcaccggatcgagcggttcacgcgtcgggccggcggtaatcataatgttcagatgtttcaggtcgttgacgggcgaaaatgcgctaccgccatatccacagttctggatatgtttggcgatcactttggtcggcagaagatcgcttcctgtcagcgctggctggcgaaaacgatccgtacagttcagcagccgatctgcaaaaacattgtcaggaaaccgggctgtcactctctggcctgatgatgaaaaacgagctggcgcaaatcggcgattgagagcgatggcgcgttgatggagtttgatgtaaacgaagctaacgtggtgaaaacgatgatggcgcacgcgagaaatattctgctggtcgccgatcacactaagtatcatgcttcggcggcggttgaaattggtaacgtggcacagtgatgggggagcagagataaccgtgatgaaattcgcaatacgcttgtacttgatacgcttcggctccagcgcgtctgcgcccagcgtgcgtttcttgtactcttcgtactcggtaaagttaccttcgaagaactcaactttaccttcatcctggtaatccagaatgtccgtggcgatacggtcgaggaaccaacggtcgtgcgagataaccatcgcacagcccgggaactccagcagggcgttttccagcgcgcgcagggtttcgatatccaggtcgttggttggttcgtcgagcagcagcatgttgccgccaacctttccagatgcagattggtgaatacaccaacgcagcaggtcaggttttccacggcgacattccgcgttatatggcgggtgaccccgactgcgggtaaactgtctggtggcttcctgttcaaaatgtacggtctgccagctgccgcaattgctatctggcactctgctaaaccagaaaaccgcgcgaaagtgggcggtattatgatctccgccggcgctgacctcgttcctgaccggtatcaccgagccgatcgagttctccttcatgttcgttgcgccgatcctgtacatcatccacgcgattctggcagcactgtttatgtggaaatttgtcccggaaaccaaacgtaaaacccttgaggagctggaagcgctcagtaacaggatcgcagccgagtagatcaacacatccagtggcgatttatgatcgacgatgatcaagcgcacaatggcgatgatcccaatatagacaaagtaacgtagcgggaagtgaaaaccggactgaaagtacttcacaatcagcgcgataaattcgaaatagagaaagtaaaccaccagtccttctaccagctcatatttgctggttgttcttgcgcggacagcctgacagccagatgcaccgtatctttgccgaggaagacaaccaaaatcaggagaggacgtcgaaaattgacctatcaaagtctctagggccgtgcttccagcatgtgttccttgatggatctgcttcacaaaccttggggctattgtctctgggacagctagcctcccgtcagagaacagccaccatccacctttaatatattttcctgtttcctggccaaaccaagctttttcaattgaagagtaattgggtacctctggcaaagggggctcaatgttgataatcaccgaagttcgcacgcccgccagaatcaccggagccgccagcggtagctcgaccttacgcacgattgccgcaatagtgtcaacattcagcccggtttcggcagagattggcacgatatcgaggaagttcatctggcttgccaggaactgcaggtgcggcagcagatcggctttctcctgcacgttgtccactttgttcaccgcgaggattacccccat

SEQ ID NO: 10826 - DNA, 573 bp, Homo sapiens
  SIMILAR (386)..(763): 971254mologous to Homo sapiens bA346K17.2 (A novel protein similar to the cell division control protein 91 (CDC91, YLR459W or L9122.2) from Yeast),accession number AL118520,Smith-Waterman Score =665.
atgctgagcatggaagatgtgctggagatcctgcgcatcaaactcgtcggcgtgatcccagaggatcaatcagtattgcgcgcctctaaccagggtgaaccggtcattctcgacattaacgccgatgcgggtaaagcctacgcagataccgtagaacgtctgttgggagaagaacgtcctttccgcttcattgaagaagagaagaaaggcttcctcaaacgcttaaaccagcaccgctgcgtgaatgttgcgcgaggccagaatagcaatgatgaagaagccgaggatacccagaagtacgctgtgagaagtcagattaccgatgctcaccagcgtttccgggttagcgacaatcacacctgcgtttttcagccccatcatgccaatgaacagaccgataccgctggtaatacccacacgcagactcaccggaatgttggctatcatccagtagcgaacgcggaaaatcaagattgcgcccatcccgacctgccacggcaagcccatcgcctgtacaacgacaaaagcgaagaacgcattcaggcccatagcgggtgccagtgcaactggcag

SEQ ID NO: 10827 - DNA, 3273 bp, Homo sapiens
  SIMILAR (1)..(345): 931254mologous to Homo sapiens bA346K17.2 (A novel protein similar to the cell division control protein 91 (CDC91, YLR459W or L9122.2) from Yeast),accession number AL118520,Smith-Waterman Score =557.
atgaagcggcatttgctacaggatatccgtcgctcggcttacgtttatcgcgtcgattgcggcggctgcaacgcctgtgaaatcgaaatttttgctgccattacaccagtattcgacgcagaacgttttggcattaaggttgtttcatcaccgcgtcacgccgatattttgttatttactggcgcagtcacccgggcgatgcgtatgcctgcacttcgggcgtatgagtctgcccccgatcataaaatttgtgtttcctacggcgcgtgcggtgtcggcggcggtattttccacgatctctacagcgtctggggcggtagcgacaccattgtccccattgatgtttggatccccggctgcccgccaacaccggccgccaccattcacggtttcgccgtggcgctcggtttgctgcaacagaagattcacgctgtggattatcgcgatcccaccggggggctggtgccgccgcatatcgccgccgggatcaacctgaatttctggcctgccgggcgatttttccgccgtctgggggcgttctttattcgccgtacgtttaaaggcaataaactttattccaccgttttccgggagtatctcggcgaactgttcagccgtggttattccgtcgagtacttcgtggaaggcggtcgttcccgtacggagcgtttgctggatccgaaaactgtcaataaaattgcggcattaatgcatgatgcaacagaagcgtattgccaggacatccacgaaccactgaaacgccttcttcctgactataaacggatggaagaaaaaatagatgcagtaatccgtgagaaatacgggttacctcctgttatgagcacgccagtgaaatatgccgatctcattatgctggcaaccgaacgccgtgatctcgggcttgatgatggctctttctggcctgtactggaaggcatcccggcaacagagatgttcaacgtgattccactggcaccgggtcatgcctacgggatgtttatggaacgttttaacgatttatcggataatgccaaaagcaccggaggctggagcataatgaccacatttaccaataaagaactgattaaagaaatcaaagaacgaatcagcagcctagaggttcgagacgatattgagcgccgtgcttatgaaatcgcactcgtatctctggaagtagagccagatgaacgcgaagcctatgaattattcatggaaaagcgtttcggtgacttagtagatcgtcggagagcaaaaaacggcgataacgaatacatggcatgggatatgactctcggttggatcatctggcagcaacgagctgtaccgcaaatcgccatcaaaagtaatgcccgtggttatgtaccccctgaacgttgggatgaagggatcaacgcgctattactgggatattcgtttagcggggctaacagtattcatagcagcgcagacagtgattctggcgacagctattttctgaatttaaacagtggcgttaatttaggcccatggagattgcgcaacaattcaacatggagtcgtagtagtggccaaaccgcagaatggaagaatctcagcagctatttgcaacgggcggttatgcctctgaaaggcgaactgaccgtaggtgatgattatactgcaggcgattttttcgatagtgtcagctttcgtggtgtgcagctggcgtcagatgacaacatgctgccagacagcctgaaagggtttgcgcctgtggtgcgtggtatcgccaaaagcaatgcccagataacgattaagcaaaatggttacaccatttaccaaacttatgtatcgcctggtgcttttgaaattagtgatctctattccacgtcgtcgagcggtgatttgttagttgaaatcaaagaagcggacggcagcgtcaatagctacagcgtaccgttctccagtgtgccattactccagcgtcaggggcgaatcaaatacgcggtgacgatcactgcaggcatgcaagctgcttgccgtaaagtgggaatcgggtatctttatgagaagggtcatgacgacgctatcgcaatagttctcgccctcgcctcaccagagcttgatgtcaaagcaattacgtcttccgccggaaaccagacaccagaaaaaaccttacgcaatgttctgcgtatgctgaccttgcttaatcgcaccgatattccggtagcaggcggcgcggtaaaaccgttaatgcgtgagttgattatcgcggacaatgtgcacggcgaaagcggtctcgacggcccggcattaccggaaccgacattcgcaccgcaaaactgtacggcggtagagctgatggcgaaaacgctgcgtgaaagtgcggaacctgtcaccattgtgtctaccggaccgcaaactaacgttgccttgctgctcaatagccatccggaactgcatagcaaaattgcccgtatcgtgattatgggtggcgctatggggctgggtaactggacgcctgcggctgaatttaatatttacgttgacccggaagcggcagaaattgtcttccagtcagggatcccggtggtgatggccggtctggatgttactcataaagcacaaatccacgttgaagacaccgagcgtttccgcgcgattgcaacgcactaccatactttaaaccacagacaaaaggagttaccgatgaaattgttctacaaaccgggtgcctgctctctcgcttcccatatcaccctgcgtgagagcggaaaggattttaccctcgtcagtgtggatttaatgaaaaaacgtctcgaaaacggtgacgattactttgccgttaaccctaaggggcaggtgcctgcattgctgctggatgacggtactttgctgacggaaggcgtagcgattatgcagtatcttgccgacagcgtccccgaccgccagttgctggcaccggtaaacagtatttcccgctataaaaccatcgaatggctgaattacatcgccaccgagctgcataaaggtttcacacctctgtttcgccctgatacaccggaagagtacaaaccgacagttcgcgcgcagctggagaagaagctgcaatatgtgaacgaggcactgaaggatgagcactggatctgcgggcaaagatttacaattgctgatgcctatctgtttacggttctgcgctgggcatacgcggtgaaactgaatctggaagggttagagcacattgcagcatttatgcaacgtatggctgaacgtccggaagtacaagacgcgctgtcagcggaaggcttaaagtaa

SEQ ID NO: 10828 - DNA, 4353 bp, Homo sapiens
  SIMILAR (5502)..(1309): 661254mologous to Homo sapiens mysoin heavy chain 12,accession number Y07759,Smith-Waterman Score=4241.
atggattctcacggtttcggcatggcttcggtgcgttttatttgcggcactcaggacagccataaagagcttgaacaaaaactggcggccttcctggggatggaagatgcgattctctactcttcctgctttgatgctaacggtggcctgtttgaaacgcttctgggtgcggaagacgccattatctccgacgcactgaaccacgcgtctattattgatggtgtgcgtctgtgcaaagctaaacgctatcgctatgccaacaacgatatgcaggagctggaagcacgtctgaaagaagcgcgtgaagccggtgcgcgtcatgtgctgatcgccaccgatggtgtgttctcaatggacggcgtgattgccaacctgaagggcgtttgcgatctggcagataaatatgatgccctggtgatggtagacgactcccacgcggtcggttttgtcggtgaaaatggtcgtggttcccatgaatactgcgatgtgatgggccgggtcgatattatcaccggcctggcggttggcttctggcagaacctcgacgagctgcaagagaaagcggtgattgagcgcgagttccgtccaggcatcgaaaccactgagcagtttgctatgagacgagaacttgccatcgaattttcccgcgtcaccgaatcagcggcgctggctggctacaaatggttaggacgcggcgatgaaaacaccgcggacggcgcggcggtaaacgccatgcgtattatgctcaaccaggtcaacattgacggcaccatcgtcattggtgaaggtgaaatcgacgaagcaccgatgctctacattggtgaaaaagtcggtactggtcgcggcgacgcggtagatattgctgttgatccgattgaaggcacgcgcatgacggcgatgggccaggctaacgcgctgtcggtgctggcagtaggcgataaaggctgcttcctcaatgcgccggatatgtatatggagaagctgattgtcggtccgggagccaaaggcaccattgatctgaacctgccgctggcggataacctgcgcaatgtagcggcggcgctcggcaaaccgttgagcgaactgacggtaacgattctggctaaaccacgccacgatgccgttatcgctgaaatgcagcaactcggcgtacgcgtatttgctattccggacggcgacgttgcggcctcaattctcacctgtatgccagacagcgaagttgacgtgctgtacggtattggtggcgcgccggaaggcgtagtttctgcggcggtgatccagcgcattagatggcgacatgaacggtcgtctgctggcgcagtcatgacgtcaaagtgcgacaacgaagagaatcgtcgcattggcgtagcaggtagctggcacgctgcaaagcgatgggcatcgaagccggtaagtattgcgcctgaagcatatggcgccagcgatacgtctcggtaccaatattccctgatacttttcgactgcggttcgacaaaaatcccgctggatcatcggcatgttttccaaggctttaaaacccataaatggacctccagcctgacgctgaactactttctctggcgcgaccgcaaaggggcaatcagtaactttgtcagcttcctcgcgatgctggtgatgatccagcttttgctgttgctggcgtatgaaagtttgtggcccgatgcctggcatttcctttctattttcagcggcagcgcatggttaatgaccctgctgtggctaaactttggtttgatggttaaccgcatcgtgcagcgggtgattttcgttactggctactacggcctgacgcaggggctgctttccgtcctgcgtcttttctggggcaacctgattaacttcatggccaactggcgcgcgctaaaacaggtacttcaacacggcgatccacgtcgcgtggcgtgggataaaacaacgcatgacttccccagcgtgactggcgatacccgctcgttgcgcccgttaggtcaaattctgctggaaaatcaggtcatcactgaagaacaactcgatacagcactgcgtaatcgcgtcgaaggtctacgcctgggcggttcaatgctgatgcaggggctgattagcgccgagcagctggcacaggcgctggcagagcaaaacggccatgattgggtaacgccaaatcaccacattcaaaaaactgccgatgatcaatcctccgacggttgccacgacgggcatccgccgtgggtattgctgagctatacatatcgaatcgagctcggtacccaacgcgccaatgaaaatggcgaaagctttgtggcgatggtggatcgcatgatcgccgaaatgcacaaagattttgatgctttgaacattctgcgcccggatatggagccgcgcgcgacgcaccatatcgcagaaattattgaactcactgaacaactgatcgccaaaggtcacgcttatgtggcggacaacggcgacgtgatgttcgacgtcccgaccgatccaacttatggcgtgctgtcgcgtcaggatctcgaccagctgcaggcaggcgcgcgcgttgacgtggtcgacgacaaacgcaacccaatggacttcgttctgtggaagatgtcgaaagagggcgaaccgagctggccgtctccgtggggcgcgggtcgtcctggctggcacattgaatgttcggcaatgaactgcaagcagctgggtaaccactttgatatccacggcggcggttcagacctgatgttcccgcaccacgaaaacgaaatcgcgcagtccacctgtgcccatgatggtcagtatgtgaactactggatgcactcggggatggtgatggttgaccgcgagaagatgtccaaatcgctgggtaacttctttaccgtgcgcgatgtgctgaaatactacgacgcggaaaccgtgcgttacttcctgatgtcgggccactatcgcagccagttgaactacagcgaagagaacctgaagcaggcgcctggtacccatcagcactactgccagattctccagcatcgaaaacgccactgcgccgggcaaggtttccggtttacccgcaatcgccagatccgcttcaccagtgaccaccttttccatcgcatctgccgcatcaccagtagtaagtttaatctccaccgacgggtgttccgcgcggaagcgatccagaatcggcggcagatggctcacatcgcgcccattttttccctcaacatcctgttcctgttcgtctttaataccaccacgccgctgcagtggctgatggcttctgacgtggtggactacgaggagagccgcagcggtcgccgcctcgacgggctggtgttctccacctacctgttcagcctgaagattggcctggcgattggcggggcggtggtgggctggatcctggcgtacgtcaactattccgccagcagcagcgtgcagccggttgaggtgctcaccaccatcaaaattctgttctgcgtggtgccggtggtgctctacgcggcgcatgttcatcatgctgtcgctctacaagcctcaccgcatgcccgcgctggcaggcgcatcacggaccgcaggcacctcacctcaccacttcgccccacacatcgcacccgtatccgcacgctcgcgctctcacaccgctgccgcccgccgacatataaggaagataagaaagttctttttcgttcccgcctgacaactgccagcggcgggtattatcagaacttcgctaacaatctcaaccgcttctttctcaatctgcttgcgatgttcttcaccgaggaagctttcgcagtagatctatatgcgtcttccgtgcctgacggacgcgcggcgaaccagccgttgtcagtcatcactttcagaccgccaatagaagcaccgttgcccggagcagcagtcaggcgcgcggtgatcgggtcacctgcacagctgaacatccccggaaacagcgaagtgttccatctctgccgggtgatgtatctcgataaagagccgctgtttattgatagttcatggatcccgctgtcgcgttatcctgactttgatgagatttacgtcgaaggaagctccacctatcagttatttcaggagcgttttgacacgcgagtggtcagcgacaaaaagaccatcgatatctttgccgccacccgcccgcaggcaaaatggctgaaatgcgaactgggcgaaccgttgtttcgcatcagcaaaatcgcctttgatcagaatgacaaccggtgcacgtctccgaactcttctgccgcgccaatcgcgccgtccttctattccacccgccttggcctcccaaaatgctgcgatcacagacgtgaaccaccgcgcttgccctgtactgcagattaa

SEQ ID NO: 10829 - DNA, 1578 bp, Homo sapiens
  SIMILAR (158)..(460): 1001254mologous to Homo sapiens EVG1,accession number AF324466,Smith-Waterman Score=505.
atggggtttcgccatgttggccaggctggtctcaaactcctgacctcagtctattattgtgcaaaaatccaacaatccaacaacaatgtcaaggtcagagtgtcgtcatggtgtatcttgagtagggaggaggtgaaagctgctggagttgaggtccaagagagaggctggcatgttggagagatcatcatccaggatggtgacttgctctcagtgggctgctacaagaaacccggtagtggcgttgccaatttacggtttcatcgaacgttgcctggtaccgtttggtctgctccacatctggaacgtacctttccagatgcagattggtgaatacaccaacgcagcaggtcaggttttccacggcgacattccgcgttatatggcgggtgacccgactgcgggtaaactgtctggtggcttcctgttcaaaatgtacggtctgccagcttccgcaattgctatctggcactttgttaaaccagaaacccgcgcgaaagtgggcggtattatgatctttgcggcgctgacctcgttcctgaccggtatcaccgagccgatcgagttctccttcatgttcgttgcgccgatcctgtacatcatccacgcgattctggcaggcctggcattcccaatctgtattcttctggggatgcgtgacggtacgtcgttctcgcacggtctgatcgacttcatcgttctgtctggtaacagcagcaaactgtggctgttcccgatcgtcggtatcggttatgcgattgtttactacaccatcttccgcgtgctgattaaagcactggatctgaaaacgccgggtcgtgaagacgcgactgaagatgcaaaagcgacaggtaccagcgaaatggcaccggctctggttgctgcatttggtggtaaagaaaacattactaacctcgacgcatgtattacccgtctgcgcgtcagcgttgctgatgtgtctaaagtggatcaggccggcctgaaaaaactgggcgcagcgggcgtagtggttgctggttctggtgttcaagcgattttcggtactaaatccgataacctgaaaaccgagatggatgagtacatccataaaaaaccttctcgtccggacgcttcgcaaccggacacgcagacggatgaacaggattttttaactcgccatcctgatgcggttgtattcagccctaaaaagcgccagtggggaacgcaggatgatttgacctgcgcacagtggctctggaaaaaaatcatcgccctgtacgagcaggccgccgaatgtgacggcgaggtggttcgtcccaaagaaccgaactggacagcctgggcaaacgaaattcgcgtgatgtgtgtgcaggatggtcgtactcacaaacaaatgtgcgagatgtacagccgcgtcagccgcgatccgttttggtgccgtaacgtgctcagcccgtcgaaggtgcgggaaaaatgggatgagctttccctgcggttatcgccgtccgtcagcacgtacacagaaaaacgcgaagacccgtacttcaaagccagttacgacaatgtggaatacagccagatcccggcaggattcagggg

SEQ ID NO: 10830 - DNA, 3834 bp, Homo sapiens
  SIMILAR (373)..(789): 971254mologous to Escherichia coli K12 putative membrane / transport protein,accession number AE000448,Smith-Waterman Score= 656.
tgtcaattggcatgatggggctgaaaaacgcaggtgtgattgtcgctaacccggaaacgctggtgagcatcggtaatctgacttctcacagcgtacttctgggtatcctcggcttcttcatcattgctattctggctcgcgcaacattcacgcagcggtgctggtttctatcgtggtgacgacgctgctgggctggatgctgggtgatgtgcactacaatggcatcgtttttggcgccgccgagcgtaatgacagttgtgggtcatgtagatttagccgggtcgtttaacctcgggctggcaggggtgattttctctttcatgttggtcaacttgtttgactcctccggtacgctgattggcgtgaccgataaagcaggttctggcggatgagaagggaaaattcccgcgcatgaagcaggcgctgtatgtcgacagtatctcttccgtgaccggttcgtttatcggtactttttccgttacggcttatattgagtcctcttccggcgtatcggttggcggtcgtaccggtctgacggcagtggttgttggtctgctgttcctgctggttatctttctgtcgccgctggcggggatggtgccaggctacgctgcagctggtgcgctgatttacgttggcgtgctgatgacttccagtctggcacgcgtgaactggcaggatcttactgaatctgttccggcgtttattaccgccgtgatgatgccgttcagcttctcgattaccgaaggtatcgcgctgggctttatctcctactgcgtgatgagtatactcatccggttccggggatctctagagtcgtggtatcccggtcggcggctattggcattgggtttgatcacaatattcggtttggtaaatggcatgacgttattgccggaagaaaaggtgctcgacgtcccgaccgatccaacttatggcgtgctgtcgcgtcaggatctcgaccagctgcaggcaggcgcgcgcgttgacgtggtcgacgacaaacgcaacccaatggacttcgttctgtggaagatgtcgaaagagggcgaaccgagctggccgtctccccggacgctcgataacgatacgagatacggacgctttagccagttccttagtcaggtactgacctgtacgtccgcaagacagattctacaacgtgtcgacactcttcctctttatttacatgcttatgcctttcatttaaatatgcggctggaaagagtgttgcctgctgatttacttgatatcgcaagtgaaaataatctacgtggcgtcaaaatccatgttctcgatggcgagcgtttttctcttggtaatatggacgataaagaactctctgcctttggggataaagcccgccgtctgaaccttgatattcatattgaaaccagcgcctcagataaggcatctattgacgaagccgtcgccatcgcgttgaaaactggggcatcgtccgtacgtttttatccacgttatgaaggtaatttgcgcgacgtattatcgattatcgctaacgacattgcctatgtacgggaaacgtatcaggacagcggcctgacttttacgatcgagcagcatgaagatttaaaaagtcatgagctggtgtcgctggtttcccccagccccgaccttggaaaacgaggccaggcgccaagctgccatgcctgcagctcccccgtgcgcccgaacagctgcgccgtggcggcgcaggtttatatcggcagcgaatatgaacatcagtcgatcaaaaatattattcagctggttgatgccggaatgaaagtgggaatgccgaccatggccgtgactggcatatggtgcgcgatcagcgttactttctcgctcgcgactcgaatcgccgctgaaatgggggcgcaaattatcaaaacctattatgtcgaaaaaggttttgaacggattgttgccggatgtccggtacccattgttattgctggcggtaaaaaattaccggagcgcgaggcgctggaaatgtgctggcaggctatcgatcagggcgcttctggtgtggatatggggcgtaatattttccagtctgaccatccggtggcgatgatgaaagccgtattggcagtcgtgaatatgacaccttttgtggggctatcgataaactcgaggcagaactcaaaaattccgcttcctgacagagttaatagcgggtcatgcgcgcgtacccgtgggatcctctatgagtcagcggcagatcttccagcggtttgcctgacgaatggcttccaccaccgcttcaccaacaatatggtgcgcctcgcggaacgagtccttgagatcctgctgaccatcctcaaagcggtggtgatcctgctggtggttgtcacctgcggggcattcatgagctccgctaaatcccacttgttgccagcgccaccgccaaagcgccgtgaaaaacatcaaccggccttcaaagttgatgttaagctttccggcatcacaaagcggttcatgtcggctaagcggccgtgcgtcaggaatacgccgattctaaccagctgtccctcctgttcagctactgacgccttattggaaggccaggaggtttttgcaaatcttcaggaaggaatgagccaaaggtggctgttctttcccagcggtaacaggcacaagattgatcagcagcatctctttacttttgaacacgcgttcggtgagggttccggcttcatcgacttcgctctgttcgtgggcgggatgctgtttatcaagatagtgtaccagagagaacgccagccaatcagcagcctagaggttcgagacgatattgagcgccgtgcttatgaaatcgcactcgtatctctggaagtagagccagatgaacgcgaagcctatgaattattcatggaaaagcgtttcggtgacttagtagatcgtcggagagcaaaaaacggcgataacgaatacatggcatgggatatgactctcggttggatcatctggcagcaacgagctggtatccatttttcaacaatgtcacaacaagaggtccttccggtcatcattatgaccgcacattccgatctggatgctgccgtcagcgcctatcaacaaggggcgtttgattatctgcccaaaccgtttgatatcgacgaagcagtggcgctggttgagcgcgctatcagtcattaccaggaacagcagcagccgcgtaatgttcagcttaacggcccaacgaccgatatcatcggcgaagcgccagccatgcaggacgtgttccgtattatcggtcggctttcgcgttcttctattagcgtgctgattaacggcgaatccggcaccggtaaagaactggtcgctcatgccctgcatcgcccagttcgcgcgcggcaacctgtaaaaaatggcgcgccagacggggaatatcttcccgacgttccgcagcggcggcagatgaacgcggataacgttcaggcggtggaacagatcctcacggaacttaccttcctgcactcgctgttcgagattcaggttttccacggcgacattccgcgttatatggcgggtgacccgactgcgggtaaactgtctggtggcttcctgttcaaaatgtacggtctgccagctgccgcaattgctatctggcactctgctaaaccagaaaaccgcgcgaaagtgggcggtattatgatctccgcggcgctgacctcgttcctggaccggtatcaccgagccgatcgagttctccttcatgttcgttcggcggatcagttacaggctttcgatgaaacgatcctcgccagtgggatcgtgccgcgcactggctcccagggcttgaggaaatggcgattctctgcgtaa

SEQ ID NO: 10831 - DNA, 642 bp, Homo sapiens
  SIMILAR (183)..(356): 1001254mologous to Escherichia coli O157:H7 partial putative pump protein; disrupted by IS629,accession number AE005372,Smith- Waterman Score=291.
ggtaagttatgcgagcaaccgcagccaatctcttccttgattcagggctattccaagaatgccaacaagagcctcagcaagtaacggacacgcacccgtatcactgccctatcccgaaaaacgtgacaccgtcacctttaaaataacaacaacaacgcaaacacaacaaccgaggaatgcccatgagtatgtcatccataccgtcgtcctcccaatccgggaagctctatggctgggtcgaaagaattggtaacaaggttccccatccttttctgctctttatctatttgattatcgtactcatggtgacgacggcaattttgtcggcctttggcgtcagtgcgaaaaacccgacccgatggtacgccggtcgtggtgaaaaacctgctcagtgtggaaggattacactggtttttaccccaatgttattaaaaactttagcggttttgctccacttggtgcgatcctggcgctggttttaggtgccggtctggcggagcgccgtcggcttactgccagcactaatggttaaaatggcatcgcatgttaattgcccgctacgccaagttatatggtgctgtttattgcttttttcagccacatttcttccgatgcggcgttagtgatcatgccaccgatggg

SEQ ID NO: 10832 - DNA, 1197 bp, Homo sapiens
  SIMILAR (766)..(1137): 931254mologous to Escherichia coli putative glycosyltransferase,accession number U38473,Smith-Waterman Score= 629.
atgcaacgcaacgggagaaataacatggccgaacatcgtggtggttcaggaaatttcgccgaagaccgtgagaaggcatccgacgcaggccgtaaaggcgtgatttcactggagaaaaatatgaatatgaagaccattgaagatgtatttattcacctgctttcagatacctacagcgcagaaaaacaattaacccgggcactggcaaaacttcgcaggcaacatcaaatgaaaattaagtcagcttttcatcgcactcgagaaactcatgacagattgacgtttgatccgcaaattttgtcggcctttggcgtcagtgcgaaaaacccgaccgatggtacgccggtcgtggtgaaaaacctgctcagtgtggaaggattacactggtttttacccaatgttattaaaaactttagcggttttgctccacttggtgcgatcctggcgctggttttaggtgccggtctggcggagcgcgtcggcttactgccagcactaatggttaaaatggcatcgcatgttaatgcccgcgtaggttgcggctttacggctaatttactgattgtcacaaccgacgtgttgctgtcggggatcagcacggaagcggcagctgcgttcaatccgcaaatgcacgtcagtgtaattgataactggtattttatggccagctccgtagtcgtactgacgattgttggcggcctgataaccgacaaaatcatcgagccacgagcgggcagcgtggtgctcgactctgtcccggacaacgcgctggtggtgggagaaaaagcgcgagtgaaggggctggcgtcacattttgtctacggttacggcaaaggcggcaaagagagcgtcagccatcagaactatccgcaggtcatcaaacatacgccgcggatgaccgcgatggcgaatattgctctgtttcgtctgtttaatcgcgatctgtttggcaatttcaatgagttatatcgcaccattactcgcacagcgggtccggtggtcctgcattttcatgtgctgcacagctactggctaaatcttaagagcgtggtgcgcttttgcgaaaaagtgaaaaaccataaaccggacgtcactctggtctggacgctgcacgaccactggagtgttaccggacgtgcgcctttaccgacggttgcgaaggctggaaaacaggctgccagaaatgcccgaccttaa

SEQ ID NO: 10833 - DNA, 1311 bp, Homo sapiens
  SIMILAR (805)..(1029): 761254mologous to Escherichia coli O157:H7 partial putative pump protein; disrupted by IS629,accession number AE005372,Smith- Waterman Score=271.
atgtgctctgagaaggttgctatgtgctgtgatgatgatgatgatgatgatgatgatgatgatgatgatgatgatgatgatgatgactattcttgctcccatggcttctgggatttctcctatacttggaacaccagtattccccaaggccatttaggaatggggtcccccattaaaggcctggtcgaaatcagggataaacttggtgaccgaacccaacgggtttacattcaaaggattacgggcaacggactcgaatttgaaaacccatgtaaacaatttaggggcctgaccagaatgtacatccgaagattaacccggctgagcgtccagtggtacatggtggccctagagcgtccagtgctacagaagtaccgttatagagggagcaaagcacacgagacaagccacagcatgagcactgtaaccagcagcaacgagaaacaagacaacacacgaatcgacacacaaggagcaacgaacagagagcaacattacgtcatcgtgaaacggtactggcgaatgaagtcgctccatatgccgccaccgataacgtgcttgcggcatcgactgatgtcggcgacgtcagttggaaactgcctgttgcccagtgtttcagcccctgttttgccgtcggtacaccgctacatacgtggcaactgggctattgcaagaatgccaacaagagcatcagcaagtaacggacacgcaaccgtatcactgccctatcccgaaaaacgtgacaccgtcacctttaaaataacaacaacaacgcaaacacaacaaccgaggaatgcccatgagtatgtcatccataccgtcgtcctcccaatccgggaagctctatggctgggtcgaaagaattgtgcgaaaaacccgaccgatggtacgccggtcgtggtgaaaaacctgctcagtgtggaaggattacactggtttatacccaatgttattaaaaactttagcggtttagctccacttggtgcgatcctggcgctggttttaggtgccggtctggcggagcgcgtccccaagcccaagttacgttccccgacaagttacattccccaagggcgccccgtgagacaaacaccaccaagagtaccccaaaaaccacaggatgtcccaattaactggcgtcagtataagcaaagcaacctaagccagaccgaacccaaagcagagccaggccaaccaaagcacagtttagccaagcgcaaacacaaccggacaacacagaccgaagagcaacgcaaccccaacgcaacagaacccaagcgccgccttcaagttagccgccgcgccagttag

SEQ ID NO: 10834 - DNA, 626 bp, Homo sapiens
  SIMILAR (48)..(401): 851254mologous to Escherichia coli O157:H7 putative exonuclease encoded by prophage CP-933K,accession number AE005255,Smith-Waterman Score=548.
cctctttgagttcacccttgacgtgaaagtcagggagtctccgattcttgttccgtgacgagagcatgcgcaccgcctgctcccctgacggcctgtgcagtaacgggttcggccttgagcttaaatgccctttcacctcccgcgacttcatgaaattccgccttggcggtttcgaagccatcaagtctgcgtacatggcccaggtgcagtacagcatgtgggtgaccggaaaagacgcatggttctttgcaaactacgacccgcgcatgaaacgcgaaggcattcaccacgtcgtcgttgagcgggatcctcagtacatgtccgatttcaacgaaatggtgccggagttcatcgagaagatggacgaggcgctggcagagatcggcttgactgtcagagaactggggatatgaaacttacaccattttaccgcaagcccgggcgagccgggcaattctccggcctccgtgaacgcgttatctggatgattcagacgcgcggccgcccggtcactggcagcgaaatcgccgagaagtttggcgtatcgctcattgagtttaaccgggtcgccaacggcatcacccgcggcaccggacagatagcgcagatcgttgagtcggaaaaat

SEQ ID NO: 10835 - DNA, 663 bp, Homo sapiens
  SIMILAR (137)..(661): 971254mologous to Escherichia coli DNA polymerase III beta- subunit,accession number L10328,Smith-Waterman Score=871.
gggcgcggggaaagaaacccccgaggaggggaaaagaggacttttgggacctttccatcgcaacccgtgtctccgtgaaccctataaaattcccggtagaagcgtgaccatttttaaagccgcctacaacaggtgagccggtccgttaggtggtcgtcttccgctaccgattcccggtaatctgctgttacaggttgctgacggtacgttgtcgctgaccggtactgatctcgagatggaaatggtggcacgtgttgcgctggttcagccacacgagccaggagcgacgaccgttccggcgcgcaaattctttgatatctgccgtggtctgcctgaaggcgcggaaattgccgtgcagctggaaggtgaacggatgctggtacgctccgggcgtagccgtttttcgctgtctaccctgccagcggcggatttcccgaacctcgatgactggcagagtgaagtcgaatttaccctgccgcaggcaacgatgaagcgtctgattgaagcgacccagttttctatggcgcatcaggacgttcgctattacttaaatggtatgctgtttgaaaccgaaggtgaagaactgcgcaccgtggcaaccgacggccaccgtctggcggtctgttcaatgccaattggtcaatctttgccaagccattcggt

SEQ ID NO: 10836 - DNA, 1080 bp, Homo sapiens
  SIMILAR (496)..(1068): 941254mologous to Escherichia coli DNA polymerase III beta- subunit,accession number L10328,Smith-Waterman Score=930.
atgcaggggcgacgcccgagcggggcccccgcggcggcgttgggcttcccccgccggccccggcccggtccccccggactcacccaggccgcgccagcccagggcgctgtcccagctgtccagaacagcgcagagctctccgagcagcgcgggcggcaggtcgaacagcagcgtgtgcgccgacagcgcgccgcgggccccacagttccccgccatggctcggctgcccgagccccggggacgaggcggagtccaggtccctgcacgcctgcgacaggccgttacacaaccgcggaaatcctgcttccacgacggcagcagagccctaggaacacgccgttctccggtcactgcaggggcggatataagaaaataatggaggggccaacggtgtctggcgtctgtgtttccacgccaccccggggccgagggacgcggccgacccgttttccgggcggaaacaattttcctttaataatcccgccgtgggttggccagaaaggccgcaggaaattgccggtcaagctgaaagcggcggatttcccgaacctcgatgactggcagagtgaagtcgaatttaccctgccgcaggcaacgatgaagcgtctgattgaagcgacccagttttctatggcgcatcaggacgttcgctattacttaaatggtatgctgtttgaaaccgaaggtgaagaactgcgcaccgtggcaaccgacggccaccgtctggcggtctgttcaatgccaattggtcaatctttgccaagccattcggtgatcgtaccgcgtaaaggcgtgattgaactgatgcgtatgctcgacggcggcgacaatccgctgcgcgtacagattggcagcaacaacattcgcgcccacgttggcgactttatcttcacctccaaactggtggatggtcgcttcccggattatcgccgcgttctgccgaagaacccggacaaacatctggaagctggctgcgatctgctcaagcaggcgtttgctcgcgcggcgattctctctaacgagaaattccgcggcgtacgtctttatgtcagcgaaagccagctcaaatcccgccaatga

SEQ ID NO: 10837 - DNA, 1461 bp, Homo sapiens
  SIMILAR (663)..(4): 961254mologous to Escherichia coli 100 pct identical to sp:YI5B_ECOLI,accession number AP002527,Smith-Waterman Score=1104.
ttaaacacgaggcatataggtctgattccgatattcaattggagtcagaccttttaatttcaggctaattcttctgctgttgtagtattcaatatattccgtaacagcatccttcagttcgcttatattactgaactcatcaagataaaaacactccgactttaaggttccaaagaaacactccaccacagcattatccagacaattgccttttctggacatgctttgtttaataccatgttctttaaggatattttgatatcttctcatacgatactgccatccctggtcagagtgcagaacaggatgctcgtgaggattaagctttttgaatgcctgatcgagcatattctcaaccatgttcatcactggtctttccgaaaggctgtaagaaataacttcgttgttgaagagatctattactggagacaaatacagcttgcgcccattgactgcaaattcagtaacatcggtaacccacttctcgtttggccgcgtagccttgaaatctcttaggagaacattaggggcggtttgccctacctctcctctgtaagagcggtatcgcttgaccttaatcgctgctttaagtgagagggttcccatcaggcgctgaacagctttatggttaatctgtatcccttttgatccttttgccaaacttgtcaaactcaggggaactggcttcccagttgcccctttgccatattccaagtccccctcagacttcatgtctctgctcatcagcactgtcccaggatcgcaactctgacagccaatacaacgggcagaattggtctgcaccacctgctcgcccatcgtcagcgcccccacggggcaagcgccaacacaaggggcgttttcacactgatggcacatcaccggcgcactgatgctgtccagtcgctgtaccttcagccggggtaaaaagacatcggcattcaactcctgttcggacgaggacgacggcgaccatccgcaccgctcccggtcaggatgaccaatccgagcgaacatttggtaaaaatcgatggtgtcattttgcacggcaacgggcagatgcagaatggtcacgcactcgaaggataaatgggcagtgttcatggcgattgtgcacagcgaccagcgtaattcatcaatctcctccatcgagcaataatttaattgctgaatgaatcgctgccaggcggagggcagaaaacgttcactatcagaggcaagtaacgcacgaaaggcgagcagaatttcatgttctgctacctcatattcttctggttgccaaacagatttagcaggcgactgcgcaatccgtagcgcctcctcatacgcctgacgaagttgtttaaaaccctgcggatcggtttctggatgaaaggacggtaacagcgccagataagcgcggcggataatatcgacgtcagtcgtttcctctatatcgaggatcttccagcaatttttcat

SEQ ID NO: 10838 - DNA, 1782 bp, Homo sapiens
  SIMILAR (1159)..(2838): 941254mologous to Homo sapiens putative p150,accession number U93564,Smith-Waterman Score=2767.
atgagcgaaagtaataagcaacaggcagtgaataagttgacagagattgtcgctaactttaccgccatgatttctacccgaatgcctgatgacgtggtggataaactaaaacagctaaaggatgccgaaacgtcgtcgatggggaaaattatctaccatacgatgttcgacaacatgcaaaaagcgattgacctgaatcgtcctgcctgtcaggacaccggggagattatgttcttcgttaaagtcggttcccgcttcccactgcttggcgagctgcaaagcatactcaaacaagccgtggaagaggcaaccgtcaaagcgccactacgtcacaatgcggtagaaatttttgacgaagtaaacaccggcaaaaataccggtagcggcgtaccgtgggtcacctgggacatcatccccgacaatgacgatgcggaaatcgaagtttacatggcaggcggcggctgcacgctacctggccgctcgaaagtgttaatgccgtcagaaggctacgaaggcgtggtgaaattcgtcttcgaaaatatctccaccctcgccgtaaacgcctgtccaccggtactggtgggcgtgggcatcgccacctcggtggaaaccgccgccgtactctcgcgtaaagccattttgcgcccgattggcagccgccatcccaatccaaaagcggcagaactggagctacgcctggaagaaggactcaaccgtctggggattggtccacaagggctgaccggcaacagttcagtgatgggcgtacatatcgaatctgccgcccgccatccgtcaaccatcggcgttgctgtctctaccggctgctgggcgcatcgtcgcggcacgctgctgcgcgttatgaaaaagatcctgacaaccccgatcaaagctgaagatctgcaagatattcgcgtcggcgatgtgatctacctgaccggtacgctggtgacctgccgcgacgtttgtcaccgccgtttgatcgaactgaaacgtccgatcccttacgatctcaacggcaaagcgatgttcctatacttatatggtatgctgtttgaaacgaaggtgaagaactgcgcacgtggcaaccgacggccaccgtctggcggtctgttcaatgccaattggtcaatctttgccaagccattcggtgatcgcgtgattgaactgatgcgtatgctcgacggcggcgacaatccgctgcgcgtacagattggcagcaacaacattcgcgcccacgttggcgactttatcttcacctccaaactgaacccggacaaacatctggaagctggctgcgatctgctcaagcaggcgtttgctcgcgcggcgattctctctaacgagaaattccgcggcgtacgtctttatgtcagcgaaaaccagctgaaaatcaccgccaacaacccggaacaggaagaagcggaagagatcctcgacgttacctatagcggtgcggagatggaaatcggcttcaacgtcagttatgtgctggatgttctgaacgcgctgaaatggcgaaaacgtccgcatgatgctgaccgattcggtttccagcgtgccaacggcagtggcaaaaccagcgtgctggaagccatctatacgctcggccatggtcgggcgtttcgcagtttgcagattggtcgcgtcattcgccatgagcaggaggcgtttgttctccacgggcgattacagggcgaagagcgcgagacagcgattggcttaaccaaagacaaacagggcgacagcaaagtccgcatcgacggtacagacgggcataag

SEQ ID NO: 10839 - DNA, 1178 bp, Homo sapiens
  SIMILAR (100)..(1617): 881254mologous to Homo sapiens putative p150,accession number U93574,Smith-Waterman Score=2241.
atgaaatcgttaattatcgttaatccggctgactgtattggctgccgtacttgtgaagtagcctgtgtggtcgctcacccttcagaacaggagttgaatgccgatgtctttttaccccggctgaaggtacagcgactggacagcatcaaaagattttgggagcaaatgatgcgcatagttaccgctgccgtcatggcctcaacgctggcagtcagttcattaagccacgctgctgaagtcggttcaggcgataactggcatccgggtgaagaacttacgcagcgcagtacgcagagccatatgttcgacggcataagtttaaccgaacatcagcgtcagcagatgcgagatcttatgcaacaggcccggcacgaacagcctcctgttaatgttagcgaactggagacaatgcatttccctggtatgctgtttgaaaccgaaggtgaagaactgcgcaccgtggcaaccgacggccaccgtctggcggtctgttcaatgccaattggtcaatctttgccaagccattcggtgatcgtaccgcgtaaaggcgtgattgaactgatgcgtatgctcgacggcggcgacaatccgctgcgcgtacagattggcagcaacaacattcgcgcccacgttggcgactttatcttcacctccaaactggtggatggtcgcttcccggattatcgccgcgttctgccgaagaacccggacaaacatctggaagctggctgcgatctgctcaagcaggcgtttgctcgcgcggccgattctctctaacgagaaattccgcggcgtacgtctttatgtcagcgaaaaccagctgaaaatcaccgccaacaacccggatcaggaagaagcggaagagatcctcgacgttccctatagcggtgcggagatggaaatcggcttcaacgtcagttatgtgatggatgttctgaacgcgctgaaatgcgaaaacgtccgcatgatgctgaccgattcggtttccagcgtgcagattgaagatgcggccagccagagcggcggcttatgttggcatgcccatgagactggaaggttctccaccgcttggtaatcccgaattccaaaagatatcatcgccctgtgctctgtatatcgccctgtgctctaaagccaggcaccacacaggacgatatctcggactatgtggcctctaa

SEQ ID NO: 10840 - DNA, 1986 bp, Homo sapiens; identical to SEQ ID NO: 8912
  SIMILAR (22)..(558): 981254mologous to Escherichia coli peripheral membrane protein C,accession number K01992,Smith-Waterman Score=870.

SEQ ID NO: 10841 - DNA, 1516 bp, Homo sapiens
  SIMILAR (1)..(3036): 941254mologous to Homo sapiens putative p150,accession number U93563,Smith-Waterman Score=4979.
atggccttcggcctgttctggctgatctggattttaatgtccaccatcactcgcggtatcgacggtatgtcgctggcgctgttcactgaaatgacgccgccgcccaatacggaaggtggtggtctggcgaacgctctggcgggtagcgggctgttaattttgtgggccacggtattcggtacgccgctgggcattatggcggggatttatctggcggaatatggtcgtaaatcctggctggcagaagtgattcgcttcattaacgacattctgctctctgcgccgtcgattgtggttggtctgtttgtttacaccattgtggtggcgcagatggagcacttctccggctgggcgggcgtgattgccctggcgttgttgcaggtgccgattgttatccgcaccaccgagaacatgctgaaactggtgccgtacagcctgcgtgaagcggcttatgcgctgggtacaccgaagtggaagatgatctctgcgattacgctgaaaagcgcggtggtcgggaatatgacccggatcctgcctgcgaatggccccaattgtggtgaaaaccgcgccgctgctgtttaccgcgctctccaaccagttctggagcacggacatgatgcagccgatcgccaacctgccggtgacgatctttaagtttgcgatgagcccgtttgcggaatggcagcaattggcctgggccggggttcgtaatttgaacttctactacggcaaattccatgccctgaaaaacatcaacctggatatcgctaaaaaccaggtctgtgtctgttataaccagtgcacagaatccctggtaaatggactgtacgctaatgcagcacatttggtcagtgtaggccaaaggagcaccggtaattcgtcagtgattaaagctcggcagggtagttccatccggccaatgattgtcaagtacagtgcgctttgtttatgccgtatgcggtctgagcgctttatccgtcgtacaaagcatcgcaaattcgatagattgcaatgcacttgtaggcctgataagcgtagcgcatcaggcaatttggcgtttgtcatcagtctcaggccggtgccgctggttgccgttgtttttgcgcttttcgccgcttttcccatgttttccgacgtcagcattcagttacgtcactttatttttgccaactttctgcctgctactggcgatgttattcagcggtatatcgaacaatttgttgccaattccaacaagatgaccgccgttggggcgtgcgggctgatcgtcaccgcgttattgttgatgtactccatcgatagcgcgttgaataccatctggcgcagtaaacgagcgcgaccaaaaatttactcgttcgccgtgtactggatgattttaacgctggggccgctgctggcaggggccagtctggcgatcagttcctatttgctatccaagcaatgggctatcgatatcgattccgtcaatagattaggtgccattatcctaacggcactcattacaggtgacacataa

SEQ ID NO: 10842 - DNA, 1497 bp, Homo sapiens; identical to SEQ ID NO: 10379
  SIMILAR (754)..(1305): 991254mologous to Escherichia coli 37KD protein, similar to YI22-ECOLI,accession number D85613,Smith-Waterman Score=989.

SEQ ID NO: 10843 - DNA, 1005 bp, Homo sapiens; identical to SEQ ID NO: 10395
  SIMILAR (418)..(1005): 1001254mologous to Escherichia coli transposase,accession number X60200,Smith-Waterman Score=1035.

SEQ ID NO: 10844 - DNA, 1659 bp, Homo sapiens
  SIMILAR (1884)..(1084): 681254mologous to Homo sapiens legumain,accession number Y09862,Smith-Waterman Score=863.
ctatatttccagacatctgttatcacttaacccattacaagcccgctgccgcagatattcccgtggcgagcgataacccagcgcactatgcggatgccattcgttataatgctcgaacgcctctgcaaggttctttgctgccgttaacccgtctggtttgggcatgatactgatgtagtcacgctttatcgttttcacgaagctctctgctattccgttactctccggactccgcaccgccgtgttcttcggttcaagtcccaacatccgggcgaactggcgtgtttcattagcccggtagcatgaaccattatccgtcagccactccactggagacgacggaagatcgttgccgaagcggcgttccaccgctcccagcatgacgtcctgtactggttcactgttgaagccgccgttagtgaccgcccagtgcagtgcctcacgatcacagcagtccagcgcgaacgtgacacgcagtctctctccgttatcacagcagaactcgaacccgtcagagcaccatcgctgattgctttctttcacggccactctggcggcgagaaccaccccagcgagcagccagatcatccccggcaggtagcccatttgcgccgccagtaccggccccaccagcggacctgctccggcaatggccgcaaaatggtgaccgaacagcactttcttgtccgtcggcacatagtccagcccgtcgttatggcgcaccgctggcgtcatacgcgtcgggtcaaccgccagcacatttttggcgatatacagcccataaaaacggtaagcgatcagatagatacagaccgacgccaccacaatccacagcgcgttgatctgttccccacgatttaaagcaatgtatcccagagcaaatgctcccattacagagagcactgtccagacgaggtatttccctgatttgttcatagttgttatccgtgtgcgtgtccatagagatgttacattttgtttcaccgaaggaatgataccgctgacttcagccaggattgccggctctttcggacgacgtgcttcgaacaggtccgcaacgcgcggcagaccaccggtgatgtccttggtaccgccggattcctgcggaatacgcgccagggtgtcaccagagctgatctgtacgccatcttccagctgaacaatcgctttacccggcaggaagtactgcgctggcatatcggtacctgggatcagaacgtcgttaccctgagcatcaacgattttcagtgccggacgcagatctttaccacctgcggtacgttctgcggaatccagaaccaccagcgaagacagaccggtcagttcgtcggtctgacgcgtaatggtctggccgtcgatcatgtcagtaaagcgtacaaaaccgcttacttcggtgataaccggcatggtgtgcgggtcccagtttgcaacggtttcgccgccagcaacctgttcgccatcgcctttcgccagtaccgcaccgtaaggtactttgtagcttttgaccaacatcttgatataccatatctttgaacactggcagaatattaacagcctgccaagttggccgcctggatatacctcgtactggcaatgccggagaaacagctcatatggcagcattaaagcaaacctctcgctgagctggaagcgagccat

SEQ ID NO: 10845 - DNA, 1115 bp, Homo sapiens
  SIMILAR (139)..(966): 941254mologous to Escherichia coli 37KD protein, similar to YI22-ECOLI,accession number D85613,Smith-Waterman Score=1382.
atgtaccaacagtccctgtacgttgttcgtgtgattgttctcatactgttaatctcagcctgtcgcaagtacgatgtaatgactctcaagagccgtgattggacggcctttattgatagcaagcgcccttattgcccggggatggggagtaagcttagtcagccgtgtctccgggtgtcgcgtgcgcagttgcacgtcattctcagacgaaccgatgactggatggatggccgccgcagtcgtcacactgatgatacggatgtgcttctccgtatacaccatgttatcggagagctgccaacgtatggttatcgtcgggtatgggcgctgcttcgcagacaggcagaacttgatggtatgcctgcgatcaatgccaaacgtgtttaccggatcatgcgccagaatgcgctgttgcttgagcgaaaacctgctgtaccgccatcgaaacgggcacatacaggcagagtggccgtgaaagaaagcaatcagcgatggtgctctgacgggttcgagttctgctgtgataacggagagagactgcgtgtcacgttcgcgctggactgctgtgatcgtgaggcactgcactgggcggtcactaccggcggcttcaacagtgaaacagtacaggacgtcatgctgggagcggtggaacgccgcttcggcaacgatcttccgtcgtctccagtggagtggctgacggataatggttcatgctaccgggctaatgaaacacgccagttcgcccggatgttgggacttgaaccgaagaacacggcggtgcggagtccggagagtaacggaatagcagagagcttcgtgaaaacgataaagcgtgactacatcagtatcatgcccaaaccagacgggttaacggcagcaaagaaccttgcagaggcgttcgagcattataacgaatggcatccgcatagtggtaccagggggcgaagggcgagattctctgtgcgcgcgacttacgcggccgggcgcttagcgaccatccctgggtaccgcgggggacctctcggcctgatgtgtggacaacccaataggaaacccacggatggtgccaatgagcggctgacgatgatccgcgctgctaccgcgatgagcgaagg

SEQ ID NO: 10846 - DNA, 727 bp, Homo sapiens
  SIMILAR (1)..(3156): 951254mologous to Homo sapiens putative p150,accession number U93565,Smith-Waterman Score=5296.
atgattgatgtcttagggccggagaaacgcagacggcgtaccacacaggaaaagatcgcaattgttcagcagagctttgaaccggggatgacggtctccctcgttgcccggcaacatggtgtagcagccagccagttatttctctggcgtaagcaataccaggaaggaagtcttactgctgtcgccgccggagaacaggttgttcctgcctctgaacttgctgccgccatgaagcagattaaagaactccagcgcctgctcggcaagaaaacgatggaaaatgaactcctcaaagaagccgttgaatatggacgggcaaaaaagtggatagcgcacgcgcccttattgcccggggatggggagtcacagacacccaacacagcatccagggtactcccattttccagcacaggtgcacccagccaggccatcatgcagccaggggctgcacaagcaaccatgtcaatcattgtgccacacacatcatctcttgcggccatcctgacacacattcatcagtctgtccaggttggctttcaggtcatgtcgtcagtcacaatcacaccagcacagcaagcacattcccgacatgcagacctcaccgttcaacttgcaccagcaacccaatccttcatgcatcctcactggtggcacagcccccaggggcacagtccatcaacaaggcagtccagcaacgaccatcatccccatcatcctgcaagtcaag

SEQ ID NO: 10847 - DNA, 2615 bp, Homo sapiens
  SIMILAR (265)..(1146): 1001254mologous to Homo sapiens calmegin,accession number D86322,Smith-Waterman Score=1569.
atggccaaagagatcagcagtgaacttctgaacaccattcttacccgtgtcggcggaccgggaaatatcgccagttgtggtaactgtatgacgcgcctgcgtctgggtgtacatgacagttcactggttgatcccaatatcaaaacgctggaaggcgtgaagggcgtcattttgaccagcgaccaggtgcaggtcgtttttgggcctggtaaagcgcatcgtgccgcaaaagcgatgagcgagctgctgggagaagcaccggtacaggatgccgcagaaatcgccgcccagaacaaacgtcagttaaaagccaaacaaacctccggcgtgcaacaatttctcgccaaattcgccaccatcttcacgccgctgatccccggttttattgccgccggtctgctgctggggatagcgacgttaattgccacggtgatgcacgttccggcagatgctcagggaacactacccgatgcgctgaatttcatgaaggtgctcagcaaagggtaccgagctcacagtcgtatacagggtaccgagctaactaccgttgatggttgcaagcgttttttcaccactcaaccaggtgtggttgatcgcgctttgttcggcatgaacggtttgctgcattgtcgcaccaataaattccatattggcaccgaaataccaggttccgctcacaccgcgcgcaattgcgccaacattaaaattcgacaatggctaacgctgctgtcggcgtttgtggcatcgatttttaacggcgttttcggtctgctgatggcgtggatcctaacccgctatcgcttcccaggccgcacgctgcttgatgcgctgatggatttaccctttgcgctgccaacggctgtcgccggtttaacgctggcctcgctcttttccgtaaacggtttttacggtgaatggctggcgaagtttgatatcaaagtcacctatacatggctggggattgcggtggctatggcctttaccagcattccgtttgtggtgcgtaccgtgcagccggtgctggaagagttaggcccggaatatgaagaagcggcggaaacgcttggtgcaacgcgctggcagagtttctgcaaagtggtgctgccggagctttctccggcgctggtggcgggcgtggcgctgtcgtttacccgtagtcttggtgaatttggcgcggtgatttttatcgccggaaatatcgcgtggaagacggaagtgacgtcgctgatgatttttgtgcgcttacaggagtttgattacccggcagcgagcgcgattgcttcgttgcacgtcattctcagacgaaccgatgactggatggatggccgccgcagtcgtcacactgatgatacggatgtgcttctccgtatacaccatgttatcggagagctgccaacgtatggttatcgtcgggtatgggcgctgcttcgcagacaggcagaacttgatggtatgcctgcgatcaatgccaaacgtgtttaccggatcatgcgccagaatgcgctgttgcttgagcgaaaacctgctgtaccgccatcgaaacgggcacatacaggcagagtggccgtgaaagaaagcaatcagcgatggtgctctgacgggttcgagttctgctgtgataacggagagagactgcgtgtcacgttcgcgctggactgctgtgatcgtgaggcactgcactgggcggtcactaccggcggcttcaacagtgaaacagtacaggacgtcatgctgggagcgtttttcaacgtgctgctggccgatacccccggcttggacatcgacacgctggacaaagacgtggctcacgacagccgctctatccagcctgcgatgctgcgcgacgacgaaatcctcacccatccggtgtttaatcgctaccacagcgaaaccgaaatgatgcgctatatgcactcgctggagcgtaaagatctggcgctgaatcaggcgatgatcccgctgggttcctgcaccatgaaactgaacgccgccgccgagatgatcccaatcacctggccggaatttgccgaactgcacccgttctgcccgccggagcaggccgaaggttatcagcagatgattgcgcagctggctgactggctggtgaaactgaccggttacgacgccgtttgtatgcagccgaactctggcgcacagggcgaatacgcgggcctgctggcgattcgtcattatcatgaaagccgcaacgaagggcatcgcgatatctgcctgatcccggcttctgcgcacggaactaaccccgcttctgcacatatggcaggaatgcaggtggtggttgtggccggctcatcacaaacttacgttgagggtagatctcacgtagcttatccatcacttcgaagatattttgctgcaatggcatctggtcatgcccattcggcagcaaaatctctttggttacagacgctttttccagcacgtcaaaataactgtcgaggcgtttacgtaatccgttttcgtcggcaggtaagtacttaccgatggcgtagcccagcggcagcacctgcgccgtcacttcgctaccgtcactgctttgccacaaaaactcggttttatcagtaccgtggcgctccgaacatccgcgccagaacatg

SEQ ID NO: 10848 - DNA, 1164 bp, Homo sapiens
  SIMILAR (265)..(753): 941254mologous to Escherichia coli 37KD protein, similar to YI22-ECOLI,accession number D85613,Smith-Waterman Score=837.
atggaccagtgtccttataaaagaggcgccagagagctgctttgccccttccaccatgtggagacacagagagaaggtgccatctctgagaaagtgggtccacatcagataccaaatctattggaccttggtcatgacttcgatgactggatggatggccgccgcagtcgtcacactgatgatacggatgtgcttctccgtatacaccatgttatcggagagctgccaacgtatggttatcgtcgggtatgggcgctgcttcgcagacaggcagaacttgatgagtggaccgtgaaagaaagcaatcagcgatggtgctctgacgggttcgagttctgctgtgataacggagagagactgcgtgtcacgttcgcgctggactgctgtgatcgtgaggcactgcactgggcggtcactaccggcggcttcaacagtgaaacagtacaggacgtcatgctgggagcggtggaacgccgcttcggcaacgatcttccgtcgtctccagtggagtggctgacggataatggttcatgctaccgggctaatgaaacacgccagttcgcccggatgttgggacttgaaccgaagaacacggcggtgcggagtccggagagtaacggaatagcagagagcttcgtgaaaacgataaagcgtgactacatcagtatcatgcccaaaccagacgggttaacggcagcaaagaaccttgcagaggcgttcgagcattataacgaatggcatccgcatagggcaaatccagatgccaacgtagtcagcgaagatgtgctgcgtgagagcgtcggtaagtcggtcgttaaccttattcacggcgtgcgtgatatggcggcgatccgccagctgaaagcgacgcacactgattctgtttcctccgaacaggtcgataacgttcgccggatgttattggcgatggtcgatgattttcgctgcgtagtcatcaaactggcggagcgtatggctcatctgcgcgaagtaaaagatgcgccggaagatgaacgtgtactggcggcaaaagagtgtaccaacatctacgcaccgctggctaaccgtctcggaatcggacaactgaaatgggaactggaagattactgcttccgttacctccatccataccgaatacaaacgaattgccaaactgctgcatga

SEQ ID NO: 10849 - DNA, 1936 bp, Homo sapiens; identical to SEQ ID NO: 10408
  SIMILAR (1275)..(784): 961254mologous to Homo sapiens putative p150,accession number U93563,Smith-Waterman Score=804.

SEQ ID NO: 10850 - DNA, 1662 bp, Homo sapiens; identical to SEQ ID NO: 10409
  SIMILAR (294)..(1595): 1001254mologous to Homo sapiens beta-tubulin,accession number U83110,Smith-Waterman Score=2298.

SEQ ID NO: 10851 - DNA, 1281 bp, Homo sapiens
  SIMILAR (187)..(804): 881254mologous to Homo sapiens beta-tubulin,accession number U83110,Smith-Waterman Score=945.
tcatgcaaaataactttgatttctcttatatctagcccagtctgtttcttggtctacaatcgcatgaacttgtaacatttcggcattttgttcttcatcaatttgtatcaatccatattttgaaaagaaagctaaagtcatttgtattttttcgacatcttcatccaagctaagcgataattcttcagaaagattatcaagtgctccttcataataaagaacaccttcattacttaacgactgcagcatcatgcgctgataaatgagcaccattgtatctccaccagcagattttcttggggatcctctgatcggcatgagtgtaggttgcatgaagggatgtggcagacatcgttttgcctgtccaatagccccccacttcctggtcatagaaccccagtcagctttgggaagctgcccctccccagtggaagtggatccagggggctggtaaggtgtcctgtcaactctcaagagctgcagaccagctgggtcgccagcaccacatttctgatccttgcttttcaatagttcctttaattctttgatttgctgcatattttccaataaatcctgccgttctgaagttagctccagtagccttgtatgcggatgccattcgttataatgctcgaacgcctctgcaaggttctttgctgccgttaacccgtctggtttgggcatgatactgatgtagtcacgctttatcgttttcacgaagctctctgctattccgttactctccggactccgcaccgccgtgttcttcggttcaagtcccaacatccgggcgaactggcgtgtttcattagcccggtagcatgaaccattatccgtcagccactccactggagacgacggaagatcgttgccgaagcggcgttccaccgctcccagcatgacgtcctgtactgtttcactgttgaagccgccggtagtgaccgcccagtgcagtgcctcacgatcacagcagtccagcgcgaacgtgacacgcagtctctctccgttatcatttaaatgcaaatttacaactttagcaacacaacccatctcacgaatcacaacacatttctcacatttcacaagacgttcaccgcagaaaccttccagcacataggaccacagcccactaccgacacgccttaccacactgctgaagcctactgctgtcagctcgtcaaactcatccgccgtcaagctttgcgccgttgctggcaaggagcagcaatcctgaagtgcaactccaagccgacgaaccactgcacctcctagacctcccat

SEQ ID NO: 10852 - DNA, 2373 bp, Homo sapiens
  SIMILAR (1)..(504): 971254mologous to Homo sapiens odorant binding protein b,accession number AJ251025,Smith-Waterman Score=854.
atgtcatatttgccacacagcagcctggtggccctgcctgttgcctttgaaagagagcctgccgtgatcctggctgtttctgtctccaggtatgatgaagaattggcccagggtgacggggctgaccgggagctgagaagccgtcagggtgatctgaaagtagagatgatggcaggggggactcagatcacacccctgaatgacaatgtcaccatattctgcaatatcttttattcccaacccctcaacatcacgtctatgggtatcacctggttttggaagagtctgacgtttgacaaagaagtcaaagtctttgaattttttggagatcaccaagaggcattccgacctggagccattgtgtctccatggaggctgaagagtggggacgcctcactgcggctgcctggaatccagctggaggaagcaggagagtaccgatgtgaggtggtggtcacccctctgaaggcacagggaacagtccagcttgaagttgtggggcccacaatgaaggcccagggccccccgccgccgacaacgaccgcaacgccacaccggcagcgccgccacctcggccacccgcagccacctccgcgactagtcattggagaacagatgattgatgtcttagggccggagaaacgcagacggcgtaccacacaggaaaagatcgcaattgttcagcagagctttgaaccggggatgacggtctccctcgttgcccggcaacatggtgtagcagccagccagttatttctctggcgtaagcaataccaggaaggaagtcttactgctgtcgccgccggagaacagttgcacgtcattctcagacgaaccgatgactggatggatggccgccgcagtcgtcacactgatgatacggatgtgcttctccgtatacaccatgttatcggagagctgccaacgtatggttatcgtcgggtatgggcgctgcttcgcagacaggcagaacttgatggtatgcctgcgatcaatgccaaacgtgtttaccggatcatgcgccagaatgcgctgttgcttgagcgaaaacctgctgtaccgccatcgaaacgggcacatacaggcagagtggccgtgaaagaaacaatcagcgatggtgctctgacgttctgctgtgataacgaagagagactgcgtgtcacgttcgcgctggactgctgtgatcgtgaggcactgcactgggcggtcactaccggcggcttcaacagtgaaacagtacaggacgtcatgctgggagcggtggaacgcagcttcggcaacgatcttccgtcgtctccagtggagtggctgacggataatggttcatgctaccgggctaatgaaacacgccagttcgcccggatgttgggacttgaaccgaagaacacggcggtgcggagtccggagagtaacggaatagcagagagcttcgtgaaaacgataaagcgtgactacatcagtatcatgcccaaaccagacgggttaacggcagcaaagaaccttgcagaggcgttcgagcattataacgaatggcatccgcatagggcaaatccagatgccaacgtagtcagcgaagatgtgctgcgtgagagcgtcggtaagtcggtcgttaaccttattcacggcgtgcgtgatatggcggcgatccgccagctgaaagcgacgcacactgattctgtttcctccgaacaggtcgataacgttcgccggatgttattggcgatggtcgatgattttcgctgcgtagtcatcaaactggcggagcgtattgctcatctgcgcgaagtaaaagatgcgccggaagatgaacgtgtactggcggcaaaagagtgtaccaacatctacgcaccgctggctaaccgtctcggaatcggacaactgaaatgggaactggaagattactgcttccgttacctccatccaaccgaatacaaacgaattgccaaactgctgcatgaacggcgtctcgaccgcgaacactacatcgaagagttcgttggtcatctgcgcgctgagatgaaagctgaaggcgttaaagcggaagtgtatggtcgtccgaaacacatctacagcatctggcgtaaaatgcagaaaaagaacctcgcctttgatgagctgtttgatgtgcgtgcggtacgtattgtcgccgagcgtttacaggattgctatgccgcactggggatagtgcacactcactatcgccacctgccggatgagtttgacgattacgtcgctaacccgaaaccaaacggttatcagtctattcataccgtggttctggggccgggtggaaaaaccgttgagatccaaatccgcaccaaacagatgcatgaagatgcagaattgggtgttgctgcgcactgggaaatataa

SEQ ID NO: 10853 - DNA, 1651 bp, Homo sapiens; identical to SEQ ID NO: 10412
  SIMILAR (620)..(979): 1001254mologous to Escherichia coli 37KD protein, similar to YI22-ECOLI,accession number D85613,Smith-Waterman Score=657.

SEQ ID NO: 10854 - DNA, 2124 bp, Homo sapiens
  SIMILAR (1)..(1038): 931254mologous to Homo sapiens putative p150,accession number U93563,Smith-Waterman Score=1671.
atgattccacagatttcccaggcacccggcgtcgttcaactggtgcttaattttttgccagagctggagcaacaaggttttaccggcgatacggcgacaagttatgccgatcgtctgacaatgtcgaccgacaacagtatttaccaacttctccccgatgcggtggtatttccgcgttcaaccgcagatgtggcgctgatcgcccgtcttgccgcgcaggaacgctattcatcgctgatctttaccccccgcggcggcggcaccggcactaacggtcaggcgctcaaccaggggattattgttgatatgtcccgccatatgaaccgcatcatcgaaattaaccctgaagagggctgggtgcgcgttgagcccggggtgataaaagatcaactcaatcagtacctgaaaccgttcggctacttttttgcgccggaactttcgaccagcaaccgggcaacgctcggtgggatgatcaataccgatgcatccggtcagggatcgctggtctatggcaaaacgtcagatcacgtacttggcgtacgcgcggtgttgttggggggcgatattctcgatacgcaacctttacccgtcgaattggcggaaacgctgggtaaatccaataccacaatcgggcgaatttataacacggtttatcaacgttgccgtcagcaacgccagttaattatcgacaacttccccaaacttaaccgctttcttaccggttacgatctgcgtcatgtctttaacgatgagatgaccgagttcgacctgacgcgcattctgacgggttcagaagggacgctggcctttattaccgaagcgcggctggatattacacgcttgcctaaagtgcgccgtctgaataatcatttgcagcgtccgcctgctgctgtgttatacgccgatgaactggcaaaattaaaacaaaatgataacgcaccttgcccgcccggttggcagttaagtttgcctgcggcccgtgcttttatccttggcgacgaagcgcaaaatatcagccgtaaagtggtgattagcccctccgctgtcgaacgtatgttagtcactcttgctaccggccgcggtttgatgttggtgggggaaccgggtaccgcaaaatctcttctttctgaattactggcaaccgctattagcggcgatgccgggttaaccatccagggcggggcatctaccaccgaagatcaaatcaagtatggctggaactacgccctgcttatcaatcatggtccgtcaacggaagcgctggtccctgccccgctttatcagggaatgcgcgacggcaaaatcgtccgtttcgaagagataacgcccagagtgcccgtgaaagaaagcaatcagcgatggtgctctgacgggttcgagttctgctgtgataacggagagagactgcgtgtcacgttcgcgctggactgctgtgatcgtgaggcactgcactgggcggtcactaccggcggcttcaacagtgaaacagtacaggacgtcatgctgggagcggtggaaacgccgcttcggcaacgatcttccgtcgtctccagtggagtggctgacggataatggttcatgctaccgggctaatgaaacacgccagttcgcccggatgttgggacttgaaccgaagaacacggcggtgcggagtccggagagtaacggaatagcagagagcttcgtgaaaacgataaagcgtgactacatcagtatcatgcccaaaccagacgggttaacggcagcaaagaaccttgcagaggcgttcgagcattataacgaatggcatccgcatagtgcgctgggttatcgctcgccacgggaatatctgcggcagcgggcttgtaatgggcgcgccggagttttatccagcgggactctagagatccccgataccgagctccgattcgaatccatccgctgcccggtgcaaatcatctccgccagtgataatctgctggtgccaacagcatgttccagtgaacttcatgccgccctgcccgatagccagaaaatggtgatgccctatgccggacacgcctgcaacgtgaccgatcccgaaacgtttaatgctctgttactcaacgggcttgccagcctgttacatcaccgtgaagccgccct

SEQ ID NO: 10855 - DNA, 1581 bp, Homo sapiens
  SIMILAR (355)..(1005): 971254mologous to Homo sapiens putative p150,accession number U93568,Smith-Waterman Score=1072.
atgattaatatgttaaaggatttagtggaaaatgtggaccacatgcacgaacatatacagaatttcagcagagatggaaatgattcaaaaaagaataaattggatacactagacatgaaaaacatgttattatggatgaggaattccttcaattgccttatcagcagactagagatagaagaaagaattagtaaacttgactacagactagtcattggagaacagatgattgatgtcttagggccggagaaacgcagacggcgtaccacacaggaaaagatcgcaattgttcagcagagctttgaaccggggatgacggtctccctcgttgcccggcaacatggtgtagcagccagccagttatttctctggcgtaagcaataccaggaaggaagtcttactgctgtcgccgccggagaacaggttgttcctgcctctgaacttgctgccgccatgaagcagattaaagaactccagcgcctgctcggcaagaaaacgatggaaaatgaactcctcaaagaagccgttgaatatggacgggcaaaaaagtggatagcgcacgcgcccttattgcccggggatggggaacgaaccgatgactggatggatggccgccgcagtcgtcacactgatgatacggatgtgcttctccgtatacaccatgttatcggagagctgccaacgtatggttatcgtcgggtatgggcgctgcttcgcagacaggcagaacttgatggtatgcctgcgatcaatgccaaacgtgtttaccggatcatgcgccagaatgcgctgttgcttgagcgaaaacctgctgtaccgccatcgaaacgggcacatacaggcagagtggccgtgaaagaaagcaatcagcgatggtgctctgacaggttcgagttctgctgtgataacggagagagactgcgtgtcacgttcgcgctggactgctgtgatcgtgaggcactgcactgggcggtcactaccggcggcttcaacagtgaaacagtacaggacgtcatgctgggagcggtggaacgccgcttcggcaacgatcttccgtcgtctccagtggagtggctgacggataatggttcatgctaccgggctaatgaaacacgccagttcgcccggatgttgggacttgaaccgaagaacacggcggtgcggagtccggagagtaacggaatagcagagagcttcgtgaaaacgataaagcgtgactacatcagtatcatgcccaaaccagacgggttaacggcagcaaagaaccttgcagaggcgttcgagcattataacgaatggcatccgcatagtgcgctgggttatcgctcgccacgggaatatctgcggcagcgggcttgtaatgggggcaaatccagttgtgcaccacgcgatgaccgtaaagttcgcgtgatggcagccgattatgaaaatcagctcgacgagttttccctcgatgcgcccattgtcgcacatgaaaactatcaatgggctaactacgttcgtggcgtggtgaaacatctgcaactgcgtaacaacagcttcggcggcgtggacatgagatcagcggcaatgtgccgcagg

SEQ ID NO: 10856 - DNA, 2592 bp, Homo sapiens
  SIMILAR (1)..(1239): 991254mologous to Homo sapiens Membrane-bound protein PRO1124,accession number Y66749,Smith-Waterman Score=2133.
atgaaagatgagttggatgtgccacgtgaagagggtagtatagaaccccagaggagtaggtttgtcttcaacaaaccttcagttgtcctgaagacaaacctaattctggagacttcatataatctagaagagacaagcaaactgatgaaaaatagtgaatttttaaggaaagagaccacccttccccataaagaccttccttttgctgcgctggcgttgaccgctgggggcttaaataaaaaacatcgattgtgtgggggtgtaacatcaatgaataacggggcgccgatggtccattctcatgagtcacatgacgaagggaaagagaggaaatcaactgtgacaactgccctcaaatttggcttccttaaaattacagttcaaaaagtttgggaaatccatgcaggcttgaggaacagcaatactgtgacaattacctcagtacagaaagatgaggaaactgagagattaaggaaacgatccctgagagactctgttctgacttccaaatcgggaatagcttatcttgttaaagtgtcagaaggagacttaagaaaagccattacatttcttcaaagcgctactcgattaacaggtggaaaggagatcacagagaaagtgattacagacattgctgggatgattgatgtcttagggccggagaaacgcagacggcgtaccacacaggaaaagatcgcaattgttcagcagagctttgaaccggggatgacggtctccctcgttgcccggcaacatggtgtagcagccagccagttatttctctggcgtaagcaataccaggaaggaagtcttactgctgtcgccgccggagaacaggttgttcctgcctctgaacttgctgccgccatgaagcagattaaagaactccagcgcctgctcggcaagaaaacgatggaaaatgaactcctcaaagaagccgttgaatatggacgggcaaaaaagtggatagcgcacgcgcccttattgcccggggatggggaacgaaccgatgactggatggatggccgccgcagtcgtcacactgatgatacggatgtgcttctccgtatacaccatgttatcggagagctgccaacgtatggttatcgtcgggtatgggcgctgcttcgcagacaggcagaacttgatggtatgcctgcgatcaatgccaaacgtgtttaccggatcatgcgccagaatgcgctgttgcttgagcgaaaacctgctgtaccgccatcgaaacgggcacatacaggcagagtggccgtgaaagaaagcaatcagcgatggtgctctgacggtttcgagttctgctgtgataacggagagagactgcgtgtcacgttcgcgctggactgctgtgatccctgggcgacagagcgagactgtgtctcaaaaaaaaaaaaagaaggagagggagaaggagaagaggaagaggaagaggaggaacaagaagaagaaggaagagaaggagaaggagaggaagaggaagaggaggaagaagaagaagaaggaggagaaggaaaaggagaaggagaagaggaagaagaaggagagggagagggagaggaagaggaagaggaagaagaggaagaagaagaagaagaggaagaagaagaagaagaagaagaagaagaagattattcctcacatcttcctcaacctcaagcctcccagatttgtcctatgcagagtgggcagcatctccctcttgctccaaaatggatcaaaatgtttgttttggatgaagcagatgaaatgttgagccgtggttttaaggatcaaatctatgagattttccaaaaactaaacacaagtattcagggctgtaaattttggaataagaattcctggtttccacgggccatggatatccctgtaattgcagctagtgtgcacatgggagacaaccgtgaaaagactgaagtgcgggaagaagggaggagctgttgtgtttcagtgagcgcccttggcagtggcggtgacagtggctcctgttcagtggcaatggtggagcagctagcaagacatgcaaaacttattggtcctaagggagacatcggtgaaaccggagtacccggggctgaaggtccccgaggctttccgggaatccaaggcaggaaaggagaacctggagaaggtgcctatgtataccgctcagcattcagtgtctttcaaaagccgaggttttcctgtgcgctcggaggagccatagctgccagctgggctggcggcggtgcccccagcccttgtgggcggcgtgcagagctgccctgggggccgggtcccgtgggggtcgcgcagacagtgtgtccggagcgcccccggcgggagcgcaggctgcggggcgagagggaagaggaggcggcggataaggtgatggcgagaagatggaggaagagcagacgaaggaagagaaaggagatggaagagagaatgtcaccagaggagaccgaaggaacaaattttgactttgcaggagaagctgtgggccaggcagaaagaaaaggaccagctttttctgcagctgaagaaagtttccatgaggaagaaaaacggaggcgaaaggagcagagcgacctgaccttctga

SEQ ID NO: 10857 - DNA, 2724 bp, Homo sapiens
  SIMILAR (262)..(783): 971254mologous to Homo sapiens putative p150,accession number U93574,Smith-Waterman Score=877.
ctaccataggcatttggtacaggggtcgttgcagacgggactttccgtcaccttgaggctttggaccccaaatggggctgaagttatacacacgtgtcctccattcctgccaaccatttgagaaactctccgtgggtgatcaaataaggagcctattttctggtaaaacggcgctgatgacatatgggagatacacaagtctgagtcacttaaggcccaagttccatttgaggacagcccttgttgcaggtcgtgcagccattgcggataaaccagctgctcaaaatgcgccagtttttgcagacgggaaggttcgcttagcgcgtcactcaggatggagatatgcgttaaacctgctttttgcagtcgcgttttgacggcgtcgacatctttgtcattaccgtacagcgccaccggagcatcggttttcaggttatgttgcttgatccacgcgttgagctgttcggtgctcattttgtcaagccagctggcagagaggtttaaggcggcaagttcatgaccagaagggccatttaaggtttgtggccagccgttataaaacgcgctggggcgagtatctatcgctttgccattttgttgttgaagctggtcaagtgtaagaggcttcgccagttcagcggcccacgaagaagcgcaagccagccctaaagccattgccagcgcggtcatttgagaaacacgtttcatcgaaaatcccgacattgtagttttgagtgcgccattctgaacgacggggatcgccagggcgcgaacttcgctgaacacccactggcgaaaattatcgcgcagagccacatcaagacggctgaatggctcatccaggagtaacgcttttggttgggcgagaaaggcgcgtaatatagcaacgcgcgctcgctgaacgccagacaagtggcatgatcctgccttaggaaagtcaacaagcgtgaggcacttcgggtagtgcccaaataaggataacaaagtatcgtgatatcgtaatatcgatatggtcggcaagcttgtcaacatttgggtacacgctgctttttctgttttttttcctaggtaagcaacgccattgcggcatcgcgtaacatcggtggcaggcgtaggcgggtttgcagcataacctgtaagacataggtggtgtgggtaggggttatcacatgccaatcggcagtaactactaaaggcgcaattcagggtggtgaagcggggcagtagcgtcaggcggcgcgcagccggggtatagtatgtatccgcgtcaggcgcggccaggcggggtattggggatatcaggggcacggccgtgttcttaggataatccgcaaacagcagcccggctgctggcaaaagcagcagggccgtcgggttcgggcatattaccgccgccgcagccggcagggttgtcgtcgttgtaaaggcagagtggccgtgaaagaaagcaatcagcgatggtgctctgacgggttcgagttctgctgtgataacggagagagactgcgtgtcacgttcgcgctggactgctgtgatcgtgaggcactgcactgggcggtcactaccggcggcttcaacagtgaaacagtacaggacgtcatgctgggagcggtggaacgccgcttcggcaacgatcttccgtcgtctccagtggagtggctgacggataatggttcatgctaccgggctaatgaaacacgccagttcgcccggatgttgggacttgaaccgaagaacacggcggtgcggagtccggagagtaacggaatagcagagagcttcgtgaaaacgataaagcgtgactacatcagtatcatgcccaaaccagacgggttaacggcagcaaagaaccttgcagctcgttttggtgcgtacgattacaggaactgcaaggagagccagtacagcccgccggaaagcagtaccgcagccggaagggtaaacacccaggccatcagaatgctggtcacggttttacgatgtaagccgccaccatctaccaccatcgtccccgcgacagaagaggagatcgttgccacacggcgccagccaatcatcgtaccgatacctaacgccagcgcgaccgccatgatgatccacaccggtgcatactcgatggtgctatgccagacccggcaagcctaccggcatagtgcgattaagataacgttgatgcaggcagtaaaccgtcagcaccagggaaataatcgggaatacagaaaatggcacaatggagctaaacagcgctgcgaaactgggcggcaacgcaagttgttacagccgatggaagcaacccataaattgggcggtgaaaactatgtcctgtggggcggtcgtgaaggttacgaaacgctgttaaatcaccacttgcgtcaggagcgtgaacaactgggccgctttatgcagatggtggttgagcataaacataaaatcggtttccagggcacgttgcttatcgaaccgaaaccgcaagaaccgaccaaacatcaatatgattacgatgccgcgacggtctatggcttcctgaaacagtttggtctggaaaaagagattaaactgaacattgaagctaaccacgcgacgctggcagtgtgcacttaccagatgcactcgttgcagaaagcgcaggatattgcgcgtagcattctggaacgtgacgtacgcatcaacagcaacgaagaactggcactgccgaaagagaagttgcaggaactgcacatctag

SEQ ID NO: 10858 - DNA, 6516 bp, Homo sapiens
  SIMILAR (670)..(2376): 951254mologous to Homo sapiens putative p150,accession number U93563,Smith-Waterman Score=2872.
  misc_feature (1)...(6516): n = a,t,c or g
atgaaaattaatcgtattgttaatgagggatttatgaaaacgatgctggcagcttatttaccaggaaattcgaccgtcgatctgcgggaagttgcggtgccgacgccggggattaaccaggtactgatcaaaatgaaatcctccgggatttgcggaagcgatgtccactatatctatcatcaacaccgtgccacagcggcggcacccgataaaccgttataccagggctttatcaacggtcatgaaccgtgcgggcagattgtggcgatggggcaaggctgccgccattttaaagagggcgaccgcgtgctggtgtatcacatttctggctgtggtttttgcccgaactgccgtcgcggttttcctatttcttgtactggcgaaggaaaagcggcttacggctggcagcgtgacggcggtcatgccgaatacttgctggcggaagacaaagatctgatcctcctgccggatgcgctgagctacgaagatggtgcgtttatcagttgcggcgttggtacagcgtatgaaggaattttgcgcggcgaagtttccggcagtgataacgtgctggtggtcggtctgggcgcagtcggcatgatggcgatgatgctggcgaaaggtcgcggtgcaaaacggatcatcggcgttgatatgctgccggaacgtcctggcgatggcaaaacatttggccacggtcacttttcccaacacgaacccgatgaacttggaatgatatggccccccgccagttcgtccccactattgattccggatgtgccttctccgtataccccatgtttatcggaaagctgccaacgtatggttatcgtcgggtatgggcgttgcttcgcagacaggcagaacttgatgggtatgcctgcgatcaatgccaaacgtgtttaccggatcatgcgccagaatgcgctgttgcttgagcgaaaacctgctgtaccgccatcgaaacgggcacatacaggcagagtggccgtgaaagaaagcaatcagcgatggtgctctgacgggttcgagttctgctgtgataacggagagagactgcgtgtcacgttcgcgctggactgctgtgatcgtgaggcactgcactgggcggtcactaccggcggcttcaacagtgaaacagtacaggacgtcatgctgggagcggtggaacgccgcttcggcaacgatcttccgtcgtctccagtggagtggctgacggataatggttcatgctaccgggctaatgaaacacgccagttcgcccggatgttgggacttgaaccgaagaacacggcggtgcggagtccggagagtaacggaatagcagagagcttcgtgaaaacgataaagcgtgactacatcagtatcatgcccaaaccagacgggttaacggcagcaaagaaccttgcagaggcgttcgagcattataacgaatggcatccgcatagtgcgctgggttatcgctcgccacgggaatatctgcggcacgggcttgtttccttcataagctccttacaaaagttcatcaatgattttgctttcgaagacggtctgttcagcggctacgacgctgaaaaacgtcaatacgaaaaatcgtcctggaactatcagctcgatgaaaacggctatgcgaaacgcgatgaaacactgactcatccgcgctgtccaaaagccgacttcctgaaagtgtgtgaagtgctggcctccaccagcgcaccggatcgcacaaccaccttcctgtacgcgctgggctggacgcagcacactgtgggtgcgcagaacatccgtactatggcgatgatccagttgctgctcggtaacatgggtatggccggtggcggcgtgaacgcattgcgtggtcactccaacattcagggcttgactgacttaggcctgctctctaccagcctgccaggttatctgacgctgccgtcagaaaaacaggttgatttgcagtcgtatctggaagcgaacacgccgaaagcgacgctggctgatcaaggtgactactggagcaactatccgaagttcttcgttagcctgatgaaatctttctatgagcgatgccgcgcagaaagagaacaactgggggctttgactgcgttgccgaagtgggataaaggctacgacgtcctgcaatacttcgagatgatgaaagagggcaaggtcaatggctatatctgccagggctttaaccctgttgcctcattcccgaacaagaacaaagtgatcggttgtctgtcgaaactgaagttcctcgtcaccatcgacccactgagcactgagacctctaacttctggcagaaccacggtgagctgaacgaattgactcgtcgaagatccagaccgaagtgttccgtctgccatcgacctgcttcgcggaagagaacggttctatcgttaactcaggtcgctggttacagtggcactggaaagatgtatgccgaacagggtggcgcgaacccggaccaggtgctgaacatgacatggaactacgccattccgcatgagccatcttcagaagaagtggcgatggagagcaacggtaaggcgctggccgatattaccgatccggcaaccgagcgcgacttcgacgccattcgccctgtcttcttttctacttctcagcttggccaggctgcgccgtcttttggcggaaccactggcacacttcaggatgcctttgatctggaggcgctaaaggccctcgatatcattgtgacctgtcagggcggcgattataccaacgaaatctatccaaagcttcgtgaaagcggatggcaaggttactggattgacgcagcatcgtctttgcgcatgaaagatgacgccatcatcattcttgaccccgtcaatcaggacgtcattaccgacggattaaataatggcatcaggacttttgttggcggtaactgtaccgccgcttccggcggtggtgcgcgacatatgcgtgagttattaacccagatgggccatctgtatggccatgtggcagatgaactcgcgaccccgtcctctgctattctcgatatcgaacgcaaagtcacaaccttaacccgtagcggtgagctgccggtggataactttggcgtgccgctggcgggtagcctgattccgtggatcgacaaacagctcgataacggtcagagccgcgaagagtggaaagggcaggcggaaaccaacaagatcctcaacacatcttccgtaattccgatgtgtctattccgaccgtggaagaactgctggctgcgcacaatccgtgggcgaaagtcgttccgaacgatcgggaaatcactatgcgtgactaaccccagctgccgttaccggcacgctgaccacgccggacgtgtgcgaaaaaccggccagcaccacgctttggctggatgttgggcggacagtggactggatctgacctatcagaccctgaatgtgaagaatgacctgtcacacttcccggtgccattctttgacccgagcgataaccgcaccaacaccttgccgatggtctttgcgggtgcgccggatgttgggctgcaacaagcctctgccattgtcgcctcgtggtttggttcgcgttctggctggcgtgggcagaacttcccggtactctataaccaactgccggatcgcaatgccattgtctttgcaaccaacgacaaacggccggacttcctgcgcgatcatccggcggtaaaagccccggtgattgagatgattaaccatccgcagaatccttacgtcaaactgctggtggtgtttggtcgtgacgacaaagacctgttgcaggcagcgaaaggtatcgctcagggtaacattctgttccgtggtgaaagcgtggtagtgaatgaagtgaaaccgctgctaccgcgtaagccgtacgatgcgccgaactgngcccacaggagagcaacaatgacaatccataagaaaggtcaggcacactgggaaggcgatatcaaacgcgggaagggaacagtatccaccgagagtggcgtgctgaaccaacagccgtatggatttaacacgcgttttgaaggcgaaaaaggaaccaaccctgaagaactgattggcgcagcgcatgccgcatgtttctcaatggcgctttcattaatgctgggggaagcgggattcacgccaacatcgattgataccaccgccgatgtgtcgctggataaagtggatgccggttttgcgattacgaaaatcgcactgaagagtgaagttgcggtgccgggtattgatgcctctacctttgacggcataatccagaaagcaaaagcaggatgcccggtctctcaggtactgaaagcggaaattacgctggattaccagttgaaatcgtaaagcattgccggatgacgcgtcaggcgcgtgaatgcgtccgtcctcccttattgctaatgattgccggacttcacatccgtgggttgccagcgggcaacgttcgtagaaaaaacagccttgcggcaacgtgcggtttcccggcagatccgttttacgtaatgcccattcttcctccagcggtttatcaatggcggggagggaatccagcaataatcgggtgtatggatgtgcaggtgccgtcagcacctgctgcgcgtcgcccagttctacaatctgcccgagatacatcaccgccacccgatcgctcatatgacgtatcaccgagacattgtgtgaaatcagcacataggtcagcccgtgattttcctgtagcgttaccagtaaattgaggatctgcgcctgaacggagatatccagcgcagaggttggctcatcaagcacaatcacgtcaggctgcgaagagagtgctctggcaatggcgatacgttgccgctgcccgccggagaacgcatgaggcaggcggtgcgggttgccaccggtacaaacatcatccagtgccgcctgcgccagtgccggaatgtcttccttgcgtacaccaacatcacgcaaatgtggcgtggtcgcgctcggaccgtagcatttgcgcgaggtcacatgtgccaccagctcagcgggcgtggcatcctgcaactctgcggtagaagcgttaccggtcgccagacctgcggcttttgccatttccagaatcgttgggtgatctttttcgtgaatatcgacgcccagcgcgccgttataggttttgacaccggttgaccaggcggttgctgatgcagccgagtcggtgacgtagtccggtttgccggtttttttattcagcgcatagtgagtgtattgcccggtaagcggtaaggcatctatacctttaaaaaagccgcccgcaccttcggcataattacgtgcggcagtaatttccgagtcccccatcccatcgccaatcagcaaaataatattttttgcaggtttatcgccgttaaacggcgaacaataaccgcgcagctcttcgccgttgtggctgttcactttttcttcataagtacggaagtagccgttcagtgccggacgaccaaattcgttgttaaacgccgcgccgcccagcgggccttcggtcatgatgtccagcgcggtgacaatgcgctcaggcttaccgaaatcttcttcccacggcatcgatacccagtcggcgttaaaaattttgtggcggcagtgctcggagttcgcctgggcaaacatatacagttcgatgtcgttcgggttacgaccaagctttgtgaaagcatcctgcagatagtcaatttcatcttccgccagagccaagccaagacgcaggttagcgtcgatcagcgcctgacggccctgccccagcaaatcaacgctggtaaccggagtcggttgatggtgggcaaacaactgctctgcatcatctaaagcaaaaaagaccgtttccatcatgcggtcgtgcagttcagcggtaacctgctgccattgttcattggtcagcgtaccggctttatgcggatgccattcgttataatgctcgaacgcctctgcaaggttctttgctgccgttaacccgtctggtttgggcatgatactgatgtagtcacgctttatcgttttcacgaagctctctgctattccgttactctccggactccgcaccgccgtgttcttcggttcaagtcccaacatccgggcgaactggcgtgtttcattagcccggtagcatgaaccattatccgtcagccactccacgctcctcatgagctgcgtctgtatgtgcgtgaactgcgtgaccgtagtcgtactgtcgatgagctgaaccgtactatcgatcagctgtgccgtgaaaacgacatcaacattgcctttaaccagcttgaagtgcatctgcacaacgagaagggcgatgaggtgacggaagtaaaacgcgaccgcttcaatctttttggcggcaaaacgcccatggaacaccgctttgccgccgcccgctggcagacgggggtgaccggatgcccgcaactggaagaggctctggtttcgtttgactgccgtatcagccaggtggtgagcgtcggcacccacgacattctgttttgcgccatcgaagcgattcat

SEQ ID NO: 10859 - DNA, 3520 bp, Homo sapiens
  SIMILAR (1)..(3345): 921254mologous to Homo sapiens ORF2, encodes a reverse transcriptase homolog,accession number U09116,Smith-Waterman Score= 5286.
cagatggatcgctggattagccagcaagttccgtttttattgatggttgtgcgtacggcatccccgcgaacaaactgcccggtatcaccgttttctgcatccggtcccccttccgccccggtattaacaacggtatccgttgccactgtaccgggcttgacgacctgccagcccttatcattaatgacggttcctgtggctatcgccccctcatgcatccactgttcgccaataacccagcgcactatgcggatgccattcgttataatgctcgaacgcctctgcaaggttctttgctgccgttaacccgtctggtttgggcatgatactgatgtagtcacgctttatcgttttcacgaagctctctgctattccgttactctccggactccgcaccgccgtgttcttcggttcaagtcccaacatccgggcgaactggcgtgtttcattagcccggtagcatgaaccattatccgtcagccactccactggagacgacggaagatcgttgccgaagcggcgttccaccgctcccagcatgacgtcctgtactgtttcactgttgaagccgccggtagtgaccgcccagtgcagtgcctcacgatcacagcagtccagcgcgaacgtgacacgcagtctctctccgttatcacagcagaactcgaacccgtcagagcaccatcgctgattgctttctttcacggccactctgcctgtatgtgcccgtttcgatggcggtacagcaggttttcgctcaagcaacagcgcattctggcgcatgatccggtaaacacgtttggcattgatcgcaggcataccatcaagttctgcctgtctgcgaagcagcgcccatacccgacgataaccatacgttggcagctctccgataacatggtgtatacggagaagcacatccgtatcatcagtgtgacgactgcggcggccatccatccagtcatcggttcgttccccatccccgggcaataagggcgcgtgcgctatccacttttttgcccgtccatattcaacggcttctttgaggagttcattttccatcgttttcttgccgagcaggcgctggagttctttaatctgcttcatggcggcagcaagttcagaggcaggaacaacctgttctccggcggcgacagcagtaagacttccttcctggtattgcttacgccagagaaataactggctggctgctacaccatgttgccgggcaacgagggagaccgtcatccccggttcaaagctctgctgaacaattgcgatcttttcctgttgtggtacgccgtctgcgtttctccggccctaagacatcaatcatctgttctccaatgactagtctgggccctgcgggaggagggtcagagagcgcaggccccctgtggctcgcagaggttgggggtccaggttgtggactatatccaccaatgaccagtctggtggcaatgtcaccaatgaccagcctggtggcaactccaccaatgaccagacctggggcaactccaccaatgaccagcctggtgacagctccaccaatgaccagacctggagcaagtccaccaatgaccagacctggtgtgcaactccaccaatgaccagcctggggcaactccaccaatgaccagacctggggcaactccaccaataccagacctggggcaactccaccaatgaccaggcctggggacaactccaccaatgaccagcctgggtgcaactccaccaatgaccagcctggggcaactccaccaatgaccagacctggggcaactccaccaatgaccagacctggggacgactccaccaatgaccggcctggggcaagtccaccaatgaccagacctggggcaagtccaccaatgaccagacctgaggcaactccaccaatgaccagacctggggaaactccaacaatgaccagacctggggcaactccaccaatgaccagagctggggcaactccaacaataccaggccatggggacaactccaccaatgaccagcccgatagtatgaagaagatgccagagacaaaagccagaatggtcctctgcgggcggatgtggccgatgttgctgatgacgaaggccgtgaacacgaggaagaggctgaccatggggaagggggtggccgtgcgcactgtcttcagaatattctccgtgttttccgtcaccaaattgatctccggttcaagaaaatattctgaggccacacagcgacctttctcccgacttcccacattagaggtgtttagacttaagagatcgccggcaggtacgtctctgagcgggatatgctcgatgtgccggaccgaagctcgagatgcggtctcattctgggatccgccctggtacgttccatggtcctccgcgtgcagcttacggcaaccctcaggcagccagtggctgactgcggctgaagcaaagacgacagcggcagctggaagggtctgagggctgggtggggttggagggcgcgctctgcagtcgtcccgggcgcggcctggctggctgcggccgctgggcggggcctggtggcggctgcggatgctcagcgacgctgagctaacggggcgcgtctggcgctgccgccgctgggcaccttccagggccgacaactgaggaggcggcgaccccggtggcggcggcggcggccgggggaagcctcggggccggtcatgcggctgcggggcccgcggcccggagcgtccgcccagccctgggatggaggcagccaggtggccaggtgatggtgcccgtttccgagcccacagggctgggatggaggcagccagggtggccagggtgatggtgcccgtttccgaacccacagggccaaggttcagcaggatggcgatggccgctaggatgaagcagatggcgtacaccgccacgcaccactccagggccggctggtgctggtacaggttggggtcgctgatgaacgcgaagatgatgcaggcaacgaaggtctccagcaccttcagcagcccgggtacggtggccatatagccagtgatctcgccgggccgggcccgggtccaggccacttcggtggcgtaagccacacacgcgatgcaggagaagaaggtggcggcgatggcgtggtcccgcgaacggccgtgggacaggaactggacataggtggtggggtagatgatggaggccgagaggcagaagagggccgcatagcaggcgaaggtgatggggaagttgcgccaagacagggggaagcgggcctggagcccgcacagctccacgatgaggatgatcagggtcacggagaagcagaagcaccaggtgaacatggaccagttgcccatggaccccgtccaggcgcccacgctagccaccagcgagaaggccacgcaggtagacaccagctgcagcaggcgaaggagacccaggggctgtgtcagggcccgaggggaccccacgatcatgggggaccccaggcccgaagatgacgtcgtggtggttgtgatggtggtgcgggttaccgtcactggcat

SEQ ID NO: 10860 - DNA, 3192 bp, Homo sapiens
  SIMILAR (349)..(666): 431254mologous to Rattus norvegicus acid phosphatase (EC 3.1.3.2),accession number M27893,Smith-Waterman Score=208.
ctaagaccagaagacaaagacttgcttcattttgcgcttaacttcagcgtaaataatgaaaggcacgaccgagccaaaggcgattagcattgtcgccagatagaccttccagtgttcagccgccgggaaccctgcatcagccagttgtccgggcagggcaacaaacgtcgacatcagcaaaatatgcagacacataatgccaaagttgagtttcagcagccgcggttccgccagcactttactgaaactgcctttcaccattccggactcacgattaagtacgtgagtgctactgttgggcacaacccaaatggtcaacgcaatgccggtcgttgccagaatagcgatcatccagaacagcgcgtgcagcccaagtttgtgagtgatgatcgggccaagcaccatcgcaatggcaaaggtaatgccaaagctcacgccgataaacgccatcgctttggtgcggttttgttcgcgcgtgagatcggaaagcagcgccataacggcggcggcaattgctccagagccttgtagcgcccggcccagaataatttcccagatggagtcggaaagcgcagcgataacgctaccggcggcaaacaccggcagcacacggcaattaatggtttgcggacaatgccgtcggaaagcagcccaacggaatcttgaaaacggtcttgctgttccgcttctgcgacagcagagagttgatcctgcaatgatgaggcgatagccggatagctgggtagaggtatacactttggtgccttccttataggttaaagaaacaccttccactaaggttttatcattcaccatagaacccgctgccgcgcctacagctccgccgccaactgcacctgccgtcggtccggaattgctgccagacccgacgttgtggccgataacaccgccagcgactgcgccaataagcgcgccggaagcttgtgcgttccgtttattttgggagttgtctacggcaacttttgcgggaagaatggaaataatattaacgggtttaggttcttggttggtattcagcggtatcaacttcttcgttaccatttgattattgcttccttcccaattctgacggttaccgtcgcgttgttgaccctggatcgctatctgggcacccatttctttaccaacgatatgggtggcaacatgatgatgtacatcaacctgatttgggcctggggccacccggaagtttacatcctgatcctgcctgttttcggtgtgttctccgaaattgcggcaaccttctcgcgtaaacgtctgtttggttatacctcgctggtatgggcaaccgtctgtatcaccgtgctgtcgttcatcgtttggctgcaccacttctttacgatgggtgcgggcgcgaacgtaaacgccttctttggtatcaccacaatgattatcgccatcccgaccggggtgaagatcttcaactggctgttcaccatgtatcagggccgcatcgtgttccattctgcgatgctgtggaccatcggttttatcgtcaccttctcgggggggcgggatgacttgattacctgaatcatccccactgtgcttgacgctatctccctgcgctacctggtacgtttcacgctggtggatgtggcaacaggtgagtgggctacctggtcgccggtgaattatgaatataaagtgcttccaccattgcccgacaagaatgaagccagtacgactgatatgacagagcagcaaatcatgcaacttaagcaaaagactatgcggatgccattcgttataatgctcgaacgcctctgcaaggttctttgctgccgttaacccgtctggtttgggcatgatactgatgtagtcacgctttatcgttttcacgaagctctctgctattccgttactctccggactccgcaccgccgtgttcttcggttcaagtcccaacatccgggcgaactggcgtgtttcattagcccggtagcatgaaccattatccgtcagccactccactggagacgacggaagatcgttgccgaagcggcgttccaccgctcccagcatgacgtcctgtactgtttcactgttgaagccgccggtagtgaccgcccagtgcagtgcctcacgatcacagcagtccagcgcgaacgtgacacgcagtctctctccgttatcacagcagaactcgaacccgtcagagcaccatcgctgattgctttctttcacggccactctgcctgtatgtgcccgtttcgatggcggtacagcaggttttcgctcaagcaacagcgcattctggcgcatgatccggtaaacacgtttggcattgatcgcaggcataccatcaagttctgcctgtctgcgaagcagcgcccatacccgacgataaccatacgttggcagctctccgataacatggtgtatacggagaagcacatccgtatcatcagtgtgacgactgcggcggccatccatccagtcatcggttcgttccccatccccgggcaataagggcgcgtgcgctatccacttttttgcccgtccatattcaacggcttctttgaggagttcattttccatcgttttcttgccgagcaggcgctggagttctttaatctgcttcatggcggcagcaagttcagaggcaggaacaacctgttctccggcggcgacagcagtaagacttccttcctggtattgcttacgccagagaaataactggctggctgctacaccatgttgccgggcaacgagggagaccgtcatccccggttcaaagctctgctgaacaattgcgatcttttcctgtgtggtacgccgtctgcgtttctccggccctaagacatcaatcatctgttctccaatgactagtccactggaagtcttgaaacgtatttcctgagggtaagggaggactgctctacttggatttcccacagcattgttccatttcccctcttcctctttctcctcctcttcctcctctttcccccctcctcctcctccttctccttctttgatggagctccacaccatagccagcatggagacactggcttctttgggcagagatggcagagccaacattctctgaggctcttgggaaatacattgctgtcttcgcagcacttgcaacaagccagaattatagaggatggttggagcagccaatgtccgcagaaatgcgggcctggacaacattgcctccat

SEQ ID NO: 10861 - DNA, 3549 bp, Homo sapiens
  SIMILAR (23)..(661): 291254mologous to Leishmania major proteophosphoglycan,accession number AJ243460,Smith-Waterman Score= 153.
atgattgcggcaggcgcgcctgcggattgcgaaccgcaggttcgtcagtcagcaaaagttcagttcggcgactatcaggctaacggcatgatggcagttgctaaaaaactgggtatggcaccgcgacaattagcagagcaggtgctgactcatctggatcttaacggtatcgccagcaaagttgagatcgccggtccaggctttatcaacattttccttgatccggcattcctggctgaacatgttcagcaggcgctggcgtccgatcgtctcggtgttgctacgccagaaaaacagaccattgtggttgactactctgcgccaaacgtggcgaaagagatgcatgtcggtcacctgcgctctaccattattggtgacgcagcagtgcgtactctggagttcctcggtcacaaagtgattcgcgcaaaccacgtcggcgactggggcactcagttcggtatgctgattgcatggctggaaaagcagcagcaggaaaacgccggtgaaatggagctggctgaccttgaaggtttctaccgcgatgcgaaaaagcattacgatgaagatgaagagttcgccgagcgcgcacgtaactacgtggtaaaactgcaaagcggtgacgaatatttccgcgagatgtggcgcaaactggtcgacatcaccatgacgcagaaccagatcacctacgatcgtctcaacgtgacgctgacccgtgatgacgtgatgggcgaaagcctctacaacccgatgctgccaggaattgtggcggatctcaaagccaaaggtctggcagtagaaagcgaaggggcgaccgtcgtattccttgatgagtttaaaaacaaggaaggcgaaccgatgggcgtgatcattcagaagaaagatggcggctatctctacaccaccactgatatcgcctgtgcgaaatatcgttatgaaacactgcatgccgatcgcgtgctgtattacatcgactcccgtcagcatcaacacctgatgcaggcatgggcgatcgtccgtaaagcaggctatgtaccggaatccgtaccgctggaacaccacatgttcggcatgatgctgggtaaagacggcaaaccgttcaaaacccgcgcgggtggtacagtgaaactggccgatctgctggatgaagccctggaacgtgcacgccgtctggtggcagaaagaacccggtattccgcgaagagctggaaaactgtttttagactagtcattggagaacagatgattgatgtcttagggccggagaaacgcagacggcgtaccacacaggaaaagatcgcaattgttcagcagagctttgaaccggggatgacggtctccctcgttgcccggcaacatggtgtagcagccagccagttatttctctggcgtaagcaataccaggaaggaagtcttactgctgtcgccgccggagaacaggttgttcctgcctctgaacttgctgccgccatgaagcagattaaagaactccagcgcctgctcggcaagaaaacgatggaaaatgaactcctcaaagaagccgttgaatatggacgggcaaaaaagtggatagcgcacgcgcccttattgcccggggatggggaacgaaccgatgactggatggatggccgccgcagtcgtcacactgatgatacggatgtgcttctccgtatacaccatgttatcggagagctgccaacgtatggttatcgtcgggtatgggcgctgcttcgcagacaggcagaacttgatggtatgcctgcgatcaatgccaaacgtgtttaccggatcatgcgccagaatgcgctgttgcttgagcgaaaacctgctgtaccgccatcgaaacgggcacatacaggcagagtggccgtgaaagaaagcaatcagcgatggtgctctgacgggttcgagttctgctgtgataacggagagagactgcgtgtcacgttcgcgctggactgctgtgatcgtgaggcactgcactgggcggtcactaccggcggcttcaacagtgaaacagtacaggacgtcatgctgggagccaggcgctggcgaatccgttatttccggcgctggacagcgccttacattgaagtgataacctcagaacagatgatggatgcctactccagcgtcggcatgccaattaactatccgcactggtcattcggtaaaaagtttatcgagactgaacggctgtataagcacggtcagcaaggactggcctatgaaatcgtcattaactctaacccgtgtatcgcttacctgatggaagagaacaccattaccatgcaagcgctggtgatggctcatgcctgctatgggcataactctttcttcaaaaacaattacttattccgtagctggaccgacgccagttcgattgtcgattatctgatttttgcccgtaaatatattaccgagtgcgaagagcttacatccagagattggatattctatctgcgctcgcgcgggatcaatcagcaggatgcccagcagatgatcatttacgccttcgctgccgaactgacggaagcactgcgtgatgaggggcttaaacagcaggtgctggcccgaatcggtcaacggctgccaggaggcctgggacctagtgacccagttcgctatcggaatcaggatgaccatgagctacaaattacacacgggaacaagattctatgtggaattgtgtggaaaccagtgatcctttccgacgacatggtctttaaaaaaaatgatgtcggctacccacaaagaaaccttacttctgcggaaacacacttcgcactcgggaaacagcaggggccgcgcactgctgagcagccagtacgacaatggcagagatggccaacatacgaccaaacacacggagaaacacaaccacgagaccagagcgacaagagccaagaagccagaacgccacgcaacacagagcgacgaaagacggagcaaccgcccgaccgggaagcgcaaaacagaggacacaaaaagaaacaaaaacaacaaaagcggccaaacaagaagaagaagacacgacaagaacacacgaaccgccgagagcaagaaactcagaacgcaaccacgcaaacgaacggcaagaacaagcggccagagaacgaagaaccagcgagaaggtacgcacaaccacaagaacaacaaacaaaagatagaacaaaaaaacacgaaaaacggaaaagaacacagcaaagaaaaaagaaaacaaaaacaaagcagacaaagggaacaacaaagacaaccagagagcgattcaaagcaagccgcacgagaccgatgaaaaaagacgcaacaagcgcgcaaaacaaggagacaacaacaagcatacacagaaaccgagaccgcacacgaaacgacaaggaggaagaaagcaagataggaggaaaacgagaaatagcagagaaaacacaacggacggaagacaccacacacaagaccccaagaagacagcgacgcgaacagaaacccacgcgaaacaacaacgacaacagaatctggtgtcaaaagtgttgtattgagtggtgtttgaaactataa

SEQ ID NO: 10862 - DNA, 1227 bp, Homo sapiens; identical to SEQ ID NO: 10430
  SIMILAR (635)..(769): 681254mologous to Homo sapiens Human secreted protein, SEQ ID NO: 7141,accession number G03060,Smith-Waterman Score=140.

SEQ ID NO: 10863 - DNA, 3171 bp, Homo sapiens
  SIMILAR (10)..(153): 721254mologous to Homo sapiens cytochrome c-like polypeptide,accession number S80864,Smith-Waterman Score=166.
ctccagtaatttttctttattaatcgatgaggcaagatttttttcaccgattatgctcaggatatttttgatgacggcacggtatgtgttgagtgatgttttggcgacttcagtttctttcagtgccagaaatttttcagccagttcttttatggttaaatcttgtcgggcctcaccaaatttttccagattgcgtgaggagggaaactgttttgcatagtcgaaaacaccagtttttattgcgtaacaaacagaggagcgtagttcacctgtggatttgcccccgtctggtttgggcatgatactgatgtagtcacgctttatcgttttcacgaagctctctgctattccgttactctccggactccgcaccgccgtgttcttcggttcaagtcccaacatccgggcgaactggcgtgtttcattagctcggtagcatgaaccattatccgtcagccactccagatcacagcagtccagcgcgaacgtgaccacgcagtctctctccgttatcacagcagaactcgaacccgtcagagcaccatcgcttgattgcttttctttcacgggccactctgcctggtatgtgcccggtctcgatggacggtacagcaggtttttcgcttcaggcaacagcgcatctctgggcatcgattccggtaaaacacggtttggcattgattcgcaggccatatcattcacgttctgcctgttctgcgaagcgtcaccatacctcgacgataaccatacgttggcagctctccgataaacatggttgtatacggagaagcacatccgtatcatcagtgtgacgactgcggcggccatccatccagtcatcggttcgtctgagaatgacgtgcaatccccatccccgggcaataagggcgcgtgcgctatccacttttttgcccgtccatattcaacggcttctttgaggagttcattttccatcgttttcttgccgagcaggcgctggagttctttaatctgcttcatggcggcagcaagttcagaggcaggaacaacctgttctccggcggcgacagcagtaagacttccttcctggtattgcttacgccagagaaataactggctggctgctacaccatgttgccgggcaacgagggagaccgtcatccccggttcaaagctctgctgaacaattgcgatcttttcctgtgtggtacgccgtctgcgtttctccggccctaagacatcaatcatctgttctccaatgactagtctgacactgtctgagcgcgaggagatacgagctggtttgtcagccaaaatgagcattcgtgcgatacgtactggcgctgaatcgcagtccttcgacgatctcacgtgaagttcagcgtaatcggggcagacgctattacaagctgttgatgcatgatggtggataaagcattctgtgagtccacggatggtagtctttataaaagcattgcgtacaggataggtaaacctatatctggagtaagtgtctattccagtgagggcaagctgctgccctttccttgatggaagagatccaatataatcaacctgccaccaagtagctggctgatcaccttgtgccctcaggacctgctggtgcctgaccacatatataccatttccacttgatgatggaatattgctgttcatgacccactttatggctaatgggtcagaaagcacccagttcatgataggcagttctggtccccttgtgacttgacccataatcaaacgttcagtttctaccaaagcccagtaacaggccaagagctgtttctcaaaaggagagcagttatctgcagaaaatagggccttgctccaaaatcctggaggcctccactgtgattcacctatggcgggctgccaaaggctccaaacagcatccctgtctgccactgacacctcaagcaccattggatctgctggatcatatggcgcaagcggcagagcagcctggacctgctgcagagccttctcctgttgtagaccccactcaaaactggcagcctttccagtcactcgataaatgcgcaataagtccagtgtgtttgctacttctctgtcactggatccaatcagtatagtgttatcaatgtaatggaccagtgtgatatcttgtggaagggaaaggcgatcaaggtctctctgaagattaaacaccaagctggagagttgatatactcccgaaggtgtgttaatttgctcaagcaatgaaaccacatctggtacagcagctgcaattggagacaccacttggttaagcttacaataatccactgtcattctccaaaatccacctgtcttctgcacaggctgagtagagtcgaacagggatattgtaggaatcattgcccctgcatcttttaaggccttaatggcagcactaatctctgcaatccctccagggatgtgacattgtttttgatttactatttttctaggtagaggcacctctaatggcttccatttggcctttcccaccataacagccctcaccccaccagttggggagccaatgtgggggttctgccagttgctaagtatgtctgtgctaattatgcattctggcactctaggggcccactgggactttagtccagttataggtctagaagcaaacaggggtgttggagatgggtcctgaggagactctacattatctttcctggcaactgcctcaggggaggccatcactgtttcctcaggcagcgcagggtttatcttccatagaggttctgattcagtggtagaagttggggcccaggaatctgcttcttttgggtgatactgatgcaagtggttgtctgggggcttgggcagtatggccattttcacgatattgattcttcctacccatgagcatggaatgttcttccatttgtttgtatcctcttttatttccttgagcagtggtttgtagttctccttgaagaggtccttcacgtcactcgtaagttggattcctaggtattttattctctttgaagcaagtgtgaatgggagttcactcatgatttggctctctgtttgtctgttattggtgtataagaatgcttgtgatttttctacattgattttgtatcctgagactttgctgaagttgcttatcagcttgaggagattttgcgctgagacgattgggttttttagatacacaatcat

SEQ ID NO: 10864 - DNA, 6250 bp, Homo sapiens
atgagtcatcaacttaccttcgccgacagtgaattcagcagtaagcgccgtcagaccagaaaagagattttcttgtcccgcatggagcagattctgccatggcaaaacatggtggaagtcatcgagccgttttaccccaaggctggtaatggccggcgaccttatccgctggaaaccatgctacgcattcactgcatgcagcattggtacaacctgagcgatggcgcgatggaagatgctctgtacgaaatcgcctccatgcgtctgtttgcccggttatccctggatagcgccttgccggaccgcaccaccatcatgaatttccgccacctgctggagcagcatcaactggcccgccaattgttcaagaccatcaatcgctggctggccctaggcgtcatgatgactcaaggcaccttgttcgatgccaccatcattgaggcacccagctctaccaagaacaaagagcagcaacgcgatccggagatgcatcagaccaagaaaggcaatcagtggcactttggcatgaaggcccacattggtgtcgatgccaagagtggcctgacccacagcctggtcaccaccgcggccaacgagcatgacctcaatcagctgggtaatctgcttcatggagagaagcaatttgtctcagcgatgccggctaccaaggagccacagcgcgaggagctggccgaggtggatgtggacctgctgatcgccgagcgtcccggcaaggtaaaaaccttgaagcagaatccgcgcaagaacaaaacggccatcaacatcgaatacatgaaagccagcatccgtgccagggtggagcacccgtttcgcatcatcaagcggcagttcggcttcgtgaaagccagatacaaggggctgctgaaaaacgataaccaactggcgatgttattcaccctggccaacctgtttcgggtggaccaaatgatacagctgccaacgtatgagttatcgtcgggtataggcgctgttcgcagacaggcagaacttgatggtacgcctgcgatcaattccaaacgtgtttaccggatcatgcgccagaatgcgctgttgcttgagcgaaaacctgctgtaccgccatcgaaacgggcacatacaggcagagtggccgtgaaagaaagcaatcagcgatggtgctctgacgggttcgagttctgctgtgataacggagagagactgcgtgtcacgttcgcgctggactgctgtgatcgtgaggcactgcactgggcggtcactaccggcggcttcaacagtgaaacagtacaggacgtcatgctgggagcggtggaacgccgcttcggcaacgatcttccgtcgtctccagtggagtggctgacggataatggttcatgctaccgggctaatgaaacacgccagttcgcccggatgttgggacttgaaccgaagaacacggcggtgcggagtccggagagtaacggaatagcagagagcttcgtgaaaacgataaagcgtgactacatcagtatcatgcccaaaccagacgggttaacggcagcaaagaaccttgcagaggcgttcgagcattataacgaatggcatccgcatagtgcgctgggttatcgctcgccacgggaatatctgcggcagcgggcttgtaatgggttaagtgataacagatgtctggaaatatatgggcaaatccaattaggcacgggtgaactgaatattaccaccggagtagtagttacagcccgtgatacacacattgctctcaatttccaaaagcgccgtaccaccggccttgccacgcagagccgccagcgttgccagaatcgccgtcgggtgatgggcaaaatcgtcatataccgtgacgccattcgcttcaccacgcaactccagacggcgacgagcattaataaacgaacccagcgcgttagcggcatctgccggcgctacaccaacatggcgagccgctgcaatcgccatcaggccattgtgcatattatgttcgcctaccagcgaccatttcacttcgcccactttttcgccatccagcaaaacttcccattcggaagcatcggtggtcagctttttcgcctgccagtgaccctgctcacccaccagctcctgctcgctccagcagcccatcgccatggtctgtttcaggttgatgtcattttccggccagataatacggccctgccccggaacgatacgcaccagatggtggaactgtttctggatcgctttcaggtcgtcaaagatatcggcgtgatcgaactcaaggttgttgaggatcagcgtacgcgggcagtaatgaacaaatttagagcgtttgtcgaaaaaggcgcagtcatactcatccgattcgataaaaaaaaggatatttttctccagtaccgcttccacacacggatttccacgggtcatggcgttgccaataatcaccagatccggctgcggctcgagctggctggcatcgtacccctgaatcagctcaatcccttgcctctcaactctgttccgatgatcaacatcatgaacggtggtgagaacgctgacaacaacgttgatatccaggaattcatgattcagccggttggcgcgaaaactgtgaaagaagccatccgcatgggttctgaagttttccatcacctggcaaaagttctgaaagcgaaaggcatgaacactgctgttggtgacgaaggtggctatgcgccgaacctgggttccaacgctgaagctctggctgttatcgctgaagctgttaaagctgctggttatgaactgggcaaagacatcactttggcgatggactgcgcagcttctgaattctacaaagatggtaaatacgttctggctggcgaaggcaacaaagcgttcacctctgaagaattcactcacttcctggaagaactgaccaaacagtacccgatcgtttctatcgaagacggtctggacgaatctgactgggacggtttcgcataccagaccaaagttctgggcgacaaaatccagctggttggtgacgacctgttcgtaaccaacaccaagatcctgaaagaaggtatcgaaaaaggtatcgctaactccatcctgatcaaattcaaagcacaacatgcaggtttgttacatatgtatacatgtgccatgttgggggtgggggggcaatgctggcggtactgcatgtctcaggcgttcaaagaggaccgattcgcgcaggatcagcgcgtcgcagtgaccaaaaacgtagttcgccagttggttaaattgctcatcctggaacgggccaacactgtgaccaatcataaacagcggctttttcgccataaacgtgcaaagtgcatgttcaaactgcggcacgccatagagatcgacaaaaaacgatccgccgacctggataatggcgtcgaacagcggatcgcccattaccgggcggttgagcagccaggaagaactgaccggatagcggctcatcacatccacttcggcgtgtggattgagaatgttgatggcatcaaggaaaagatcgcaattgttcagcagagctttgaaccggggatgacggtctccctcgttgcccggcaacatggtgtagcagccagccagttatttctctggcgtaagcaataccaggaaggaagtcttactgctgtcgccgccggagaacaggttgttcctgcctctgaacttgctgccgccatgaagcagattaaagaactccagcgcctgctcggcaagaaaacgatggaaaatgaactcctcaaagaagccgttgaatatggacgggcaaaaaagtggatagcgcacgcgcccttattgcccggggatggggaacgaaccgatgactggatggatggccgccgcagtcgtcacactgatgatacggatgtgcttctccgtatacaccatgttatcggagagctgccaacgtatggttatcgtcgggtatgggcgctgcttcgcagacaggcagaacttgatggtatgcctgcgatcaatgccaaacgtgtttaccggatcatgcgcccagaatgcgctgttgcttgagcgaaaacctgctgtaccgccatcgaaacgggcacatacaggcagagtggccgtgaaagaaagcaatcagcgatggccattgttatatcgcctattcgttcgccctcggacattacgttcctgtgtgcgcgttttgcgctacctgatcgaaaacaacaaaatcaacgccgaatacgttaagcattacaccaacgccagcctgctggtgcgtgatgattttgctttcgaagacggtctgttcagcggctacgacgctgaaaaacgtcaacacgtttcccgctacacgccagatgtggttgaaaacatctgtggtacgccaaaagacgcgttcctgaaagtctgcgaatacatcgcagaaaccagtgctcacgataaaactgcctcgttcctgtatgccctcgctggacgcaacactccgttggtgcccattagattgctcatcacctgcgcctctgaagtcggtatctgggattaccagcctgacgaagtggtcgaaaaaggccgcgtcgggccaggcgaactgatggttatcgacacccgcagtgggcgtattctgcactcggcagaaaccgatgacgatctgaaaagccgccatccatataaagagtggatggagaaaaacgtccgccgactggtaccgtttgaagatctgcccgatgaagaagtgggtagccgcgaactggacgacgacacgcttgccagctaccagaaacagtttaactacagcgcggaagagctggactccgtaattcgcgtactgggcgaaaacggtcaggaagcggtcggttcgatgggcgatgataccccattcgccgtgctctccagtcagccgcgcattatttacgactacttccgccagcagtttgcccaggtgactaacccgccaatcgacccgctgcgtgaagcgcatgttatgtcgctcgccaccagtatcggtcgtgaaatgaacgtcttttgcgaagcagagggccaggcgcaccgtttaagctttaaatcgccgattctgctctactccgatttcaaacagctcacgacgatgaaagaggagcactaccgcgcagatacgctggatatcacctttgacgtcactaaaaccacgctcgaagcgacagtcaaagagctgtgcgtcaaagccgaaaaaatggtacgtagcggcaccgtgctgctggtgctctccgaccggaatatcgctaaagatcgcctgccggttccagccccgatggcggttggcgcgatccagacccgtctggtcgatcaaagcctgcgttgcgatgccaacatcatcgtcgaaaccgccagcgcccgcgatccgcaccacttcgccgtgttgctgggcttcggcgcgacggctatttatccataccttgcctatgaaacgctgggccgcctggtagacacctatgccgatgccaaagattatcgtaccgtgatgctcaactaccgtaacgcatcacaaaggctgtacaaatcatgtcacaatggcatctcacatggctttacggctgtcgatcgctatgggcttgaaggcgtcatcaccgatccgcacactggagatcgtcgaccgctaacggaagataccttgcgattgctggaaaaaatcgccccttccgcacataaaattggtgcatcgagcgcgattgaggccctgcatcgccaggtcgtcagcggtctgaatgaagcgcagctaatgcgcgatttcgtcgccgatggcggctcgctgattgggctggtgaaaaagcattatttttatgctgtcgtcggagctacggggcgtcccctttatcaatctgaagtccgatccacaaaaatccctgttaaatcagcaaatatgtacttttacacgcaagctggctcatggccagatgatgctgttgaagttgatgagcaagtgtatattgagttttccggattaccgccgaaaggaaaaatccgtatcgctggagaaaatggttttcctgcatggtctgaaattccaccaccaacacatgaggaacagattgctgcagccgaactgaaaaagcagcaattgattaatcaggccaacgattatatgaacagtaaacaatgggctggtaaagcggctattggtcgtctgaaaggtgaggaactggcgcaatataatttgtggctggattatctggacgcactggagctggtcgatacttccagtgcgccagatattgaatggcctactcctccggcagttcaggccagatga

SEQ ID NO: 10865 - DNA, 2610 bp, Homo sapiens
  SIMILAR (176)..(916): 271254mologous to Homo sapiens Human N-methyl-D-aspartate receptor subunit encoded by clone NMDA22,accession number W87503,Smith-Waterman Score=121.
tcacttctgttcacgctgaacaaacggctgctcccgcaaaacctgtaactgtggaagcgaagaatgaaacctttgccccgcagcatcccgatcaatatctctcctggaaagccacctcggaacagtcagagcgtgttgacgccctggcggaagatccacggctggtgatcctgtgggcggggtatcccttctcgcgcgattacaacaagccgcgtggacatgcttttgctgtgaccgatgtgcgtgaaaccctgcgtaccggtgcgccgaaaaacgctgaagatggtccgctaccgatggcatgcccagtacaacccgctgccccagatattcccgtggcgatcgataacccagcgcactaggcggatgccattcgttataatgctcgaacgcctctgcaaggttctttgctgccgttaacccgtctggtttgggcatgatactgatgtagtcacgctttatcgttttcacgaagctctctgctattccgttactctccggactccgcaccgccgtgttcttcggttcaagtcccaacatccgggcgaactggcgtgtttcattagcccggtagcatgaaccattatccgtcagccactccactggagacgacggaagatcgttgccgaagcggcgttccaccgatcccagcatgacgtcctgtactgtttcactgttgaagccgccggtagtgaccgcccagtgcagtgcctcacgatcacagcagtccagcgcgaacgtgacacgcagtgatctgtccgttatcacagcagaactcgaacccgtcagagcaccatcgctgattgctttcattcacggccactctgcctgtatgtgcccgtttcgatggcggtacagcaggttttcgctcaagcaacagcgcattctggcgcatgatccggtaaacacgtattggcattgatcgcaggcataccatcaagttctgcctgtctgcgaagcagcgcccatacccgacgataaccatacgttggcagctctccgataacatggtgtatacggagaagcacatccgtatcatcagtgtgacgactgcggcggccatccatccagtcatcggttcgttccccatccccgggcaataagggcgcgtgcgctatccacttttttgcccgtccatattcaacggcttctttgaggagttcattttccatcgttttcttgccgagcaggcgctggagttctttaatctgcttcatggcggcagcaagttcagaggcaggaacaacctgttctccggcggcgacagcagtaagacttccttcctggtattgcttacgccagagaaataactggctggctgctacaccatgttgccgggcaacgagggagaccgtcatccccggttcaaagctctgctgaacaattgcgatcttttcctgtgtggtacgccgtctgcgtttctccggccctaagacatcaatcatctgttctccaatgactagtctggaggtgcccatagcttgttctgttaagccaagttcttcactggaaactccgtctttaattataaggtcatcaataatgtcttcatgtatcttagagcactgaaggacagctttgtccataaaataggaaaaagaaaatctctcccctggtgaaacagcaaataagttttctatctgcatggacagcagcttatcacaatgtagatctagcatttcaggcttggggaaatcctgttctatgttttcagcaatgttctgtattgctagcaactgctcgtcaattttctgaagcttagcactgagatgctctatttggtgagctgcatagcttggtgcagggcaagctgcagagacaccttgcagccgtttccacaatagataatcttctgcagagtctgactttgtgctctgtcctttgaatcggaactctggttttggcagacctttgttctgctgtatgtctgatggtgtaggtgaggtgacacttaggctccttcacttctgtaatgcccctgctcctcaagcctttttccccatccagacaagctggagttaccttcttgacctccttaaaattatgtggggggaacagcattagtaactgaagctgcccatataatgtaactctgcagacgatggaactgctagatgaccgctttgctgtttgataacattatcatttgaaggctcttctctcgacaggtaattcctgtagaagatcattagcttcaatgtcaatcacatttatataagtatgtccaaccaagtttgttactgtatgaggtattgagggtgaccaaggtttctctgacatttcactggaaagcttcagatttagatagacatctgggaccaagagctgaggagcagtcaaaggctcatgttctgggtctgtatttgtacttgcatcttgacttcctatagctttcttttttacagaggccatgaaatgcaatccagctgaagtattatcatcttgtagcattttgtcctttccttgtcttacttcaggtggttctattttgacctttagaagttgaaggtgtccagcatcaccttgttcaaataaattatgtgttagtttctgttggctttgtttaaacgcaatgaggttttcaagtgggataagttgtgtttttttgca

SEQ ID NO: 10866 - DNA, 3454 bp, Homo sapiens
  SIMILAR (21)..(86): 901254mologous to Homo sapiens super cysteine rich protein; SCRP,accession number U63332,Smith-Waterman Score=171.
atgaaaggcctgatgaattacaaatctcaagggactgccttctccctgggctgctgttttgaaaagaaaaaaacaagaaaatttgaggatactatgcctggagaggtggttgaaaataggtacaatgaacaagggctctgtcatcctgggaccctctatcctaggaaacaagtggaacaaatcaaaagatttatactaactgaagaatataaaactatcagacagaagaatttcccagaaagcagcagcaaagaaaaagaaaatgtaagagaaatctgctgggaatattgtcagcagacagccccttcaaggattgcctcaggttcagaaagcctgcttgctcatggttatgtcccttccctgggagctctaacagtggaaaccacagtcactcaactacaacatttaaatacagtgggaataattggattccgaggtggcaggggccaagtggcagcagtcaactgtcaaaagcgagatatccagccttttaccagggtaactgtgcattggggaaagagaaatgatcagacatttcaagcactagtggacactggccttgagctgacattgattcccggggacccaaaacatcattgtgatcctccagttaaagtaggggcttatggacatcaggtaattaatggagttttagctcagattcaaattacagtaggtccagtgggtccctggactcaccctgtggtcattttcacagtgcctaaatgcataattgacatagacatacttaggtggcagaactcccacactggctccctgactggtaggatgaaggctattatggtgggaagggccaaatggaagccgttagagctgcctctgcctagaaaaacagtaaaccagaaaccatatcacacccctgtagggactgcagaaattagtgccaccatgaaggacttgaaagatgcaggggtggtgattccaaccacaaccctgttcaactctcctatttggtctgtgcagaagacaggtggatcttggagaatgacagtggattattgtatgcttaaccaagttgtgtctgcagttgaagctattgtactagatgtggtttcattgcttgagcaaattaacacatctcctgccatagagtgggtcatgcacagcagcattccatcatcaaatggaagtggtacatacatgatcgggctcaagcaggtcctaaaggcacaacctgcaccaatggcctcatggggagtttcctatgatcagtggacagaggaagagaagactacggcctggttcacagacggttcttcacgatatgctagcaccacccgaaactggacagctgcagcactacagtccctttctaggatatccctgaaggacagctgtgaagggaaatcttcccaccacccgtgtcatggaggcaaggatggaggttatgcatgggctcagcaacatggactttcactcaccaaggttgacctggctatggccactgctgagtgcccaatttgccagcagcagagaccaacactgagccctcgatatggcaccattcctcagggtgatcagccagctacctggtggcaggttgattatatgggacctcttccatcatggaaagggcagagcaccataaatcttagaggaagctctaatttgtcctgctatggaccgtccctcaaccaatcacttgggaaagaagtttccgactggctgtccctgggttacacatctacggttgtggagggattagagggggagagaaggctactagtcattggagaacagatgattgatgtcttagggccggagaaacgcagacggcgtaccacacaggaaaagatcgcaattgttcagcagagctttgaaccggggatgacggtctccctcgttgcccggcaacatggtgtagcagccagccagttatttctctggcgtaagcaataccaggaaggaagtcttactgctgtcgccgccggagaacaggttgttcctgcctctgaacttgctgccgccatgaagcagattaaagaactccagcgcctgctcggcaagaaaacgatggaaaatgaactcctcaaagaagccgttgaatatggacgggcaaaaaagtggatagcgcacgcgcccttattgcccggggatggggaacgaaccgatgactggatgggatggccgcccgcagtcgtcacactgatgatacggatgtgcttctccgtatacaccatgttatcggagagctgccaacgtatggttatcgtcgggtatgggcgctgcttcgcagacaggcagaacttgatggtatgcctgcgatcaatgccaaacgtgtttaccggatcatgcgccagaatgcgctgttgcttgagcgaaaacctgctgtaccgccatcgaaacgggcacatacaggcagagtggccgtgaaagaaagcaatcagcgatggtgctctgacgggttcgagttctgctgtgataacggagagagactgcgtgtcacgttcgcgctggactgctgtgatcgtgaggcactgcactgggcgggccactaccggcggcttcaacagtgaaacagtacaggacgtcatgctgggagcggtggaacgccgcttcggcaacgatcttccgtcgtctccagtggagtggctgacggataatggttcatgctaccgggctaatgaaacacgccagttcgcccggatgttgggacttgaaccgaagaacacggcggtgcggagtccggagagtaacggaatagcagagagcttcgtgaaaacgataaagcgtgactacatcagtatcatgcccaaaccagacgggttaacggcagcaaagaaccttgcagaggcgttcgagcattataacgaatggcatccgcatagtgcgctgggttatcgctcgccacgggaatatctgcggcagcgggcttgtaatggggccagaagaccccctgtctcccagccccgggcagcccctgctgggccccagcttggggctgacggcactcggactttctcgctgtcccccttccccagcctggcatcaggggagagactgatgatgcccccagccgccttcaagggagaggcgggcggcctgctggtgttccccccagccttctatggcgccaagccccccacagcccctgccaccccggcccctggccctgagccactgggcggtcctgagcccgcggatggtggtgggggcggagcggcggggcccggggcagaggaggagcagctggacacggcagagatcgccttccaggtgaaggagcagctgctgaaacacaacatcgggcagcgggtgtttgggcattacgtgctggggctgtcgcagggctcggtcagcgagatcctagcccggcccaagccctggcgcaagctcacggtgaagggcaaggagcccttcatcaagatgaagcagttcctgtcggatgagcagaatgtactggcgctcaggaccatccaagtgcggcagcgag

SEQ ID NO: 10867 - DNA, 3564 bp, Homo sapiens
  SIMILAR (1)..(246): 1001254mologous to Homo sapiens Sop2p-like protein,accession number Y08999,Smith-Waterman Score=424.
atgtcctgtatgacaccggcttccgatggcacctttatttccattgacgacgaagaagcgaaacagttccgtgaaagcgtggtcgagtggttgatgaccaaccacccgcacgactgtccggtatgtgaagagggcggtaactgccatcttcaggatatgactgtgatgaccggacacagcttccgtcgctaccgtttcaccaaacgtacccaccgtaatcaggatttggggccattcatctctcacgaaatgaaccgctgcatcgcctgctaccgctgtgtgcgttactacaaagattacgctgacggtacagatctgggcgtttacggtgcgcacgacaacgtctacttcggtcgcccggaagacggcacgctggaaagcgaattttccggtaacctggtcgaaatttgcccgaccggcgtatttaccgacaaaacgcactccgagcgttacaaccgtaaatgggatatgcagtttgcgccgagcatctgccagcaatgttccatcggctgtaacatcagccccggtgaacgttacggcgaactgcgtcgtatcgaaaaccgttacaacggtacggtaaaccactacttcctctgcgaccgtggtcgtttcggttacggttacgtcaacctgaaggatcgtccgcgtcagccagtacagcgtcgtggcgatgatttcattaccctcaacgccgaacaggcaatgcagggcgcggcagatattctgcgtcagtcgaagaaagtgatcggtattggttctccgcgtgccagcgtggaaagcaactttgcgctgcgtgaactggtgggcgaagaaaacttctacaccggtatcgctcacggtgagcaggaacgtctgcaactggcgctgaaagtgctgcgtgaaggcggcatttatactccggctctgcgcgaaatcgaatcttacgatgcggtactggtgctgggcgaagacgttacccagaccggcgcgcgcgtcgcgctggcagtgcgtcaggctgtgaaaggtaaagcgcgcgaaatggcggcagcacagaaagtggctgactggcagattgcggcaatcctcaacatcggtcaaccatccgctgtttgttaccacgttgatgacacccgtctggatgatatcgcggcgtggacttaccgcgcaccggttgaagatcaggcgcgtttaggttttgccatcgcccatgcgctggataactctgcaccagcggttgacggtatcgaacctgagctgcaaagcaaaatcgacgtcatcgtgcaggcactggcagtttttagactagtcattggagaacagatgattgatgtcttagggccggagaaacgcagacggcgtaccacacaggaaaagatcgcaaattgttcagcagagctttgaaccggggatgacggtctccctcgttgcccggcaaccatggtgtagcagccagccagttatttctctggcgtaagcaataccaggaaggaagtcttactgctgtcgccgccggagaacaggttgttcctgcctctgaacttgctgccgccatgaagcagattaaagaactccagcgcctgctcggcaagaaaacgatggaaaatgaactcctcaaagaagccgttgaatatggacgggcaaaaaagtggatagcgcaacgcgcccttattgcccggggaatggggattgcacgtcattctcagacgaaccgatgactggatggatggccgccgcagtcgtcacactgatgatacggatgtgcttctccgtatacaccaggttatcggagagctgcccaaacgtatggttatcgtcgggtatgggcgctgcttcgcagacaggcagaacttgatggtatgcctgcgatcaatgccaaacgctgtttaccggatcatgcgccagaatgcgctgttgcttgagcgaaaacctgctgtaccgcccatcgaaacgggcacatacaggcagagtggccgtgaaagaaagcaatcagcgatggtgctcctgacgggttcgagttctgctgtgataacggagagagactgcgtgtcacgttcgcgctggactgctgtgatcgtgaggcactgcactgggcggtcactaccggcggcttcaacagtgaaccacaacaggacttcgtggtgtgaccgcaggatctccgcttcggcaacgatcttccgtcgtctccagtggagtggctgacggataatggttcatgctaccgggctaatgaaacacgccagttcgcccgggatgttggggacttgaaaccgaaagaacacgggcggttgcggagtccggacgagtaacggaatagcagagagcttcgtgaaaacgataaagcgtgactacatcagtatcatgcccaaaccagacgggttaacggcagcaaagaaccttgcagaggcgttcgagcattataacgaatggcatccgcatagtgcgctgggttatcgctcgccacgggaatatctgcgggagcgggcgttgtaatgggttaagtgataacagatgtctggaaatatagggggcaaatccataaacgccaacagccatagcgtcatttccggtaaagacggccttccaacgcaggcgcgccggagttttatccagcgggccggtaatacaggcgatacgggtatgacctttatcgatcagatattgcgttgctaagtctccgcccagcaacgagttatcctgaataagatcgcagttctgaatagaaagctcagtgccgcggatctctagagtccgcataggccgcttcgcagcaaacatacggtaaagttggcaggaagggagaccctggtaccttgggctcctccataaatcagtagcgggattcagtttctgagccttggcattgtcatcggtcagatcggcaagtgtgatggtattcatcgcggtaaactgcgtcgacatagccatccctgtaacatcaatggcataaggaacggtacacagccggtccccagacgggttgcaatattgccggcgaatgcggcctgaaaagcgtctgaagcggcaaataccccggtggcggacctgcaggcatgccgtgctaagttctgcctgtctgcgaagcagcgccccatacccgacgataaccatacgttgccagctctccgataacatggtgtatacggagaagcacatccgtatcatcagtgtgacgactgcggcggccatccatccagtcatcggttcgtctgagaatgacgtgcaatccccatccccgggcaataagggcgcgtgcgctatccacttttttgcccgtccatattcaacggcttctttgaggagttcattttccatcgttttcttgccgagcaggcgctggagttctttaatctgcttcatggcggcagcaagttcagaggcaggaacaacctgttctccggcggcgacagcagtaagacttccttcctggtattgcttacgccagagaaataactggctggctgctacaccatgttgccgggcaacgagggagaccgtcatccccggttcaaagctctgctgaacaattgcgatcttttcctgtgtggtacgccgtctgcgtttctccggccctaagacatcaatcat

SEQ ID NO: 10868 - DNA, 813 bp, Homo sapiens
  SIMILAR (19)..(492): 901254mologous to Escherichia coli FixB protein,accession number D90812,Smith-Waterman Score=695.
  misc_feature (1)...(813): n = a,t,c or g
atggtcannnnnnnnnncattgctgccctgctgaaagataaacaccccgctatgttgctgttggccgcgacgaaacgtggtaaagcgctggcagcacggttaagtgtgcaactgaatgcggcgctggtgaacgacgccacggcggtggatattgtcgatggtcacatttgcgccgaacaccggatgtatggcgggttcgctcaggaaaagatcaacagcccgctggcgatcattacccttgcacccggtgttcaggaaccgtgcaccagtgatacctctcatcagtgcccgacagaaacggtaccttatgtcgtccgcgtcatgaaattctctgtcgcgaacgccgtgcgaacagccgcaagcagcgtggacctgagcaaagcaaaacgtgtggttggcgtcggtcgtggactggcggcgcaggatgacctaaaaatggtccacgaactggcggcggtgctgaatgctgaagtcggctgttcacgtccaatctgccgaaggcgagaactggatggagcgccatgcccagcacaagtcctggaatccactctcatgggccccactgggatctcaggctcacccctgaaccagtcagtcacagtggccactggactggaatgtgctgattggctcagcctgacaggaccctcagctgcaggtctgttggagtttactggaggtccactccagaccctgtttgcctgggtatcagcagcggtggctgcagaacagcggatattggtgaacccgcaaatgctgctgcctgattgttccttgggaagttttgtctcagaggagtacccggccgtgtga

SEQ ID NO: 10869 - DNA, 1366 bp, Homo sapiens
  SIMILAR (139)..(516): 801254mologous to Homo sapiens HP protein,accession number AF026219,Smith-Waterman Score=484.
atgctgcggatcctgtgcctggcactctgcagcctgctgactggcacgcgagctgaccctggggcactgctgcggttgggcatggacatcatgaaccgtgaggtccagagcgccatggatgagagtcatatcctggagaagatggcagccgaggcaggcaagaaacagccagggatgaaacctatcaagggcatcaccaatttgaaggtgaaggatgtccagctgcccgtcatcacactgaactttgtacctggagtgggcatcttccaatgtgtgtccacaggcatgaccgtcactggcaagagcttcatgggagggaacatggagatcatcgtggccctgaacatcacagccaccaaccggcttctgcgggatgaggagacaggcctccccgtgttcaagagtgagggctgtgaggtcatcctggtcaatgtgaagactaacctgcctagcaacatgctccccaagatggtcaacaagttcctggacagcaccctgcacaaagtcctccctgggctgatgtgtcccgccatcgatgcagtcctggtgtatgtgaacaggaagtggaccaacctcagtgaccccatgcctgtgggccagatgggcaccgtcaaatatgttctgatgtccgcaccagccaccacagccagctacatccaactggacttcagtcctgtggtgcagcagcaaaagggcaaaaccatcaagcttgctgatgccggggaggccctcacgttccctgaggtgttatgccaaaggctcgccgcagctgctggtcccagccaccttcctctctgcagagcttgcccttctgcagaagtcctttcatgtgaatatccaggatacaatgattggtgagctgcccccacaaaccaccaagaccctggctcgcttcattcctgaagtggctgtagcttatcccaagtcaaagcccttgacgacccagatcaagataaagaagcctcccaaggtcgctatgaagacaggcaagagcctgctgcacctccacagcaccctggagatgttcgcagctcggtggcggcgcaaggctccaatgtccctctttcttctagaagagcacttcaatctgaagggccagcactcactgcatgagaaccagctgcagatggccacttctttggacagattactgagcttgtcccggaagtcctcatcgattggcaacttcaatgagagggaattaactggcttcatcaccagctatctcgaagaagcctacatcccagttgtcaatgatgtgcttcaagtggggctcccactcccggactttctggccatgaattacaacctggctgagctggacatagtagagcttgggggcatcatggaacctgccgacatatga

SEQ ID NO: 10870 - DNA, 545 bp, Homo sapiens
  SIMILAR (1115)..(873): 641254mologous to Homo sapiens Human prostate cancer- associated protein 12,accession number Y48226,Smith-Waterman Score= 228.
atgctcagcctgctgaccccaagcagtcagagagctcttcgtggctgtgaccagaaccttcttggtgtgatgggcattgtggccacgtgtgttgtggcttatgggcctaagtctcagctctttccctcttgctgcacagggcccccagatgccgacggccctctctacctcccctacaagacgctggtctccacggttgggagcatggtgttcaacgagggcgaggcccagcggctcatcgagatcctgtctgagaaggctggcatcattcaggacacctggcacaaggccactcagaagggtgaccctgtggcgattctgaaacgccagctggaagagaaggaaaaactgctggccacagaacaggaagatgcggctgtcgccaagagcaaactgagggagctcaacaagactgaggttatgaagtcgatcctagatggccttgcagataccaccttccgcaccatcaccactgacctcctgtacgtgggctcaaatgacattcagtacgaagacatcaaaggtgacatggcatccaaattagg

SEQ ID NO: 10871 - DNA, 455 bp, Homo sapiens
  SIMILAR (338)..(69): 981254mologous to Homo sapiens dJ803K15.1 (novel protein),accession number AL160071,Smith-Waterman Score=492.
ttttttaggtggagaaggcgtcattttccccagagggtggtggggggcagcaatgaggtttgtgtctacaggaagcaggcacaccactccttgaggcagtgagaagtctgctgggcctcacactcagtggcaccaaaacagcaaatgagccacctctgaaactcggcttcattcttgtgcatcagaaggaattgtcccagcaggatgtaggccttattgatacctttggtgaccaaattgatcgcgagctcatggctgatgccatccacccagcagacatccttttctccaatgggttcggagaggaaggctctcagcctgggagacatgtcgtccatctcctttctacagagtcgagctcctcgtgtacgccttcttgctctgaaggacgttttgtaacatttcagaagacactgaactctcccggaagagatgaatccaaaggcactgatttt

SEQ ID NO: 10872 - DNA, 2863 bp, Homo sapiens
  SIMILAR (1048)..(1689): 871254mologous to Homo sapiens putative p150,accession number U93563,Smith-Waterman Score=1004.
gtgccgatggtggtggtgcccccagtgggtgccaagggcaacacaccagccactggcactactcagggcaaaaaggcggaggggactcagaatcaaagcaaaaaggctgaaggagccccaaaccagggcagaaaggcagaaggaaccccaaaccagggcaaaaagacagagggaaccccaaaccaagggaaaaaggcagaaggaaccccaaaccaaggcaaaaaggcatgaaggaaccccaaaccaaggcaaaaaggcggagggggcccataaccagggtaaaaaggttgatacaaccccaaaccaggggaaaaaggtggagggggccccaacccagggcagaaaggccgagggggctcagaaccaggccaaaaaggtagaaggggcccagaaccagggcaaaaaggcagagggggcccagaatcagggcaaaaaggcagagggggcccagaaccagggcaagaaggctgagggtgcccagaatcagggcaagaaggcagaggggggccagaaccagggcaaaaagactgaggaggcccagaagcagggcaagaaagcagagggggcccagatccagggcaagaagaacgagggggctcagacccagggcaagaaagcagagggggcccagaaccagggcaagaagaacgagggggctcagacccagggcaagaaagcagagggggcccagacccagggcaagaaggccgacggggcccagaaccagggcaagaaggccgagggggcccagaaccagggcaagaaggccgagggggcccagaaccagggcaagaaggccgagggggcccagaaccagggcaagaaggccgatggggcccagaaccagggcaagaaggccgagggggcccagaaccagggcaagaaggccgagggggcccagaaccagggcacgaaggccgagggggcccagaaccagggcaagaaggccgagggggcccagaaccagggcaagaaggccgagggggcccagaaccagggcaagaaggccgagggggcccagaaccagggcaagaaggccgagggggcccagaaccagggcaagaaggccgagggggcccagaaccagggcaagaaggccgagggggcccagaaccagggcaagaaggccgagggggcccagaaccagggcaagaaggccgagggggcccagaaccagggcaagaaggccgagggggcccagaaccagggcaagaaggccgagggggcccagaaccagggcaagaaggccgagggtgctcagaaccagggcaaaaaagtagaaggggcccagaaccagggcaagaaggctgagggggcccagaaccagggcaagaaggccgagggggctcagaaccagggcaaaaaggccgagggagcccagaaccagggccaaaaaggagagggagcccagaatcagggtaaaaagacagaaggggctcagggcaaaaaggcagaaaggagtcccaaccaaggcaaaaaaaggagagggagctcccatccagggcaaaaaggcagattcggttgctaatcagggcacaaaggtagagggtattacaaaccaggggaaaaaagcagaagggtcccccagtgaaggcaaaaaggcagaagggtcccccaaccaaggcaaaaaggcagacgcagctgccaatcagggtaaaaagacagagtcagcttttgttcagggcaaaaatacagatgtggcccagagcccagaggcaccaaagcaagaggctcctgccaagaagaagtctggttcaaagaaaaaaggtgagcctgggcccccagatgccgacggccctctctacctcccctacaagacgctggtctccacggttgggagcatggtgttcaacgagggcgaggcccagcggctcatcgagatcctgtctgagaaggctggcatcattcaggacacctggcacaaggccactcagaagggtgaccctgtggcgattctgaaacgccagctggaagagaaggaaaaactgctggccacagaacaggaagatgcggctgtcgccaagagcaaactgagggagctcaacgaggagatggcagcagaaaaggccaaagcagcagccggggaggccaaagtgaaaaagcagctggtggcccgggagcaggagatcacggctgtgcaggcacgcatgcaggccagctaccgggagcacgtgaaggaggtgcagcagctgcagggcaagatccggactcttcaggagcagctggagaatggccccaacacgcagctggcccgcctgcagcagggagaactccatcctgcgggatgccttgaaccaggccacgagccaggtggagagcaacctccccagcctggccctggtccagctggccagtgagggggcgcgtggactccgtgggctgctgcccacaggcctacagggcgtcaaggcggagctgcacagcaagttacagtcctccgaggcggaggtgcgcagcaaatgcgaggagctgagtggcctccacgggcagctccaggaggccagggcggagaactcccagctcacagagagaatccgttccattgaggccctgctggaggcgggccaggccgcgggatgcccaggacgtccaggccagccaggcggaggctgaccagcagcagactcgttccagatccaaggtgactgagacaaactgccagctgccactggcttatcaggagcacctggcgtcccacagggagagtgaggaggccctgcagaagcgcctggacgaggtcagccgggagctgtgccacacgcagagcagccacgccagcctccgggcggatgccgagaaggcccaggagcaacagcagcagatggccggcatagaaattgaatctgaaatggctgatgaataa

SEQ ID NO: 10873 - DNA, 1674 bp, Homo sapiens
  SIMILAR (666)..(223): 681254mologous to Mus musculus Pro-Pol-dUTPase polyprotein,accession number Y12713,Smith-Waterman Score=583.
tcatgagtccacagatggtagtcttggcagaagtattgcgtgcaagataggcaaacccatatctggagtaaatactgttccagtgaggatagacctctgccctttccatgatggaggagattcaatataatcaacctgccacaaggtagctggctgatcatcccaaggaatggtgccatattgagggctcagtgttggtctctgctgctggcaaattggactatggccactttgctcatgagcccattgagtgatgacaggggtgagtggggaaagaggctgagtcgtgtccacaaaatgagttatcctacccacttgattattaaaatcctcctctgctgaggtcaatcgttggtgagcactcacatgagatacaaatatcttcacagtttttgaccactcagtgaagtccatccacatacctcttccccaaatttctttgtcatcaattttccaatcatgctccttccaagtccctgaccatccagccaaaccattggctacggcccatgaataagtatataattgcacatctggccatttctccttccatgcaaagtgcataactaggtgcactacatggagttctgtccactgggaagatttcccttcactgctgctctttagggatgtcctggaaagaggctgtagtggtgcagctgtccacaataagtccggtgtgtttgctactttttgctcactgaatccaatcagcataatgccatcaatgtcatggactagtgtgatatcttccagaagcctagcagtcagggagccattgtgggggttctgctgactgctaagtatgttcttgccaattatgcattctagcaccggggaaatggccatgggatgagactggggaccagctgaatccactccataagcttctactttaactggagaaccacagtgatattttgggtcccctggaatcaatgtcagctcaaaggcagtgcccagtagtccctgaaatgtctgatcatttccctttccccagtgcacagttaccctggtaaaaggccagaggtctccttctctcctatcaacagcggccagccccccaactatgaaatgctcaaggaggagcacgaggtggctgtgctgggggtggcctacaaccctgctcccccgacgtccaccgtgatccacatccgcaacgagacctccgtgcccgaccatgttgtctggtccctgttcaacactctcttcatgaacccctgctgcctgggcttcatagcattcgcttactccgtgaagtctaggcacaggaagatggttggcgacctgactggcgcccaggcctatgcctccaccgccaagtgcctgaacatctgggccctgattttgggcatcctcatgaccattctgctcatcatcatcccagtgttgatcttccaagcctcccttcttcctttcttctcctttttcttttcctatttctccctgctctccagctcctgtttctctctttttctcttgttttctttttctttttttcatttttccctttgttccaaaggctggagttgtgggggtggggcgagtgggaccaccattccactgagtcctaggggtggaactgctgccccagtgggcactctcgtttctctctgtgatgacaatgccacttgctaatggctgcttcttggcatcctctccctcagtgtgcat

SEQ ID NO: 10874 - DNA, 675 bp, Homo sapiens
  SIMILAR (284)..(75): 821254mologous to Homo sapiens (Human) Modified human lipocortin,accession number P90400,Smith-Waterman Score=320.
tgagggtagcgaccatcgtggatatctgggagaagagcatttcaggcaagaagaacagccaaaacctcttcgtgaacccctgctgcctgggcttcatagcatttgcttattccgtgaagtctagggacaggaagatggttggtgacctgactggggcccaggcgtatgcctccaccgccaagtgcctgaacatctgagccctgattgtggacatcctcatgaccattctgctcatcatcatccgggtgttgatcttccaagcctatcgatagatcaggaggcatcatccaggccaggagctcgggccctgcaggatggagcttgggcctcagttttcccatctgtgcaatgggaacaacagggttggtgagggggttggaggtgggctgggtacagtgcctgccccctgtgcggtaggacctgcagcggatcaaaagcctgtcccaggagacctgtgcctgagatgctgggcgggtcatgcttcctgcagctgctgccaactgcgtcccagactgggcgcggggatcctggcttctctgacatgacgcaaaagccgtgtcaagagggcagaagagtttaagggtcaccagccggcaggggctggtgggggcagcttctgtggtcacgcaggactgctgggtcaaatgaagggcacagatggcaagagatctccaa

SEQ ID NO: 10875 - DNA, 732 bp, Homo sapiens
  SIMILAR (106)..(504): 971254mologous to Homo sapiens 1-8U,accession number X57352,Smith-Waterman Score=685.
ggatatgcccaccaactcccggttcgacgacttcgtctggggaaagggagggctcactgagaaccatcccggtaacccgaccgccgctggtcttcgctggacaccatgaatcacactggccaaaccttcttctctcctgtcaacagtggccagccccccaactatgagatgctcaaggaggagcacgaggtggctgtgctgggggcgccccacaaccctgctcccccgacgtccaccgtgatccacatccgcagcgagacctccgtgcccgaccatgtcgtctggtccctgttcaacaccctcttcatgaacccctgctgcctgggcttcatagcattcgcctactccgtgaagtctagggacaggaagatggttggcgacgtgaccggggcccaggcctatgcctccaccgccaagtgcctgaacatctgggccctgattctgggcatcctcatgaccattctgctcatcgtcatcccagtgctgatcttccaggcctatggatagatcaggaggcatcactgaggccaggagctctgcccatgacctgtatcccacgtactccaacttccattcctcgccctgcccccagaggccaggagctctgcccttgacctgtattccacttactccaccttccattcctcgccctgtccccacagccgagtcctgcatcagccctttatcctcacacgcttttctacaatggcattcaataaagtgtatatgttt

SEQ ID NO: 10876 - DNA, 1195 bp, Homo sapiens
  SIMILAR (1039)..(2793): 951254mologous to Homo sapiens putative p150,accession number U93574,Smith-Waterman Score=2924.
ttgccaaatgattggggcttcagagcagccggcagggatttgtccactttgtcagatgaggcgccaaggtcagggttgtaagggaagtcccagtcctcaaggaaaatggcttccagttggctccgcaggccgcccttcccattttgcgtgggttcacattthattgtaacttggaagcccacccttctatcctactcctggagctgtcgtccccamagggctcagagadttagccttgctccacagcaaacagcccagaggccccacctgggcaaaagcaaacaaaacagdtwacgttcctttaccggcaggtggcagatgctctgcccaggcctgcggaagccagctccggtctgtgtgttaattccttcccaggaacttccggcccaccagctccattccagcctccactcggctcagctccgcggcttccthcgagccaggggtgggtcctgcatcgccatctgctgggccgcgcggcacggccggttttcctggagccaagaagaagtcggaggcttgcagggcttgaaggcctcttcaccgtgccctccagggagcctagctggccgaagtattcctgctggaacttctggaagtcttcctcggtgaacgacggtgccctcagccttcttcttcttggtcttggccacaggccggtcacaggccttgcggccccggttctggcgcaaaatctggcgagggtgcgggaccgagggcccatcatttcaagagcagaggaggcccgcaaaggtcacagggtggtctcgacactctcgcttccggtactcgtctgtgggtagcaggcagggagcaccatttcagattcactccccctggaaccattctcagtccctgatgcttctctccccactagggccgtagtccacgaggaccaggacggtggcgtgttctgtcaccttcgtatgtccagggccccgctccgcgcctggcacacagtaggtctagcaataccgggcgaacgcttcaagccctgcctcaagcgccacctccgtcttccggggccgtttcaccggagcccctctcggcttggcctgacctggagggtcccggggggctgtaggggaagagagaggaagagacccaggtcagagggcgcgcagcgttcccatgccactggggtccgcccacgagcctcacactacttccgacctggcagtccctgtcgtctcgg

SEQ ID NO: 10877 - DNA, 5881 bp, Homo sapiens
  SIMILAR (297)..(2120): 971254mologous to Homo sapiens putative p150,accession number U93563,Smith-Waterman Score=3159.
caaaacatagagtaccccggcagccggcaagaggaagagagagtggcttccacatccccaatatcctagaggcggctgagccggaggcggtcgcacaaagcgggccccgggggccgttccagccgcggccgaccatagagatgcggctcccgccggctctgggtctggagataggaaagctgaggcccagagaagcgaagcgactgtgtctgtccaagaccacgcgccctcctgcccggaagataagcgtatttcttctctggtgcccacctgtctcctacctcaccctgccctcccgcaggtgaaggttcttaatcttgacggctcagcgtcctccttggctccccccggaggccatgtatggtcaagcttgaagattccccagaacaacgctaatattcacatttaagaagccaaaacacacaagtcggtggtgatgacagacccccttttggactcacagccagccagtagcaccggggagatggatggactgtgccctgagctattgctgatccccccgcctctctctaaccgtggaatcctggggcctgtccagagcccctgtccttcccgggaccctgcacctatacctactgagccaggctgcctgctggtagaggccacagcaactgaagagggaccagggaacatggagatcattgtggagacagtagctggaaccctgaccccaggtgctcctggagagaccccagctcccaaactgcctccaggagagagagaaccttcacaggaagcaggtacacccttgcctgggcaggagacagctgaagaggagaatgtagagaaagaagagaagagtgacacccagaaggactcccaaaaggctgtggataaaggccaaggggctcagcggctggaaggggatgtggtctctggcaccgagtccctcttcaagacccatatgtgtccagagtgtaagcgctgctttaagaagcggactcatctggtggagcacctgcatctccacttcccagaccccagcctccagtgccctaactgccagaagttcttcaccagtaagagcaagctcaagacccatctgctgcgggagctgggtgaaaaggcccaccactgcccactgtgccactacagtgcggtggagaggaatgcactcaaccgccacatggccagcatgcatgaagatatttccaacttctactcagacacctatgcctgtcctgtctgccgtgaggaattccgcctcagccaggccctaaaggagcacctcaagagccacacggcagcagccgcagcagagccattaccccttcgctgctttcaggagggctgcagctatgcagcacccgaccgcaaggccttcattaagcacctgaaggagacccatggggtgcgggctgtggagtgccgccatcactcatgtcccatgctctttgccacagccgaagccatggaggcccaccacaagagtcactacgccttccactgcccccactgtgattttgcttgttccaataagcacctattccgtaaacacaagaagcagggccaccctggcagtgaagagctgcgctgcaccttctgcccctttgccaccttcaacccagtggcttaccaggatcatgtaggcaagatgcatgctcatgaaaagatccaccagtgtcctgagtgcaactttgccactgcccacaagagggtgctcatccgacacatgcttctacatacgggtgagaagccccacaagtgtgagctgtgtgacttcacatgccgagacgtgagctacctatccaagcacatgctgacccactccaacaccaaggattacatgtgcactgaatgtggctatgtcaccaagtggaagcactacctccgtgtgcacatgcgaaaacatgcaggggacctcaggtatcagtgcaaccagtgctcctatcgctgtcaccgggctgatcagctgagcagccacaagctgcggcatcagggcaagtctctgatgtgtgaggtgtgtgccttcgcctgcaagcggaagtatgagctgcagaagcacatggcttcccagcaccaccctggcacaccgtccccactctacccttgccactactgcagttaccagagccgccacaagcaggctgtgctgagccatgagaactgcaagcatacccgcctccgtgagttccactgtgccctctgtgactaccgcaccttcagcaacaccacactcttgttccataaacgcaaggcccatggctatgtacctggagaccaggcctggcagctccgctatgcaagccaggagccagaaggggccatgcagggcccaacacccccaccagattcagagccctcaaaccagctgtcagcccgacctgaggggccaggtcacgaacctgggactgtggtggaccccagcttggaccaggccctgccagagatgagtgaggaggtcaacactggaagacaggagggcagtgaggctccccatgggggtgacctgggtggcagtcccagcccagcagaggtggaggagggcagctgcacactacacctagaggccctgggagtagagctggagtctgtgactgagccaccccttgaggaggtcactgaaacagcccctatggagttcaggcccctgggactggaagggccagatggactggaaggaccagagctatctagctttgaaggtattgggacttctgacttgggtgctgaagaaaatccccttctggaaaagccagtgtctgagccctccacaaatcctccatccttagaggaggctcctaacaactgggtaggaaccttcaagacaactccacctgctgagacagcacccttgcccccattacctgagtcagagtcattactcaaggccctaaggagacaggacaaagaacaagcagaggcattggtgctagaggggcgggtgcagatggtagtgatccagggagaggggcgagccttccgctgcccacactgcccttttatcactcgccgggagaaggccctgaatctgcactccaggactgggtgccaaggccgccgagagcccctgctgtgccccgagtgtggggctagcttcaagcaacaacgcggcctcagcacccacctgctgaagaagtgccctgttctactcagaaagaacaagggcttgcccagaccagattcacccatccctctgcaacctgtgctcccaggtacccaggcctcagaggacacagaaagtgggaagcccccacctgcatcacaagaagcagagctactgcttccaaaagatgctcctttggagcttcccagggagccagaagaaacagaagagcctcttgccacagtctctggttccccagtccctcctgcaggaaactccttgcccacagaggcccctaagaagcactgctttgacccagtccctcctgcaggaaactcctcacccacggaggcccctaagaagcaccaccttgacccagtccctcctgcaggaaactcctcacccacagaggccctgaagaagcaccgctttgagcagggcaagtttcactgcaactcctgcccattcctttgttcccggctctcctctattacctctcacgtggctgaaggctgcagggggggacgtggcgggggaggaaaacgagggaccccccagacccagcctgatgtgtccccgttgagcaatggggactctgctcccccgaagaatgggagtacagagtccagctctggtgatggggatacagttctggttcaaaagcagaagggggctcgcttctcctgccctacatgtccctttagctgccagcaggaacgggctctgaggactcaccagatccggggctgccccctcgaggagtctggagagctgcactgcagcctctgcccattcactgctcctgctgccactgccttaaggctccaccagaagcggaggcaccccactgcagccccagcccgtgggccccggccccatctacagtgtggggactgtggcttcacctgtaaacagagccgttgcatgcagcagcaccggcggctcaagcacgagggggtgaagccccatcagtgccccttctgtgacttttcgaccaccagacggtaccggttagaggctcaccagtcccgacacacaggcattggccgcatcccctgcagctcttgcccccagacgtttggtaccaactcgaaactgcgcttgcaccggttaagggtacatgacaaaacacctacccacttctgtccactttgtgactatagtggctaccttcgccatgacatcactcgtcatgtcaacagctgccaccaaggcaccccagcctttgcctgctcccagtgtgaagcccagttcagctcagagacagcacttaagcagcatgctctgcgccgacaccccgagcctgcacagcctgcccctggctctcctgcagagaccactgagggccccctgcactgttcccgctgtgggttgctgtgccccagccctgccagcttacgaggacacacccgtaaacagcacccacggcttgagtgtggggcctgccaggaggccttccctagccgactggctctggatgagcaccggaggcagcagcatttcagccaccgctgtcagctctgtgactttgctgcccgggagcgggtgggcctggtaaagcactacctggaacagcatgaggagacttcagcagccgtggcagcctcagatggggatggggatgctggccagcccccgctacactgccccttttgtgacttcacatgccgccatcagctggtactagatcaccatgtgaaagggcatgggggcactcgtctctacaagtgcaccgattgtgcttacagcaccaagaaccgacagaagatcacctggcacagccgcatccacactggggaaaagccttaccactgtcacctctgcccctatgcctgtgctgatccctctcgtctcaagtaccacatgcggatccacaaggaggaacggaagtacctgtgccctgagtgtggctacaagtgcaagtgggtcaaccagctgaaataccacatgaccaagcatacaggactgaagccataccagtgtcccgagtgtgagtactgcaccaaccgggctgatgcactgcgtgtgcaccaggagacccggcatcgagaagcacgggctttcatgtgtgagcagtgtggcaaggccttcaagacgcgcttcctgctgcgcacccaccttcgcaagcacagtgaggccaaaccctatgtgtgcaaatgtgtgccaccgtgctttccgctgggctgctggcctgcgccatcatgcccttaaccccaaccgaccgccaccccttcttttgccgcctctgcaactacaaggccaagcaaaagttccaggtggtcaagcacgtacgcaggcaccaccctgaccaagccgacccaaaccagggtgtgggcaaaccaccccccacccccacgagtgcacctgcatgatgtgcagctggaggatcccagccctcctgctcctgccgctccccacactggacctgagggctgaaagcctgccccacctcctgtataggaagagggtatggtctgagatgtgcagactgggaccagcgctagcctgaggagctcagagcctaaggaaagactggcttttggggtacaagggtgactagaaccttcctgggactctggctatagtactttgaaattatcacccatataaaagagggacatggactataacgttgatttcttattgctgtacattgcgtttttaacctgcaagttctcagtttcttcaccatcactccatcaaagtccctggctataagatctggattttacccactccatcttctctttccttcttactgtgtcaattcctattttctttcagaatcttctaaaaacagttgtatctaaccgc

SEQ ID NO: 10878 - DNA, 1707 bp, Homo sapiens
  SIMILAR (555)..(1280): 931254mologous to Homo sapiens similar to Human zinc finger protein(ZNF142),accession number D87073,Smith-Waterman Score=1314.
ttcccgggtcgacgatttcgttcaggaggcacagctcacagacacaggaaacacaggactgctattctgctctcctgcccacggtgatctggtgccagctggtggaacagtgggtgatggcgtccctgctgcaagaccagctgaccactgatcaggacttgctgctgatgcaggaaggcatgccgatgcgcaaggtgaggtccaaaagctggaagaagctaagatacttcagacttcagaatgacggcatgacagtctggcatgcacggcaggccaggggcagtgccaagcccagcttctcaatctctgatgtggagacaatacgtaatggccatgattccgagttgctgcgtaccctggcagaggagctccccctggagcagggcttcaccattgtcttccatggccgccgctccaacctggacctgatggccaacagtgttgaggaggcccagatatggatgcgagggctccagctgttggtggatcttgtcaccagcatggaccatcaggagcgcctggaccagtatcggcaggatggagtcagggtgggggtgagggatcacgctatccctgaaggagccagatgcaacaggtttaggaaagagaccactgagggccccctgcactgttcccgctgtgggttgctgtgccccagccctgccagcttacgaggacacacccgtaaacagcacccacggcttgagtgtggggcctgccaggaggccttccctagccgactggctctggatgagcaccggaggcagcagcatttcagccaccgctgtcagctctgtgactttgctgcccgggagcgggtgggcctggtaaagcactacctggaacagcatgaggagacttcagcagccgtggcagcctcagatggggatggggatgctggccagcccccgctacactgccccttttgtgacttcacatgccgccatcagctggtactagatcaccatgtgaaagggcatgggggcactcgtctctacaagtgcaccgattgtgcttacagcaccaagaaccgacagaagatcacctggcacagccgcatccacactggggaaaagccttaccactgtcacctctgcccctatgcctgtgctgatccctctcgtctcaagtaccacatgcggatccacaaggaggaacggaagtacctgtgccctgagtgtggctacaagtgcaagtgggtcaaccagctgaaataccacatgaccaagcatacaggactgaagccataccagtgtcccgagtgtgagtactgcaccaaccccggctgatgcactgcgtgtgcaccaggagacccggcatcgagaagcacgggctttcatgtgtgagcagtgtggcaaggccttcaagacgcgcttcctgctgcgcacccaccttcgcaagcacagtgaggccaaaccctatgtgtgcaatgtgtgccaccgtgctttccgctgggctgctggcctgcgccatcatgccctcacccacaccgaccgccaccccttcttttgccgcctctgcaactacaaggccaagcaaaagttccaggtggtcaagcacgtacgcaggcaccaccctgaccaagccgacccaaaccagggtgtgggcaaagaccccaccacccccacagtgcacctgcatgatgtgcagctggaggatcccagccctcctgctcctgccgctccccacactggacctgagggctga

SEQ ID NO: 10879 - DNA, 1092 bp, Homo sapiens
  SIMILAR (343)..(1089): 981254mologous to Escherichia coli enterobactin,accession number M60177,Smith-Waterman Score=1252.
atgtccattttgctgacctcaatcgcgagacagtcgagagataagcgtacacgccttggacacaaacaacggattctggccggcctcgggtctaaccatccgatccgtcgtaatctgcaaggtctgcgtcgtttcgccctggtagaccggcagctcgtcgtccaaaatgtagtcacccgctggtgccggatggtgtaccagagtgctgcaaatgtgttcatccagcatcgaccaatttcccacgacgaacgagtacagcagcgcggcacagccatcacaatgatggttcaacaagcacaatgggccgaacgtggcaaatctgggctatctggtgtcgcaatcgggcctgccgtggataccagcgcattgcaggcgcagcttcgtgaaacattgccaccacatatggtaccggtggttctgctgcaacttccacagttaccacttagcgccaacggcaagctggatcgcaaagccttaccgttgcctgaactgaaggcacaagcgccagggcgtgcgccgaaagcgggcagtgaaacgattatcgccgcggcattctcgtcgttgctggggtgtgacgtgcaggatgccgatgctgatttcttcgcgcttggcggtcattcgctactggcaatgaaactggcagcgcagttaagtcggcaggttgcccgccaggtgacgccggggcaagtgatggtcgcgtcaactgtcgccaaactggcaacgattattgatgctgaagaagacagcacccggcgtatgggattcgaaaccattctgccgttgcgtgaaggtaatggcccgacgctgttttgtttccatcctgcgtccggttttgcctggcagttcagcgtgctctcgcgttatctcgatccacaatggtcgattatcggcattcagtcaccgcgccccaatggccccatgcagacggcggcaaacctggatgaagtctgcgaagcgcatctggcaacgttacttgaacaacaaccgcatggcccttattacctgctggggtattcccttggcggtacgctggcgcagggtattgcggcgcgactgcgtgcccgtggcgaacaggtggcatttcttggctga

SEQ ID NO: 10880 - DNA, 944 bp, Homo sapiens
  SIMILAR (1105)..(3132): 891254mologous to Homo sapiens putative p150,accession number U93565,Smith-Waterman Score=2987.
atgcgcacaatcctgacgatagatatccagctccgctatccacggcgaccaggcgcgttcgggactcataccttcctgaagtgtgcgttcagcaacaaacagcgtcgctttaccgtcaaacgttttgcgtttctggcggccaggtatccagcaagccaagaaatgccacctgttcgccacgggcacgcagtcgcggcggcaataccctgcggcaacgtacccgccaatgggaataccccagccaggtataaggggcaatgcgggttgtgttcaagtacgttgcaagatgcgcttcgagacttcatccaggttgcccatacctgcgaaatccccctgatgcccgcctgcttcggtctggccgatgacaaactgtggcgttggttgaatgaaaaactaccttgttcactgatgcttttgccaacgctgccgccttccgtgctgggcattcgtctgcaaaaccagttacagcggaagattgtgctttttggtggcgtgtggatgccgggcgatgaagtgaaaaaagtgacctgtaaaaatggcgtagtgaacgaaatctggacccgcaatcacgccgatattccgctacgtccacgtttcgcggttctcgccagcggcagtttctttagtggcggactggtagcggaacgtaacggcattcgagagccgattctcggccttgatgtgctacaaaccgccacgcggggtgaatggtataagggagatttttttgcgccgcaaccgtggcagcagttcggtgtaaccactgatgagacgctacgcccgtcacaggcagggcaaaccattgaaaacctgtttgccatctgtttcgatgctgggcggatttgatcccatcgcccagggatgcggcggcggtgtttgtgccgtcagtgctttacatgccgctcaacagattgcccaacgcgcaggaggccaacaatgaatga

SEQ ID NO: 10881 - DNA, 479 bp, Homo sapiens
  SIMILAR (262)..(477): 981254mologous to Homo sapiens nuclear distribution protein C homolog,accession number AF130736,Smith-Waterman Score=368.
  misc_feature (1)...(479): n = a,t,c or g
gaggnnntttgtttgtagacatagtccagagcggtggaattcgtcagagacctcagggccccagatcaaggaggacggcaaggtggtgactgtgcatctggagaaggtttgtacatgcattcaattcatcaaatacttgaacacctgctctgtgcctggtactgttcttgttctaagtgctggaaagagaacagtgaacaaaacataggaaaatatgtgccctcaggaagccttcattctcaacctcactgcctttacagagagatcaataagatggagtggtggagccgcttggtgtccagtgaccctgagatcaacaccaagaagattaaccctgagaattccaagctgtcagacctggacagtgagactcgcagcatggtggaaaagatgatgtatgaccagcgacagaagtccatggggctgccaacttcagacgaacagaagaaacaggagattctgaagaagttcatggatca

SEQ ID NO: 10882 - DNA, 773 bp, Homo sapiens
  SIMILAR (885)..(1166): 1001254mologous to Homo sapiens Protein sequence encoded by clone p199-7 (PL mutet.rsT4),accession number P93369,Smith-Waterman Score=542.
ggcaccgtctcgtacctctggatccagtgtaggcctgcaagggtcttatgtgctggatgtggatgggagagagtttggttgtgaaagggttaaggggtgattcctggtgcacagagcaggccacctcccaccctctggttgttctcttcacagatcaataagatggagtggtggagccgcttggtgtccagtgaccctgagatcaacaccaagaagattaaccctgagaattccaaggtgagccctggctggttgggggagcttcagcaggaaggtgaggggcctcgttgtttccagagcttcaccgattcctgtcactgcctgccctcagctgtcagacctggacagtgagactcgcagcatggtggaaaagatgatgtatgaccagcgacagaagtccatggggctgccaacttcagacgaacagaagaaacaggagattctgaagaagtgagcaattcaaagacggggttgggggaccgtgggtgcctgggggcttatacttcggtgacagcagtgagtggatcactgcgctgcctcaggagctgccctgccccctttccagccatgtttatggctttatggctttggcttgcctactcttgtcatttgctgaggtcatcttgagggcaaggccggctcatggtgcatgataggagggaaggggtaacaggcggtcattgccacctacaggaaaacaatgccagtgttggtgcctcagcttccagcctcggaactcaaatgcgtctcagataccctgggccctgctcctg

SEQ ID NO: 10883 - DNA, 1491 bp, Homo sapiens
  SIMILAR (6)..(434): 1001254mologous to Homo sapiens protocadherin alpha 11,accession number AJ007609,Smith-Waterman Score=733.
ggcgcgacccgcaggagcgtagagagcgcgggactagagtgcagagctccgggacgtggatcggagccggcgcgatgggcggagagcaggaggaggagcggttcgacggcatgttgctggccatggctcatcagcacgagggcggcgtgcaggagcttgtgaacaccttcttcagcttccttcgacgcaaaacagactttttcattggaggagaagaagggatggcagagaagcttatcacacagactttcagccaccacaatcagctggcacagaagacccggcgggagaagatagcccggcaggaggccgagcggcgggaaaaggcggagcgggcggccagactggccaaggaagccaagtcagagacctcagggccccagatcaaggagctaactgatgaaaaagcagagaagctgcagctagagattgaccagaaaaaggatgcagagaatcctgaggcccagctcaagaacggcagccttgactccccagggaagcaggatactgaggaagatgaggaggaagatgagaaggacaaaggaaaactgaagcccaacctaggcaacggggcagaccttgcccaataacgcttgaacccagacccctgtcgggagctggacctggcggtcccttttctgtgtgaacttccggctgaaagggaaggacatggtggtggacatccagcgcggcagcacctcggggtggggctcaaggggcagccagcgatcattgatggggagctctacaatgaagtgaaggtggaggagagcttcgtggctcattgaggacggccaaggtggtgactgtgcatctggagaagatcaataagatggagtggtggagccgcttggtgtcccagtgaccctgagatcaacaccaagaaagattaaccctgagaattccaagctgtcagacctggacagtgagactcgctagcatggtggaaaagatgatggtatgaccaggcgacagaagtccatggggctgccaacttcagacgaacagaagaaaacaggagattctgaaagaagttcatgggatcaacatccggagatgggattttttccaaaggctaaatttccaactaacccctgtttttttcctccctgaaactctttggggcttagcttgcaaccaccccaactttctttccccactcttctcttgggacttgtgggcctcagggcttggggcagccattgggaacttggcccaggcacacagttcccggggcattcaggagaaaggctgggtcttgggacctttgtcctccccagtggccttacttgttacacattaaaacgattttccccagcttctttcggggtcttcttcttgcttctgccttttctttggggcacagccttcttacagcttgctgctgggaactgggagtttggcttctagcccagattctgccatgtgacctagggcacatccttgcccctctctgggcctcagtttctcattacttaaagattaaaacaa

SEQ ID NO: 10884 - DNA, 426 bp, Homo sapiens
  SIMILAR (176)..(421): 961254mologous to Homo sapiens dJ34B21.4.2 (nuclear transcription factor Y, alpha (CCAAT-Binding transcription factor subunit B, CBF-B, CAAT-Box DNA binding protein subunit A) (PUTATIVE isoform 2)),accession number AL031778,Smith-Waterman Score=390.
tttgctaggcagcggcagtggcggcggcagcggcggctggagcctctgattgggtttcggagtccggtactggagccaatcagcgcgggcagcgaaccgggggagcgaggcacggagtgtacctcacagccttctaggatctccagagtggacaggaatctcacttggagggaccatggagcagtatacagcaaacagcaatagttcgacagagcagattgttgtccaggcaggacagattcagcagcaggtccaagggcagccattaatggtgcaggtcagtggaggccagctaatcacatcaactggccaacccatcatggtccaggctgtccctggtggacaaggtcaaaccatcatgcaagtacctgtttctggaacacagggtttgcagcaaatacaggtgggcccacctcggcagaaacc

SEQ ID NO: 10885 - DNA, 1023 bp, Homo sapiens
  SIMILAR (673)..(1374): 981254mologous to Cloning vector pBACe3.6 levansucrase,accession number U80929,Smith-Waterman Score=1216.
caggtatggaagcaaaactgctttaaacattacagcaatgaaactgataacagcaccactcaattggttggtctacagaccctccaggtagtggtaccctctctgattctctgtgagcactgcatgaacttctcctctcctcatgtctggtgctgtttggtccaggctgtccctggtggacaaggtcaaaccatcatgcaagtacctgtttctggaacacagggtttgcagcaagtgagtaatatttaaaaatattgagcagtatatcagaggagaggtttcaaagaatagattattacaacctatcagacccagcagatcatcatccagcagccccagacggctgtcactgctggccagactcaggtaattccactagctctgtcacacaggagcaaaactgatttggaagagtcagataactgagtcagatatttcccagttaatgcagatggcaccattctccagcaaggtaagtgtacccataagcttccctaggactttttggggcaacttttttgtcccttagacaactgacatctttccagcagtgggcaagggactgtcactgtgacactaccagtggcaggcaatgtggtcaattcaggagggatggtcatggtaagaaaatgtatttttcagctttgtctttgaaattttcttgaacatgcaacttgatgcctcctaaaatttgagcctctctacgtgaatgccaaacaataccaccgtattcttaagaggaggcaagcccgagctaaactagaggcagaagggaaaattccaaaggagagaagggtatgtataacattgggaaggatataggaaaggagaatagcagggttctacttttgaaattatcttttatatccaaaggaaaaggatagtccccatatgcaggtaggaagacatatacattttattcttctctttattaccttgtattgacttgagttgaagccttcagcagtgagctgatcaaggtcatgtttctcactgttccaggaaattgatcaactcttccaa

SEQ ID NO: 10886 - DNA, 460 bp, Homo sapiens
  SIMILAR (120)..(350): 321254mologous to Bacteriophage APSE-1 P20,accession number AF157835,Smith-Waterman Score=69.
tgaaaagtattgaggcctcataagctgaacctgacacaataaatttaaaagggaaactaatttggaaatcagaaaaccatctaaggaatttgggaattaggcttctgctgccctctctgctactgacggtcaaggcctcctcattgtattctgtcctccatatctctgctgattcccattttgtctatttccatttaccccactactgcttgctcaggtcactctccttcactgtcggtgtttgttcaaattcctcagacccatccacttcccatctaaacttccctccccttttctcgctcgttggctctacctccctcctctctgttttctcctcactctcctgccccacctcgacatccacagcgaggcaatgaagaagcccctgccaaggaagagcccgcttctcagtgggacaccgggaaggtagacacccaacagtcaccgctagtgggaggcg

SEQ ID NO: 10887 - DNA, 2454 bp, Homo sapiens
  SIMILAR (1)..(330): 921254mologous to Homo sapiens putative p150,accession number U93564,Smith-Waterman Score=542.
atgaagtttcatgacagaggccaaatgcagcccaaacccagcccagcagaggctgtcaactcagcgccccagcgagagccggaaggttccatcctcagagctgcagaccctctcgtgtgggctgcaaaggccatgtctgcatcccgggcgaccgcagcttggccctgtggccgcctcgccttgggtgtggagaatgaacctcgagtgcgctggattcacaggggattttggtttctaattttccacatgaagggtctctacccctcagcagtcagggctgaaaacaggaaggattttactcaaccatggacgccgccggctcaaggtgtcccaaagcgaggggcgtttcctggaagttgggtggaagcagcgcggacccacggcacaccgaacgcactccaacagaacccgacgcagacacgcgctttcaaccggcggagacactggcagggccagaaacgcgcgcagcgggggcgggaggtcgccacgcagttcccttcctgcggcgtcctccacacccggggtctgctggtctccgcggatgtcacaggctcggcaaccgccctcctgtcggcggggagtcccgcgacgcccggaaatgctccgaagcctgtcgcccagctgccagatctgcgtctgtgtccggttccgtcactgagggcagccctgggattcggcagacgccagtcctccctgagatgcttccccatccttccctccgccaggccctacgtctccgcaaaccccacgcttcggggtggccgcctcagacaggaccctgagtccgagactggggtaggggacctgcccgatcctgtaacaaccctcgtgcttctgcacaatcgcctcccactagcggtgactgttgggtgtttaccttcccggtgtcccactgagaagcgggctcttccttggcaggggcttcttcattgcctcgctgtggatgtcgaggattccatgaccttcgaggatatcattgtagacttcactcaagaagagtgggccctgctggacacatcccagagaaagctgtttcaagatgtgatgttggagaacatcagtcatctggtctctattggcaaacagctctgcaaatcagttgtgctttcccaattggagcaagtagagaaactttcaacacaaagaataagcttactgcaaggtagagaagttggcattaaacatcaagagataccattcattcaacatatctatcagaagggcacgtccaccatcagcacaatgagatctcatactcaagaggatccttttctatgcaatgacttaggagaagatttcactcaacatatagcattgactcaaaatgtgattacctacatgagaacgaaacactttgtaagcaaaaagtttgggaaaatcttcagtgactggttatcctttaatcaacacaaggaaattcacaccaaatgtaaatcatatggaagtcatctatttgattatgcctttatccaaaactctgcccttagaccacacagtgtgactcacactagagagataacattggaatgtcgtgtgtgtgggaaaacctttagcaaaaattctaatcttaggcgacatgagatgattcacactggagagaaaccacacggatgtcatctatgtgggaaagcctttactcattgctctgatcttcgaaaacatgagagaactcacactggagagaagccatatggatgtcatctatgtgggaaagccttcagtaaaagttctaaccttagacgacatgagatgattcacactagagaaaaagcacagatatgccatctatgtgggaaagccttcactcattgctctgaccttagaaaacatgagagaactcacttaggagataaaccatatggatgtctcctatgtgggaaggctttcagtaaatgttcttaccttagacaacatgaaagaactcacaatggagagaaaccatatgaatgtcatctatgtggaaaagccttctctcattgttctcaccttagacaacatgagcgaagtcacaatggagagaaaccacatggatgtcatctatgtgggaaagcattcactgaatcttctgtgcttaaacgacatgagagaattcacactggagagaaaccatatgagtgccatgtatgtgggaaagccttcactgaatcttctgacctcagacgacatgagagaactcacactggagaaaaaccatatgaatgccatctatgcggaaaagccttcaatcactcttctgtccttagacgacatgagagaactcacactggagagaaaccatatgaatgcaatatatgtggtaaagccttcaatagaagttacaactttagacttcatagaagagttcacactggagagaaaccatatgtatgtcctctatgtgggaaagcctttagtaaattttttaaccttagacaacatgagagaactcacactaaaaaagcaatgaatatgtaa

SEQ ID NO: 10888 - DNA, 1699 bp, Homo sapiens
  SIMILAR (652)..(1014): 341254mologous to Caenorhabditis elegans collagen,accession number M25479,Smith-Waterman Score=92.
tagtcacaaggactgtgactaaggctcagtccctgaggagtgccttggcatgggctgctttaggctgtaaacacccagttttatccactttatgtgaagaaagccaacaaggggcatggagtgagttccgcaggttttagcggctgcggcggctggtgctcagtggggatgatggagggaaggcgcctccctctgcgggccccgaggtctgtgcgggaatcagctctgcagctgtgtccagggggagccgtagaccacacacggcaggctcacagctctgttccatgagaactttatacacaaaagcagacgggctgggcttggcctctggatcataatctgctgacccctccctcctctctgttttctcctcactctcctgccccacctcgacatccacagcgaggcaatgaagaagcccctgccaaggaagagcccgcttctcagtgggacaccgggaaggtagacacccaacagtcaccgctagtgggaggcgattgtgcagaagcacgagggttgttacaggatcgggcaggtcccctaccccagtctcggactcagggtcctgtctgaggcggccaccccgaagcgtggggtttgcggagacgtagggccgacctcccgcccccgctgcgcgcgtttctggccctgccagtgtctccgccggttgaaagcgcgtgtctgcgtcgggttctgttggagtgcgttcgatgcgccgtgggtccgcgctgcttccacccaacttccagcagcaaacatccaggaacccagaaaccatcagcacaggtgcctgctgagtcccatagacccaataatggcccaccaggaccaaccaggaagcaagtgtggagctgggagtgagggagctgggtgtggagatcagggggaagactgtcatctgaccagtgccccacagcaggaccacgagcagggccaaggtgtctccaaggtgctgaggagctgagcgctcagccagcccacggccacgatggtgtgccgccgaagccacgcggcttacttcacagccaggatccgggatcaggctatgtcccatgcagccatgctgcttccatgttttttcagggatttccaacacagattttcctgagtaccctggattaatctccttttggataggtccatgggggccctgctgctttttccccttagcccatggctctctgggctgatggcagggcccggcacaaggtaggaactgagtgtgagtgcgggatgcacccaggtctgaaatgctcaggaaggacccttggttctcagacgatgcttgcaacaacgccatgcgattcgcccacttgaatttgaataagaacgggctcaggtcagtgattatcgctagtgccttatcaacgccctgtggcttttcagcattagtccccatatcctcgtccgttgtggcactgagagcagctaactgttgccctcgttggttcccagttggcttccgtgactggtcagggtcaggtccactgccaacaggctggtgttgaatcccttcctgcctcaagcccctctcccacgtggtccagtcaccattctccacagagactaccctaaaacccagcgactctcgtgtgcctgcagaatggcacagcccgttctcatagcagcactcctgtttaatcagagggatgttaacgaccaagtcatatttgctcgatttgtgttcaatatatttcat

SEQ ID NO: 10889 - DNA, 992 bp, Homo sapiens
  SIMILAR (1172)..(1879): 971254mologous to Cloning vector pZC320 SopB,accession number U26464,Smith-Waterman Score=1142.
ccatgaaagacttctgaatccaggaagagaaactgactgggcaacatgttattcagagacagcgtcttgctctgttgcttaggctacagtacagtgacatgatcatggttcactgtagcctcaaactcctgggctcaagtggttctctcacttcagtctcccaagtagctgggactacagacatgtgccaccatgtccagaaacaggaccttgccctgtcactcaggatggagttcagtggtcctatcatggctcattatagcctcaaactcccaggctcaagcaatcctaccatgtcagccttcccagtagctgggactacaggtgggaacatccagttgcaggaaaacaagcttaacacgcccactgattctacattatggaagttgggtggaagcagcgcggacccacggcgcaccgaacgcactccaacagaacccgacgcagacacgcgctttcaaccggcggagacactggcagggccaaaaacgcgcgcagcgggggcgggaggtcggccctacgtctccgcaaaccccacgcttcggggtggccgcctcagacaggaccctgagtccgagactggggtaggggacgtgcccgatcctgtaacaaccctcgtgcttctgcacaatcgcctcccactagcggtgactgttgggtgtctaccttcccggtgtcccactgagaagcgggctcttccttggcaggggcttcttcattgcctcgctgtggatgtcgaggtggggcaggagagtgaggagaaaacagagaggagggaggggtcagcaaattatgatccagaggccaagcccagcccgtctgcttttgtgtataaagttctcatggaacacagctgtgagcctgccgtgtgtggtctacggctccccctggacacagctgcagagctgattcccgcacagacctcggggcccgcagagggaggcgccttccctccatcatccccactgagcaccagccgccgcagccgctaa

SEQ ID NO: 10890 - DNA, 2079 bp, Homo sapiens
  SIMILAR (57)..(470): 251254mologous to Caenorhabditis elegans contains a valine and arginine rich domain, possesses weak similarity with the RNA binding domains from RNA splicing factor U2AF 65 KD subunit, accession number Z36948,Smith-Waterman Score=170.
atggcctgcaatgaatacaaacaactccaaaaggaagacgcactaaaccatgtcacaggcagaagcggacaatcgtcacaccacgccaaagcaccccaaggagcaatagaggcaaagacaccagatcaaaacagcgagatgaaacaacagaataaacaacgcgcgcccaagacaccaacaaagagggcgcaacacaagacagaaccgaaacagccagaagaacacagagcaacatggagaaagaaaagccaaaccaacacaatcgcaaaagaaaggaccgagacagcagaaaagacaaaggacacgagagagagaccaaaaacacggaaagaaacagaacgaaaaggagagaaaaaagaaaagacaacaaacacaacgaggcgaaatcgcagagacagacaagaaagaaaaaagagacaaaagaaacagcgacaaggaaaagagaagagccttcaaacagctgctccatgcatcctttccagatttcatggttgcattcagtgggagataacggtagacgggatcagctactgtgccaaggatttcacctgtattatctcatgtgtttcccacagtaatcctatcaactcaggtgttgttatcctcatttttcagatgaggaaacagccctgtcaatcagcaggactggcggtggcactgattagatatgactgccgaagccgatcccttcagaagagaccaatgctaaaggaaagttacatcaatcgtacactgcccgcgttttccgcgacgcctccagatcttgatggtctttccctagcaccaagcaagaagtacgaccggccgctgttcatcaactctgatgtccgagggaagcaccaccggccgtattactggagaccatcgaaattatccgaaggcaaacccctaaaaaggggggaaaaaaaagaaagcccctcgccgaatgtcttgcccaccaaaggaagtccaagagaaccgcgtgaaggacctcgggccgcgcaatcttgccctaaatcgagacctttaaagagaagaattaataagggcggaaaagaacgcgctttgggagctaccttcatcgcagatcacccaagtcaaagctccagagacctcgatgctcttagtgtgtaccagatggagaactatagtcacgtcatagctcctgaatactcgaggatatcgggtgcctgtgttcgtctttttatggggtgtcatggagctcgaagctatgggttttaccaaaacggggaaataagtggccccaaccaagggtggtggtccaaggcccaaaatggcccaaccaaggcccagggccaacttattgttcaaaaatactttccccttaaagagaaacccagaatgtgtgctacgtctcgggtgtgggtgtgggtgctactattgtcctcttcctcttccgattgtttgtcttctggccacgtcccgccccttgtgggcccctccgtcgtctatgtggtgggtctccacatggcctcttcgttgtcctctcccgtggcattcttgcttgcccgtgtctttttatacgcgctttacacagggactttaggtatacatctctccacacttgatagcggaccccatgggcccaaacccccccatcacagtcaagtcgtcaaagaaacgtctcgcgtgtctcacgaactcgtgcattcgggcactaccataactgtgcgatgcgcttatttgtcctcacgaagtaggagaaaacactcctatttacgaagcccctctatcgccttgccacatacgcccgttcactacccaccatgtgtccacctaagccagcgacattcctcctcccactttagccgcattaaaacctctcatgaggtaatattccgttatagtacacccactacgcagctctcttatgcgatgcgcttaagagtttcgaccatggggagaatctctaaactggggtacgacaaccaagtgttatgtcccataaaagcagtggaacgatcagagactctggcagagatcatacgacgactcaaggttgactactatggcatattgtcccgacatgcacaacatgagcgaatgacagtccgggcgtctcaatgcgaaactaagtga

SEQ ID NO: 10891 - DNA, 369 bp, Homo sapiens
  SIMILAR (47)..(184): 1001254mologous to Homo sapiens Ig lambda-like gene/beta- glucuronidase exon 11 homolog,accession number S82637,Smith- Waterman Score=247.
ggacattgaccccactggactgcagtcacaggggagtcccaaggggcaggatccacctctgatgttcagtgaagactaccagaaaagtctgctagagcagtaccatctgggtctggatcaaaaactcagaaaatacgtggttggagagctcatctggaattttgccgatttcatgactaaccagtgtcagcccaagactaccccgtcggtcattctgttcctgccgtcctgtgaggagccccaagccaacaaggccacactggtgtgtctcatgaataactttatccgggaatcttgatggtgacctggaaggcagatggtaccctcatcacccagagcgtggagaagaccacgccctccaaacagagt

SEQ ID NO: 10892 - DNA, 492 bp, Homo sapiens
  SIMILAR (7)..(417): 581254mologous to Homo sapiens omega protein,accession number M34516,Smith-Waterman Score=372.
  misc_feature (1)...(492): n = a,t,c or g
ttcggcacagggccctccgcatctcccaggacttctttccggcatcagtgtggacattgaccccactggactgcagtcacagtggactcccaaggggcaggtcagcccaagactaccccgtcggtcattctgttcctgccgtcctgtgaggagccccaagccaacaaggccacactggtgtgtctcatgaataactttatcccgggaatcttgatggtgacctggaaggcagatggtaccctcatcacccagagcgtggagaagaccacgcctccaaacagagcaacaacaagtacgtggccagcagctacctgagcctgacgcccgagcangtggaggtcccgcagaagctacagctgccaggttatgcaagaagggagcaccgtggagaagtcagtggcccctgcagaatgttcataggttccagcccccacnccaccacangggcctggagttgcangattccaggggaggggtctctctctgcatcca

SEQ ID NO: 10893 - DNA, 944 bp, Homo sapiens
  SIMILAR (119)..(460): 971254mologous to Homo sapiens omega protein,accession number M34513,Smith-Waterman Score=599.
ggccacatggactggggtgcaatgggacagctgctgccagcgagagggaccagggcaccactctctagggagcccacactgcaagtcaggccacaaggacctctgaccctgagggccgatgaggccagggacaggccaggggggccttgaggcccctggtgagccaggccccaacctcaggcagcgctggcccctgctgctgctgggtctggccgtggtaacccatggcctgctgcgcccaacagctgcatcgcagagcagggccctgggccctggagcccctggaggaagcagccggtccagcctgaggagccggtggggcaggttcctgctccagcgcggctcctggactggccccaggtgctggccccgggggtttcaatccaagcataactcagtgacgcatgtgtttggcagcgggacccagctcaccgttttaagtcagccccaagacttaccccgtcggtcattctgttcctgccgtcctgtgaggagccccatagccaacaaggcccacactggtgtgtctcatgaatgacttttatccgggaatcttgacggtgacctggaaggcagatggtacccccatcacccacgagcgtggagaagaccacgccctccaaacagagcaacaacaagtacgtggccagcagcttaccttgagcctgacgcccgagcagtggaggtcccgcagaagctacagctgccaggttatgcaagaagggagcaccgtggagaagtcgagtggcccctgcagaatgttcataggttcccagcccccaccccaacgcacaggggcctggagctgcaggatcccaggggaggggtctctctctgcatcccaagccattcagcccttctcgctgtacccagtaaaccctcaataaataccctctttgtcaaccaaaaaaaaaaaaaaaaaaaaaaaaaagtcgtatcgatgt

SEQ ID NO: 10894 - DNA, 779 bp, Homo sapiens
  SIMILAR (4)..(342): 941254mologous to Homo sapiens serologically defined breast cancer antigen NY-BR-81,accession number AF308297,Smith-Waterman Score=537.
gggtccgctgcagggcaggttcagcagcaacagcagcggcgacaccagcagggaaaagtgacagtgaaatacgatcgtaaggagcttcggaagcggctggtgctggaggaatggatcgtggagcagctgggtcagctctacggctgcgaggaagaagaaatgccagaggtagaaattgacattgatgatcttcttgatgcagacagtgatgaagagagagcttcaaaattacaggaagctcttgtagactgctacaaaccaacagaggaatttatcaaagagctgctttctcggataagaggcatgagggaaaactgagcccctccgccgaagaagagtgtatgattctggaacagggtgaaactctcccagagacgaagaaagagtcctgggatttgtacttcatgaagacttttgtgaaagaataggtgtccttatgaacaacgtttttgtttttttttttttcttttttggtgtgaaggtgggggggtctattagacatttattcaagagcgttctttttttggttttaaaggttttggtaaagggaatatttaaataccaaaaatatcttgactttagccacagcctacccagggtttatcaagggagggggaccctcagggaagggcccccccaggttgcgtttcctgcagggactcaaatgttaattcccttatgatcccggaaaaatagtttttttacaagaagttgggcaaaatttttttcctaaagttggacattggactcaattggcaaatttttcaacctggtatttt

SEQ ID NO: 10895 - DNA, 518 bp, Homo sapiens
  SIMILAR (4634)..(6805): 941254mologous to Homo sapiens putative p150,accession number U93563,Smith-Waterman Score=3540.
ggaccatgaataatatgagaggacagattttgctcttgttcctcttgatttggctttggaacagatatgggcaattagtgggatcgtctgaaaagcacaagattgcaagtcagttggaactgattcaatctcaattccactactgtgtgaccttggacaagttgcttaacttctctgagcctgtccatgtaaaacaagagcaactgctttcagtgtgtagtgagaaggaagtaacagaggtgaaggtgctggcacttgtaaatcatgttggcagcaagtgttgcttcctaattttttgttctggcccaagttgacccaagttttcagtctcccaagtcttttctgactaaccaatggttcaaagtctgcttattttccactgcatccatttgagagcaggagttgggtccttctcattgctctgttcttagtttctataacaacacctggtgctgggaggtgttcataaagttctgttcaatttatccgaacctctgtgaccagtccacgaaacacgt

SEQ ID NO: 10896 - DNA, 1383 bp, Homo sapiens
  SIMILAR (931)..(1284): 341254mologous to cercopithicine herpesvirus 15 EBNA2-like protein,accession number AF200187,Smith-Waterman Score=84.
tcagacccaaacagctgtgttaatatcaaatcctgagggtgagtgctccagggccttggggcagcttgtggggggattctcccctcgcctgtgctccccggtgcctgggaaggggaaatgtccagagcccttggaaaggctccgcttcttgaccttctgtgagcggccggttcgggactcagggaccatgggtgtcacccagcctggcttctccttcagcagccggtcacggtcaggccgcacactacgcaagaacttcttaaagatgtttgctgtcagggcaaacctgcggcccagctcctggggctggcctttctctcctttgggttcacgtgcccccccagtctcacccttctccccacccttctccagttctggcaagtctagccaattgcccaccaggtctgcaaaaacgttgtcccctaacaccagaggctgtcgattccggccccgggacatcaacgtggaggtccagtcatccggttccactcgctctggcccctgctgagcacagctttgatgtggctgtgtcctgggcaagggggctaaatcccttccacagacactcctatgggatggaaacttggtgctgctgccaagagaaggttgactggagggggaacagactgtgggcctggcaggacctctgccaccctcccaacaagggtgctcgcactgggtcctgggaccttcagggctgcctggcacaggaccccctccagagatctccagctgttccagtgctgtctgcacctggaggagcttcagttcttgcagtgcacccatcatgcagttcatctgatcctgtaagccatcacccacctccttcatggacatcagctcctgtttgaggcgacggagatagcagtccatttccctgctctccatcgtcatgcgcccatttgtcgggttcggttcaaacagagagggcccgggtgaaaccccggccccactggaaactgcgctccgggccggctccccgcccctgcgcccgtagcgctcgcagcgcggagctgagcctgcgctccgagcccgggactcagagtcgcttccccagcggctagccgcgcgcggtcggtgctgggtcagcaaaaccagccccgtgccctctgcacagaagcagaatggtgcagacatctctgtcctcctcagcacgcgctgtgaccccacgcccagggctgcaccttctctcagggactgtggagcccagagcatctgtaacaccgcgatgatgatcctcttctctcccctgcaaggcaggtgcagagtgcggaggcagtcccttgggtattcatcagggagggtctccgtccaggtctgctcgccatccttctccatcctggcttctggctgggtttggccagtgggggtcctggcaagagc

SEQ ID NO: 10897 - DNA, 402 bp, Homo sapiens
  SIMILAR (51)..(380): 941254mologous to Homo sapiens ras-related protein,accession number M22995,Smith-Waterman Score=517.
ggaggatgcgccggaccggggggatcgtcagtatttaaacagatcacatcatgcgtgagtacaagctagtggtccttggttcaggaggcgttgggaagtctgctctgacagttcagtttgttcagggaatttttgttgaaaaatatgacccaacgatagaagattcctacagaaagcaagttgaagtcgattgccaacagtgtatgctcgaaatcctggatactgcagggacagagcaatttacagcaatgagggatttgtatatgaagaacggccaaggttttgcactagtatattctattacaggtcagtccacgtttaacgacttacaggacctgagggaacagattttacggggttaaaggacacgggaagatgtttccaatgattttggttggcaat

SEQ ID NO: 10898 - DNA, 3532 bp, Homo sapiens
  SIMILAR (414)..(2993): 981254mologous to Homo sapiens putative p150,accession number U93563,Smith-Waterman Score=4389.
cctaactgtaactgattaatataatacaagaagaattttgacatttccttgctttcagtaaaatgtgaaacttgtacacacatgcttacaagtagttccttatgatgttaaaatttgatctgtagatctctttttttgatagattttaatttgtgagcaggttttgtcatctgagtaggttttacagctcagtccacgtttaacgacttacaggacctgagggaacagattttacgggttaaggacacggaagatgtaagtattttttctctctgtaagatgttatgccatctctctgtggccaaataaaaaagtgcctgttttcagaatttagcaagacagtggtgtaactgtgcctttttagaatcttctgcaaagtcaaagatcaatgttaatgaggtaacctacaactgctgggcagcacaaacaagtgcctttttagtttgctttaagttaacagccagacttcttgcccttagcatcactaatgtctccagttgcacaggttggggagttcaacgcagccaccaggatcaagggaactctaagcatgcagcctcctcagtttggaaagtaggatttggaatagtgagactaggcactgggacctgcctgtcttccttggagaggggatacatgtgcatggagaaagagatgtttgatccttatactcccagcagggtcctgaagcccaggtcagaagctttggaattatttgggcccttgaaatcactgacataaagtctaactgggatatgaattttaaagggatcgaggaagaaagggaaaaacgtggaggatagggtaaaggtgacttcctctggaatggaaattgggacccacttgggattgagtagacgtgggaattgcctgagccaggtcatggtgggtggaggcgagttgggaacaagattgggtgggggtgtagagctcacaggagctggtttttggcagtgtttctggtatgtccctgtaaagggccagtcatcttgaaggacatgcccagaggggcatataggtgaataggttctgcttcacagattcctcccaccccatcaggagggaatggatttttaggaggacagccacagcacctttccatgaataatatgagaggacagattttgctcttgttcctcttgatttggctttggaacagatatggacaattagtgggatcgtctgaaaagcacaagattgcaagtcagttggaactgattcaatctcaattccactacctgtgtgaccttgaccaagttgcttaacttctctgagcctgtccatgtaaaacaagagcaactgctttcagtgtgtagtgagaaggaagtaacagaggtgaaaggtgctggcacttgtaaatcatgttggcagcaagtgttgcttcctaattttttgttctggcccaagggtgggaaggaatcctgcctctaattgcagctgtcacaccccatcaggctgagggacaatcagtgggaggcgctttctgggggaaaggaacttggagttgggctttcgagagccataccgcccaccctccctcctccccaggggcccagcactgggacctggccctttcaggctcagtcaactttctgtctctaggattcagacccaaacagctgtgttaatatcaaatcctgagggtgagtgctccagggccttggggcagcttgtggggggattctcccctcgcctgtgctccccggtgcctgggaaggggaaatgtccagagcccttggaaaggctccgcttcttgaccttctgtgagcggccggttcgggactcagggaccatgggtgtcacccagcctggcttctccttcagcagccggtcacggtcaggccgcacactacgcaagaacttcttaaagatgtttgctgtcagggcgaacctgcggcccagctcctggggctggcctttctctcctttgggttcacgtgcccccccagtctcacccttctccccacccttctccagttctggcaagtctagccaattgcccaccaattccggccccgggacatcaacgtggaggtccagtcatccggttccactcgctctggcccctgctgagcacagctttgatgtggctgtgtcctgggcaagggggctaaatcccttccacagacactcctatgggatggaaacttggtgctgctgccaagagaaggttgactggagggggaacagactgtgggcctggcaggacctctgccaccctcccaacaagggtgctcgcactgggtcctgggaccttcagggctgcctggcacaggaccccctccagagatctccagctgttccagtgctgtctgcacctggaggagcttcagttcttgcagtgcacccatcatgcagttcatctgatcctgtaagccatcacccacctccttcatggacatctgcaggggagagagaaagcatggggcctatgagccacaggcctggggtttcctgcaattgctgttcatatctgactggtcagaagggagacaaggaggccaggaaccctctcaggcttctgggtcaaatcctccccctgccaaccctggccctgggggggatgggagattccagccaggctctcaatgagccagcagaagcagcactaaaggacagtggaggactgactgcccttgagggcaaggaggcctttgctggggcgtggagattgcccacgctctgtgcactttccccaagacaggcaagaagaaatggtggttccaggccctgacagccctgggatttgccagagttttcaccagttgaatggggggcagtggcaggcacacacctcctgtcatctccgtggctctccaatgcccagactcaaatccaaactatttggtcatgcagtcaagatcctccaggacagaattccaactttcagttccaggaatatccctactccctgagacgtaccccccatgctcctgttagaaatcttctgtgatatttaatatactcttccctgtagtcctgccactggaaacgctgtcacagaatctggagagccataagctggccctttctagatccaggcctgctgttgtgtggcctgagtgcccctggctctgtaaagtaagaagaaagaggagagcagaaaagtgagactgagaagagtcgactccaagagagacaaactaaaaggacaaaaagagacgagggcaaagacacaacagagagcctagtggaaggagagatgggcaaagcagagatggggctgtatgtgcataacatttgcctgaattccggtgggtgaaggaataagaaaggtggcaggtggcgtgggggcgggggcagtggtatatgaagccagtgagcagccccctccctgctggcagacaagcccaggcagacagccggccaagcctgcccccgcagccgcgccagctctgccaagcccggcagagctgggggcccagggtggtacccgcttccctcgagcgagcagtcccgctgacctcgtgcccgcgcagggatcaggacccagcaccctcctcctccccgcgctccaggtcgccccgcgcag

SEQ ID NO: 10899 - DNA, 1998 bp, Homo sapiens
  SIMILAR (1039)..(2268): 961254mologous to Homo sapiens unknown,accession number AF149422,Smith-Waterman Score=2099.
tcacatactccctgctccctggtgatcagaagtgtctggtttgcttggctgcccatttgcctcttgagtgggcagccctgggcttgggcccctccctccggccctcagtgttggctctgcagaagctctggggttcccttcaagtgcacgaggggttaggctgctgtccctgagtcctccattctgtactggggggctggctaggacctggggctgtggcctctcagggggcagcctctccatggcaggcatccctgccttgggctgccctcccccagacccctgaccaccccctgggtcctgtcccccaccagagccccagctcctgtctgtgggggagccatcacggtgttcgtgcagtccatagcgcttctcaatgtgtgtcacccggaacctgcccacagagaacacagtggtctcccctgtccgggggcggctttttccttccttggagcgtccctgacggacaagtggaggcctcttgctgcggctgcaatggaggcaaggggctgcagagcccaggtgcactgtgtgatgatgggagggggctccgtcctgcaggctggaggtggcatccacactggacagctgcactgtcccttctccttcactgtcccccagcatctccttcaaggcctcagcattggcttcattctggatgatgcagcgaacaatcctctctactgtgtcctcattcatgtcatcgtcctcagatgaagggctctcgcgttccccaaccggcctcccctcgctgtctccccgggggacctcctgagctccctcagcttgttttttctctattccctctggcgtctctgctttttccgttagttttcccttgttcttgtccttgttgcgcttcttgtccccttcagtgtattgttcgacgtcttcttgctctgtctcctgcttgtgtgagtggttgtggttccggggtatgtttgatattttcgtttcctttgtgtgatcttttgctctttcctcctccgttgtctggtttcccgagtcctgctctaccctatgctgatagctgaaataccacgtgtgcagggcaggggagggccctcgtggccagggcttgggggcaggctcctcaaagagctctcccgtctcctcacattcctcaaagtcagaaagctcagcatcctcagcggttggagagaggtccctctgggacagccgagcctcactgagccgccgctcctgctccacctcatcctgggcctgggtcatggctggcttcagccagcgctccacatctaagccagccccctgcagcagggccagccgggcagcccccttcacctggctcacctgtgcccggcggatgctctctcgcacttcctgtaacctctgttctatgcttggagcctcccgctctgaagcctgctgccgcctctgctccagtcgttgcagtacattgagaagcgctatggactgcacgaacaccgtgatggctcccccacagacaggagctggggctctgactatctcatactcccaagacactcggtgtccagcttcaggctctgcacactgcttgcagatgaccacccccaaattgacagcagcccaatctgggcgggaggacccacagtccgcacactgccggttggcccgattagaccagatcttctcagccacctcgtagtcagacagggtctcggttactgcttcctgcagagcggccgcccagctctgaagcagcgatggggtgtgaagcaggtcaaagcttcgactcttggtctcccggacgctgcagccctgcagttcgatgaagcagatcccgatgcccagagagaaggcttggtcagcctgctcccctctgctggttggtttcaggacatatgagacatcgctgtcaaccttcaccgtataagtctctttcatcttgcttcgcccatagtcgccatatgtttgcaagtgagctgccagcgcaacatcgcaagcgcggcgaccaataggtgattgcttactgcgattaatcagcttcatcat

SEQ ID NO: 10900 - DNA, 820 bp, Homo sapiens
  SIMILAR (158)..(33): 951254mologous to Homo sapiens Human transmembrane protein HTMPN-35,accession number Y57911,Smith-Waterman Score=228.
accgcgctgcaggaattcggcacgaggtcaggcatccctgccttgggctgccctcccccagacccctgaccaccccctgggtcctgtcccccaccagagccccagctcctgtctgtgggggagccatcacggtgttcgtgcagtccatagcgcttctcagatgtgatgtcacccggaacctgggaggggagggaacactggggtttaggaccacaactcagaggctgcttggccctcccctctgaccagggacatcctgagtttggtaggcatttccctctggcctaaggtaggggaggccttctcagattgtggggcacattgtgtagcctgacttctgccggagctcccagtccaggaggaaagagccaaggcccacgttttgggatcaggtgcctgatcactgggccccctaccttcagcccccctttccctggagcacctgccccacctgcccacagagaacacagtggtctcccctgtccgggggcggctttttcccttccttggagcgttccctgacggacaagtggaggcctcttgctgcggctgcaattggaggcaaggggctgcagagcccaagttgcactgtgtgatgatgggagggggctccgtcctgcaggctggaggtggcatccacactggacagcagggaggaggggagtgagggtaacatttccatttcccttcatgttttgtttcttacgttctttcagcatgctccttaaaaccccagaagccccaatttccccaagccccattttttcttgtctttatctaataaactcaatacttaagatgttaaaaaaaaaaaaaaaaa

SEQ ID NO: 10901 - DNA, 461 bp, Homo sapiens; identical to SEQ ID NO: 1411
  SIMILAR (239)..(460): 1001254mologous to Homo sapiens bG115G20.2 (novel protein),accession number AL078645,Smith-Waterman Score=378.

SEQ ID NO: 10902 - DNA, 2137 bp, Homo sapiens
  SIMILAR (1)..(1755): 911254mologous to Homo sapiens putative p150,accession number U93572,Smith-Waterman Score=2740.
  misc_feature (1)...(2137): n = a,t,c or g
cggccgctgcttctttcaactttatgttgggagctgcgcgccgcgctcagttactggagagctggccgcgcgccgccgcctcccgcacgcttgcacgcgggcccggcttcggggttttgggttcttactccaagcggcggggaggagggggagccccggacacacttgtggggaggaggaggaagaagaggaggagggaggaagaaaaaagactgaggaggacaggggcggggggcgggaggctttgccaccttcagcccccccgcgaacgccccaaggttgcacacatctttgaccaactcatcagcaaggtggatttttctttgtgtttaaagaaaaaaaatgtccctattgtctgtaaaagatgattttgcagttcaancccggcttgaagctggaccgaattgagactattgggctggtgctcccgccaagcatgtttgccactacttcaaaattgaagaggaagccccagaaaagggaaaaacttaccagaacggagatgtgtttggcgatgaagtataggattcaaaccagtggaagaggtccaaatacatgaaaaatggggcagaagaagagcagaaaataggcagccaggggaccaaggaaaacttggaaaaaagtgcccagctcaaatgtaagactttaaaactaataaagaggttccgggattagttcatcaacccagaagcaaacatgcacatctctgaaagccaacaagaattcttcagaatgctggatgaaaaaattgaaaagggtcgggattactgttcggaagaagaggatatcacatagcaccaattttaccactcaaaccaggagctactactgtgtaaataggttacaccccagttgaaatctttgcaaaggtcggttctattcagcgaacagcactatagcaaaagaagatcgttccatattgtacgccccattaaattacagtgtttcttaatgaacttgcaaaggaatattgctaaaaacaaacaaaaaaaactgttatcgaactttctttgttgctgctaagttaaaacttgttgcaacttttcacttctcttgtgtccaggtatgcagcaaaattctgcaatttcaccttaaagatactgttgggttttacagatggctctccaacctattttcctataaggatgagggtagtggtgaactcagataacaaacgttctcttctaaactggttctgcttctaagacaagcatctcctgccctctctccttcctccccatctctcgcacgcagtctagagatggacctgagccttgcttcctcactggcagtgttgagctttggagatgggatggttgctatgccaagccttgtttctctgctcagaagaagtagagaagctattatcaattaaaagcatgctgtgatgtgactcctgggaagtgacgtaggagtgagtggcaggttgtttgatttaataggtatcttaatcaagaattaagcttgcaacattggctttgcttcagatgcagatgggaagtgttgatccacaatcattttgaatccctcttcctcacttttttttctaaggaaattaaacattttactgtttttatggatccttgtcttctcccattcatccagctcagtgttttaagatgatcctgggtgcagaagttgagccctcctttgcattgacactgataattagcctatagggctccctacccttccattaagaatctaccaagcattagcaaggctgaaagtggtttaaaaggtgaggggacatcctatgactttttaggaaggcctgaaaccaccttgttacctttcattttgttagcaaataaaccatcctattttgtaactcacaccccttcaaaatgctacatgagccttgccacttcctttttctcttacttccagcacactagacatagcaaaagtgtttgcctactcaaaaacataatacttttatgctgatgatgggtatttgggagatgtgaaagccaaaagcccctgggagtgggtgggggaatgttgacttgagtgttccagcaggagtttatttttccatactattatggaagagaatgacctcttctccaaagacaggaagtgatatttttaaccaaatattgtcacaagtaaatagcaatcaaaaggaaaaaaa

SEQ ID NO: 10903 - DNA, 1026 bp, Homo sapiens
  SIMILAR (16)..(633): 771254mologous to Homo sapiens zinc finger protein,accession number L11672,Smith-Waterman Score=887.
taattcccacgagctggagagaaaccctacacatgtgaagaaagtggcagagcttttaaccaatcctgaacccttactacacatatgacaattcatgctggatagaaaccttacaaatgtgaagaatgtggcaaagctttttaccgattctcataccttactaaacatatgataattcatactggagagacattctacaaatgtgaagaatgtggcagaggctttaattggtcctcgacccttactaaacataatagaattcatactggagagaaaccctacaaatgtgaacaatgtggcaaagctcttaatgagtcctcaaaccttactgcacataagataattcatactggagagaaaccctacaaatgtgaagaatgtggcaaagcctttaaccggtccccaaaacttactgcacataaggtaattcattctggagagaaaccctacaaatgtgaagaatgtggcaaagcttttagccagtcatcaatccttactacacataagagaattcacactggagagaaaccctacaaatgtgaagaatgtggcaaagcttttaaccgatcctcaaatcttactaaacataagataattcatacaggagagaaatcttacaaatgtgaagaatgtggaatctgccgcacgccgaaaatggcggtgttcagccaatgccaccaggtactcaagatcacgaatattcattatccatcctccatcgccacgatagttcatggcgatagagcacaatcgcacgtcgatatatgcacacttggcgacaaggcgagcggtgctatcatcggtactgccttttatacaacgcagtgtgagcaacgagcctacaacgagacggcggtctcgcggtacactatctctcggccgccatcacatcatggaggagattcagaaacaactgagttttcgccagccattgggcgctgtaatggagtacataagtcatggggatccaacaggtgctcggaccgctggagatctaaacccctcttggcccgttctgtttcttaa

SEQ ID NO: 10904 - DNA, 359 bp, Homo sapiens
  SIMILAR (1)..(135): 911254mologous to Homo sapiens hRXR-beta2,accession number R39469,Smith-Waterman Score=209.
ggcacgagggagggggctgggggagcccccgaggagatgcctgtggacaggatcctggaggcagagcttgctgtggaacaaaacagtgaccagggcgttgagggtcctgggggaaccgggggtagcggcagcaacgagagtgttggggtcaatccactctccttcgtgatgggggttgggggaggcagtctaggtctgttctacatcccctccccctcctttcccctcataaccttcctaacactacttgggactggaggtgctgccaaacaaggtctttcaaacatctgaggtggatgtgatagctccttctgtctccactccccaaacaacccactggcagaaccataggcatgtcc

SEQ ID NO: 10905 - DNA, 2672 bp, Homo sapiens
  SIMILAR (1)..(1593): 831254mologous to Homo sapiens putative p150,accession number U93563,Smith-Waterman Score=2205.
atgtcttgggccgctcgcccgcccttcctccctcagcggcatgccgcagggcagtgtgggccggtgggggtgcgaaaagaaatgcattgtggggtcgcgtcccggtggcggcggcgacggccctggctggatcccgcagcggcggcggcggcggcggtggcaggcggagaacaacaaaccccggagccggagccaggggaggctggacgggacgggatgggcgacagcgggcggggtgagtgccccagcagaagggcaggcgagccagtgaccgctttatctgcgacccctcccccacctccctttccagtcatcagttcttccatggggtcccctggtctgccccctccagctcccccaggattctccgggcctgtcagcagcccccaggtgagaggttgtgaccaacttactgcctggccactttcattttcttgttttccttgtaaccccgtcttaggggtccggggcctgcactgtccaccccctccaggtggccctggggctggcaaacggctatgtgcaatctgcggggacagaagctcaggtatgtggctcagaggatgaacagagagggagagtctgggccatgtatcatcacctgtgggataagaccttacatactcttgccgggacaacaaagactgcacagtggacaagcgccagcggaaccgctgtcagtactgccgctatcagaagtgcctggccactggcatgaagagggagggtaaggacccgccctgcccaggcgtcttagaccacatgcccttctcccttatcccactcagaccccccgaggagatgcctgtggacaggatcctggaggcagagcttgctgtggaacagaagagtgaccagggcgttgagggtcctgggggaaccgggggtagcggcagcagcgtgagtgttggggtcaatccactctccttcgtgatgggggttgggggaggcagtctaggtctgtgggcgaagaggatcccacacttttcctccttgcctctggatgatcaggtcatattgctgcgggcaggtcagtgaccttggatccctttgacttcttgacatttgacccctctttgacttcccgatcttttccttgccacaggtcttcacgtgcaccgcaactcagcccattcagcaggagtaggagccatctttgatcggtcagtggccctcggctaggctggcatgtagatagagggggtggggctataggctggtccgtgcctgagggcaatcattctgtttaatccaggtaagaggaggattacctttgtctctcaaggccaaggcaaccttggagcctcctcttctccgatggagacctactgcaaacagaagtaccctgagcagcagggacggtgagatggggctggggggcactgaggctcccttgggggtggggagtgctatgaggatgtgtttctgtttttcttcaagctcattggtgacacccccatcgacaccttcctcatggagatgcttgaggctccccatcaactggcctgagctcagacccagacgtggtgcttctcacactggaggagcacacatccaagagggactccaagccctggggcagggtggggggccatgttcccagaaccttgatggggtgagaagtacagggcagaaccaagaacataaaccctccaagggatcttcttgattatcccaagtttggaagggaccccagatacctgtgaggactggatgtctctcttcggtggccttgagtctctgaatttgtcgggttctcccatgatttggggtgatttctcaccctctgtccttcccccagcacaaagcactggccttgcctccaggaccttgcttccttctcatcttgcctcaatttgcttcccatctgaagagtggaaatggggaactcccccagaggtgggatactggggggcaggcctcccaagctgatggacatgagagtagggccctggacaggcctttcctcctcttcaaacctgggcagatggggggcctcttctgggaagaggggaggggccctgttcactgtccagagtctcttttttaacactttcacctcctttttgcagttcagacttgaaatataaaaaaaggtggtggtggtggtgaaggggctggtggagatgtaggaaccgatctgctatttttaatttcctgtgaggatagagacttgcagttagactcaaagaagtactgtactttccccaggttgactaagaaatgccagtggtgaaggtggggtgtttggggaaaaggcagggccctgaaaatggcctgtcccctagggatcttccaagcaactagccttccccagcttcccagccagcccccccccatctcttccctgtctaacttggggaagggcccctgggctgtgaaggacaagggccccccacaggggaattggtttcacgagtgtagtccccggaggcccttccccttttacagctcttcctccaagcccctgggcacataagcataaggcttgggggacacaaggatcctggcctgagaattgaggggaggcggccaagcccgcccaggtggggtgctggggctgcatgatttttggccctgcgtcccttctctttggggctcctttcccctctcatacataaaatcgctttcaaattaaaatcgctgttttttggaaaaaaaaaaaaaaaaaa

SEQ ID NO: 10906 - DNA, 5239 bp, Homo sapiens
  SIMILAR (997)..(428): 671254mologous to Streptomyces noursei NysC,accession number AF263912,Smith-Waterman Score=624.
cgagtagggcagagaacagaagaccttgtctgctatggaggctggagaccgtaaccctttcaggccctgtgtaaactgggtcatgaagagcctctgcatggtaggcatgtggctggagaagctccgtttttttgtccagattcggtaacatctgttaggcctcttatcccatccactagctgccaaatatggattcagctgctctgtgctggatgaaaatccgtccaggagtcttttatatctgaggcgcttgtagcttttagccattggaagaagttcagaggaacaccgtcggtatcttagcttctgagtcttcatggctggggccagtttggaggcaaggatggacagcttgtttagtaaggctgattctttggtagtcttcctaaaattcaggctcctcaagggatggcacggtgtagacatctgctttggtatgtgactaaccaagctcttggtaggtgctgtttcaggttctaatcgtgtaggtgcagacagagtacacaaactgagaagtctgtgcgcttttgtggggatgggattggaagaactctttaaaaaggcagaacttctgattttacctatttttctcccaacaatgatttgctcctgataggaaactttcttacaagttcgatggggctgcttctttaagggaagaactcctttcttcgcaaaggcaccatgtatttgatcacacccagcagaggaggggtcttgtgctttccgaggggcaccaagaaggcaaggacttgtgcatgactcagtgtccttccttaatggatgatgtaacctttcctccttctggtcttctaacttctgagtctgtgccacaatgctgtccttggccagctttgctagggtgatttcattgatcatggtggactcatctttgtcagccttcggttggttctgattttgtgcatcatctaacaacagactagatgatatgcactgttgcgatatcgtatgtgctttttgttgacgtatatatttctcttctttctgcaacatgtagtccaaaacctcagggctctgctgtttttcagcatgattaagtatcccccggcatttaaaatgggtctgagagatgttgctcacgggatcgccatcgccagtttctctggtaaccaactcctcagattgctccccaacagttaagtaacccagtcgtcccctctgatgctcttcggtttcttctcctttcactttaatatctgttttcactgtcaaaggcaaatgtctgtcagaggaattctcgtgagggtgacaagctttgcaagcattcttttccacacaggtacatacgctgtctctgtcactagaattactccaatctcttgatactatttccttcatctcaggaaggactgtgcagtcctttacattttcacaaagcatttcaccatcttttggtttacaaagatttttcaggtcagtttcttcactgttaacattagtttctgaattttcttgagaaggcattatttcaatggatttcaggcttcttagggaaacagagctttcatcatggcaagacatcgactcttttgaggaaattccaaaggtactttctttgccaaactcagagtttggttctagtcttgatccttcagtcatttcttgtgtttctctgagagatgttcctttatcttgctgtccataatggctatcatttaaagacaaatttactctgcccaatattcttttatttggttcatgatctgcaacagactccatctcatgggcacaagagtctggacacttttccatttcacagtcttttaaagatctgcatacgttttcttcacatgatttttttattttgagaaagtccactgtagaagcagcagtaactgggaaatctgaatcctgaccagttgttcctgtatgtgcagcatccagttctctccgagacaaggtactcctggagtcctcttgaaatgccagtttctcttgccttgcaccacaatccagtagattagatgccttcacgtccagcacaccttctgcaagcttattactacagtccgtgtagacgatgtctaccataccttctgtggactcatcacaaccagacatcttgacaaaggctcctttcaaattgcatttctttggactaccacaaggtagtgagttattactgcctgagctgaccagcagatccttttggttgtggtttacctccccgtgaggctcggtgacagtctctctctggtcactacttagcatctccttggctgactgaccttcacttttgcattcatctggtctgttttggttactctgacagtcaaggacttcatctgccttctgatcgagtgtttcaactgattttacatttttaaaactggagaacataacagtaggagactggtccaacactttttcaggacctggaatgtttacagtctggtttagttcttgtatagcatgatcagagatgttatacttacaaaatacagtttctttggatacatcctgctcctttccttccagcccttcctcactgagtttgatgctactggaggtgtgaatggttttgtttgaaattccactatttaacaagcctgctaccattttgtttctgatcttatctcctggaaggctgccattcgtttctttcccatcaagttccctttcctgtgatgtgtaactcactttacagctgcttttttccacagagtgtcctgttccttggcagcagtgatcacggtgctgaaatgcattttcatattttgttatcaaagagttatcaacttgcaggctgattttgctggacttgaaagcagcagaagcagaacacatgttttcctgggatacattttttcttacacgatgacagctagagatatcctgagattgaacgctgtgacattctatgacagagaccacttgaggaaagccagctgcttctctcttatttgagcgcagcctggaatgtagagcttttgttcctgaatcagccatttccttttttctctctaggcttactggtttgatgtttaaggtgggacagtttgaagaggcaccacaggtttggttacctggtggagagatgtcttttatttttgtctgaatgggaatggtttgtatatcagcaatgacatctgctctaccctctaatggagggtgatggctctgatgggcatctctgcctgttgctaaaggcatctctttgtttaaatgcagtagagagtcagttggcaaatttgcatgttcttgagaattaagggacacttgttgatttaaaacacattcactttctactttgtttacaaccagttcattggtacaagaaagttcattcatctcacaggctatgctctgttcatctaaaagtggaatatcatcatgtgaggtctgtataactttttctgactcaggtctgtaatcaaattctggggatggtagcaacagagcagtaccttgcttgggttttaatacctcacttacaggacttatttgatcctctggcattaaactcacaatggattttctttcaaacagaaaatcattacatgatgcttcatttaactgggtgttgccttccagatttctctggatgctgactaaggagttacagtctttagtgtaaaaagatttacttaatatattgggctctacaggggttgtctgtcctgcctcttcaatctgcatcaaggaggaaaaactgctttcttcagagtgtccaccaggatggctcatattagtaaaagtttctttatggtcctcagggtttgtcaagttaccttgaacgtgtacagtaattttcaaatcatttttatttaacattacttctgtggcttcagtaaaagaattgggcattaaagaactagagttccctgtatggagactgtcttgaatgcagttattgtggatattttcctttggagaaacaacaggctctttttcaccagaacaacgaccactaatctccttttctggttccctggcattaaaaagaaaaggtccacctctttcactcctaggaatcaaaagccgttcctcattttcttctctagaagccaagttcttcccttgatcatcccccctataaaaataagaactgtctgtcttttcagcagatctctttagcaaaccaccaccttcaaaaccacagttttctaaggatattgttctggattctggaccagacaagtctgatgtgaaacatgaaacttcagaattttctttcaaagggcttgtggctgtgggactatcatgtgtagaactgggttgttcattatggtggccatgaagctgttggtgattgtcatctgcttcacagaccaggtttggtttacacaactcttccttcccattgtccacattagaaatggcactgtttcctggtaatgacaaccaaggacaactttttaattcttcacattctttttctttaggagttgcttctgttaatacagggtccacaaaggttaaaggttctggggtaactaatgtgctggtttctgaaacctcatcactggtcatgattttgtctacttcttggaattcaccgcatccagctgagagatctttactcacattgccatttttgtgtccttcattattatccgtcttagtcccattgaccttcataccttgtacttcggcggattttagcagagtttcagctgtaatctgtacatttccttctttgctccttagaaaatcttcagggaggtccacatgtgaaagttctttgctggactgcatcaggagatcctcctgactcgggctagtcttttcttcagcagctgtggaatgttgatgtggatcttcctttgctccctcagagggttctcttataattcctgcctggccccctggatctctgaagacctttggctccatgctctcgcttctttttgccctatccaagatcccagatgccacagaacctcctgctgtggagtccactagcccacatcgcccaggctcactcccatgatccaaggtctcataggtttcttcacaacaactctccacatgagtcctctgcagctccaagggcaatgccctattctgacttaaaagagagcttgaggctccaggttttacatctggaatcacacttggctcagggtcagcatgaagctctctggagacacttactgggagttcagagtataattcctgtaccacggcagacatggaggaatcaagtggaactggctgagtctctactccagatgacagcattaggacagatgcagattatggagtcaagacgaaa

SEQ ID NO: 10907 - DNA, 1089 bp, Homo sapiens
  SIMILAR (807)..(2273): 701254mologous to multiple sclerosis associated retrovirus polyprotein,accession number AF009668,Smith-Waterman Score=1747.
tcaccgcatagctttcatagcacgcttgcctgataggcggagggtattcgtacgattcaaggaactgaaaatatattctgtaaagtagtctggggaaggcaagtttccttgtcccagacaaacaccctggagggacaaagtaatgatcatggctgccaactgaggaagcgtactttcattagcaccttcactgctcactattccagattttttctgcagcgttttggtttccatacactggctttgagaagtgtcaaagtactgcctggtgaaagccaagatatcttctgtctcattctgtgaaaggaaagaggaatcttcatcctgcctgaggctcagtaggctgtgtaggtaaaatttatactctttattactcatgttgagctttgaagaacagatctcttcctgatgaataatgtaatagagaaggagaagagaaactctctggaccacttcttctctaagctgatcttcaaaatttcctccagctattagtaatagtgcatctggttcaaagcactgaccccattctatttcactaaccagattgcaatctccttgcattccgtttctcctccgtgggcacccagttttctccaacaatgttttgatgaggcttcttgagtggttgtggggtgggtggtcaccagcagagagaacctgtagcaggtctgccggttggcctgaactcccacggcttctgctatcctgggctgagggtttgtctgtctcagtagaaaaaacacggctgagtagaagaaacaatggcacccaggatactgagagctttgtccggaagcacatttccacgcttcctccaccttgagtctgtcttggatggaggtgagtgtgttgccgtttatggggtaaacttgtaaccaaaggaatttcgggaaggtctgcagcttcactcctgaagccagcaagaccatgaacccaccagaaggaacaaacaactccagacgtgctgcctttaagagctataacactcaccgcgaaggtctgcagcttcactcctgaagtcagcgagaccacgaacccaccagaaggaagaaactccggacatatctgaacatcgcaagggtccat

SEQ ID NO: 10908 - DNA, 525 bp, Homo sapiens
  SIMILAR (451)..(636): 1001254mologous to Homo sapiens HLA-C specific activatory NK receptor,accession number X98858,Smith-Waterman Score=326.
tcaggatactccccactgggttccaccattccagaaaaagctgtgttcattggacagccagtctaatctctcctcttcctcctggaagtcacaagtactctcccctacttcccttaaactcacccacatttcatgaagatctgcagcttcactcctgaagccagggagaccaggaacccaccagaaggaaccagcaactccagacatgctgcctttaagagctgtaacactcactgcgaaggtctgcagcttcactcctgaggccagcgagagggaaggatgagactttttattctctttgatggagaagcagagatttcctgttgagtgtttaggtgggtgtttaagttcaatttccaccaaaagcagagcccaagtgagggaccatcgtggagcatgaaagtccaagatcaaggtgtgggcagggctggttcctcccaaagcctctctcatgggcttgtagatgccatcttctccatatgttctcatgtggtcatccctctgtgtgcatgtgtgtgtcctcat

SEQ ID NO: 10909 - DNA, 1767 bp, Homo sapiens; identical to SEQ ID NO: 609
  SIMILAR (42)..(308): 861254mologous to Homo sapiens Fragment of human secreted protein encoded by gene 11,accession number W75239,Smith-Waterman Score=425.

SEQ ID NO: 10910 - DNA, 779 bp, Homo sapiens
  SIMILAR (200)..(616): 921254mologous to Rattus norvegicus argininosuccinate synthetase,accession number M36708,Smith-Waterman Score=658.
cgaagacccaggacccagccaaagcccccaacacccctgacattctcgagatcgagttcaaaaaaggggtccctgtgaaggtgaccaacgtcaaggatggcaccacccaccagacctccttggagctcttcatgtacctgaacgaagtcgcacgcgcagcatggcgtgggccgaattgacctcggggacaaccgcttgcattggaatgaaaggccgaggtatctactacaccccaacaggcaccatcctttaccatgctcatttacacatcgaggccttcaccatggaccgggaagtgcgcacaatcatacaaggcctgggcttgaaatttgctgagctggtgtataccggtttctggcacagccctgagtgtgaattatgccgccactgcatcgccaagtcccaggagcgagtggaagggaaagtgcaggtgtccgtcctcaagggccaggtgtacatcctcggccgggagtccccactgtctctctacaatgaggagctggtgagcatgaacgtgcagggtgattatgagccaactgatgccaccgggttcatcaacatcaattccctcaggctgaaggaatatcatcgtctccagagcaaggtcactgccaaatagacccgtgtacaatgaggagctggggcctcctcaatttgcagatcccccaagtacaggcgctaattgttgtgataatttgtaattgtgacttgttctccccggctggcagcgtagtggggctgccaggccccaacttttgtccctggtcccctgaaacccg

SEQ ID NO: 10911 - DNA, 1128 bp, Homo sapiens
  SIMILAR (76)..(855): 941254mologous to Homo sapiens EF-1 alpha (aa 1- 463),accession number X03558,Smith-Waterman Score=1290.
atgttcctctgtcccccaaatcctgtggctctgacgatgatgttaaaagactactttttagagcagttttcattttaccgatacatcgatcagagagtacggagcttcccacattgcctcccgcaccccatagcaggcagaggcaccagccaggcgccatcctttacaagctgtttcagcaaaatgtccctggaggaggccatgagaaccgtcaagaagttcatggactcaggaggacgtcgaggacttggacgcagggtcttctctgctccccgtcacacagagggtggcacacccgatgggaactctcatttatcaccaaaccaaaagatggagaaactgacagagaagggctgcaagcagctacggcagggcgggctgtgtgtaagagtcagtgacagaactgtacgcagcgtgcaagagacaactgccatcactgccaccttgaagggcagcctgggcacatactgtcgagggacaaggaacttgctgacagcagaaggcttcatgccacatgcttcggtctgtatacagtccaaatccggcaaagtggcacgcaacactgtccaggggttcactgcacatggcaaagctgtcctagaggggcctggaggttcaggcagggaggtggaggcgactacatgtggacgcaggttaaaggacaaggattctgaacatgccggggctgggtcccggcaccatcagagccaagtcaccggctccctcggggaggagagagctgtgagggctgagtcaccgggggaggggccggctgaattcctccgcaggatccaaggggctgtgcagacacgggccgtgactgctgggtcctccgtggagaaaatcaataccaagttggagacctgtgactgtgacgcatcagaggaggaggtgctaggtggagacaacgtggagactgagggcagatgttggaacagtttggagggctcagaagaagagaggaaaatgagggaaagtgtggaactttctagagacttggtgaatggctttgaccaaaatgctgataatgatatggacaataaagtgcaggctgaggtggtctcagacagagatgaagaacttgttgggaactggagcaaaggtgactcttgtcatgttatgttttag

SEQ ID NO: 10912 - DNA, 1921 bp, Homo sapiens
  SIMILAR (16)..(1443): 701254mologous to Homo sapiens Elongation factor-1alpha enzyme,accession number W11237,Smith-Waterman Score=1453.
ttacaggaggccaaacgctgccttgtgagtgtggcattcctgggcacatttgccatatagcatcactgcataataacgtccaacaggagcatattgccaagacacattctctgtggctagtacttcagtcagtgaattggcattcgaaagcgtgtcgtcattagtacagacgtcagcgggtgaatgagaaagcaaagaacccgtggctgcacccctggccaagcctcttggagcccagggctgcccaggaactttgtggagcatttaggggtgtttcagtcaagttggaaacaggctggggagggatggatttgttgtgaccaggcactgtcaccacggcagcccccccggagccgtgccgggagcataaagccaccagggccgctgcgttgccactgccttgcacccccgggagcagccctcggcccgcggcaaatgccgaatgccggtgctgggaacggaagtgggaaatgacggggggtgcaggggagcggccctgactgggactgtacggggacgcatgggggtgcgggcactggaaagctgctatgggctggtctgagcctcttccctctttccgggaaatctgaggcccaccagcagcgggcagcaggtcatgggtatggtcgcggacttggaggcccaggaaggccaccaaggagcaggaagggccgtgtcctgggatcagagtgttcaccaagtcacgtcggtttgtggcggcaggagcccagcgtgccaggcacctgattatatctgcaaagacccttttttcaaataaggtcatctttacaggttctgggacacagacagatctttcctcagtctccacgttgtctccacctagcacctcctcctctgatgcgtcacagtcacaggtctccaacttggtattgattttctccacggaggacccagcagtcacggcccgtgtctgcacagccccttggatcctgcggaggaattcagccggcccctcccccggtgactcagccctcacagctctctcctccccgagggagccggtgacttggctctgatggtgccgggacccagccccggcatgttcagaatccttgtcctttaacctgcgtccacatgtagtcgcctccacctccctgcctgaacctccaggcccggtgtccacagtccttgagagcaaaggtggtcccagcagtggagcagagggcaagggtggggcatgtagagtctccagggagccactgttggttagagagggagcccgaagtgggctccggaccccagcagggacagcgtccccttccagcgggggcagccgattgatgtctcggggcattttggcagacccacctagacctgggggacagcctgatttcctgcagccatgacctacaagggtggcagctctctcaggcttgagtaaccaggacacagacctgggccatttaatgcgcaggcagccccaagtcccggcagggccagaagcagagacggcggcctctaggacagctttgccatgtgcagtgaacccctggacagtgttgcgtgccactttgccggatttggactgtatacagaccgaagcatgtggcatgaagccttctgctgtcagcaagttccttgtccctcgacagtatgtgcccaggctgcccttcaaggtggcagtgatggcagttgtctcttgcacgctgcgtacagttctgtcactgactcttacacacagcccgccctgccgtagctgcttgcagcccttctctgtcagtttctccatcttttggtttggtgataaatgagagttcccatcgggtgtgccaccctctgtgtgacggggagcagagaagaccctgcgtccaagtcctctcgccatgtgcagggcagtgggcgagtcccagccagcatgggcatcccgcatttctctgcttctgcagccctgactgaccat

SEQ ID NO: 10913 - DNA, 1008 bp, Homo sapiens
  SIMILAR (478)..(846): 1001254mologous to Homo sapiens Human normal ovarian tissue derived protein 34,accession number Y59757,Smith-Waterman Score= 631.
atgcggacgcagtgtctgctggggctgcgcacgttcgtggccttcgccgccaagctctggagcttcttcatttaccttctgcggaggcagatccgcacggtaattcagtaccaaactgttcgatatgatatcctccccttatctcctgtgtcccggaatcggctagcccaggtgaagaggaagatcctggtgctggatctggatgagacacttattcactcccaccatgatggggtcctgaggcccacagtccggcctggtacgcctcctgacttcatcctcaaggtggtaatagacaaacatcctgtccggttttttgtacataagaggccccatgtggatttcttcctggaagtgagacatttgatgttgatggaaggcctgaaggactatgccattgcctttctgaaagataactgtatgtctaaaggaatcatcaccttgtatggcatcgccctctcccccaatctatttcaggtgagccagtggtacgagctggtggtgtttacagcaagcatggagatctatggctctgctgtggcagataaactggacaatagcagaagcattcttaagaggagatattacagacagcactgcactttggagttgggcagctacatcaaggacctctctgtggtccacagtgacctctccagcattgtgatcctggataactccccaggggcttacaggagccatccagacaatgccatccccatcaaatcctggttcagtgaccccagcgacacagcccttctcaacctgctcccaatgctggatgccctcaggttcaccgctgatgttcgttccgtgctgagccgaaaccttcaccaacatcggctctgactgggacacaggcggaagcctaggagagccgaatcagtgtttgtgaagaggcaggactggccagagtgacagacatacggtgatccaggaggctcaaagagaagccaagtcagctttgttgtgatttgattttttttaaaaaactcttgtacaaaactg

SEQ ID NO: 10914 - DNA, 1246 bp, Homo sapiens
  SIMILAR (1044)..(940): 971254mologous to Homo sapiens A human glutathione-S- transferase (hGST) protein,accession number Y40864,Smith-Waterman Score=182.
  misc_feature (1)...(1246): n = a,t,c or g
gtggaattcggcggagctgggccgcgggggccccggggccggcggtgccggggtcatcgggatgatgcggacgcagtgtctgctggggctgcgcacgttcgtggccttcgccgccaagctctggagcttcttcatttaccttctgcggaggcagatccgcacggtaattcagtaccaaactgttcgatatgatatcctccccttatctcctgtgtcccggaatcggctagcccaggtgaagaggaagatcctggtgctggatctggatgagacacttattcactcccaccatgatggggtcctgaggcccacagtccggcctggtacgcctcctgacttcatcctcaaggtggtaatagacaaacatcctgtccggtttttttgtacataagaggccccatgtggatttcttcctggaagtggtgagccagtggtacgagctggtggtgtttacagcaagcatggagatctatggtctctgctgtggcagattaaactggacaatagcagaagcattcttaagaggagatattacagacagcactgcactttggagttggggcagctacatcaaggaccctctcttgtggtccacagtgacctctccaggaattgtgatcctgggataactccccaggggccttacaggagccatccagggtacgggggaaggtgacaatgccatccccatcaaatcctgggtttcagtgaccccaagccgacacagcccttctcaacctgctcccaatgctggatgccctcaggttcaccgctgatgttcgttcccgtgctgagccgaaaccttcaccaacatcggctctgggtgacagcttgcttcccccttccaccctgagttggggtggggggggaaaagggagggcgagcccttgggaatgccgtctgatgccctgtccaattgtgaggactgccttgggcaagggtctgcccctncccaaccctctctggccttgggagccctacactccacttgggagtctggatggacacatgggccaggggctttgaagcagcctcacttttaactttgtgttcacactccatggaaaccccagactgggacacaggcggaagcctaggagagccgaatcagtgtttgtgaagaggcaggactggccagagtgacagacatacggtgatccaggaggctcaaaaagaagccaagtcagctttgttgtgatttgattttttttaaaaaactcttgtacaaaactgaaaaaaaaaaaaa

SEQ ID NO: 10915 - DNA, 405 bp, Homo sapiens
  SIMILAR (184)..(369): 371254mologous to Pyrococcus horikoshii 143aa long hypothetical protein,accession number AP000005,Smith-Waterman Score =70.
cctccttgggatttctgaatataaagagcttttctcctgtgtttaatagatcaatggtttctgcccctacaatgggtacaggggccagttcgccaatgggctccagtgacaggtgtgtccaccttccttttccagagaatatcatcctctctctgagagggaaacatgtcttctttaatatgctctgctttctcttgcgggcccgcagcatcttttttaatcctctgcttatcagatctcctcgcagttagccatataaggcttgccaccagctatggtgtttcctccgcctgcccacgtcggcatgctccagctccgccatcgctctcaggtgcgtggtccacatgtctctcggtggccgaatccagcagggccagcatctgaggctgtgaaactgtggacaga

SEQ ID NO: 10916 - DNA, 744 bp, Homo sapiens
  SIMILAR (715)..(611): 601254mologous to Homo sapiens super cysteine rich protein; SCRP,accession number U63332,Smith-Waterman Score=145.
atgatgtcctttgattccatgtctcacatccaggtcatgctgttgcaagaggtcccaagttcttatcctgcgtccaagaagaatgaagcacgcagacaagtggaggtggccctggaacaccaaggaagggcctgggagagctgctgttgttcctatgagcccagctgtgggcacactgcgctgacacaatgtcatggccctcatgccgaggatgacttggaggagccaatcctgacaactgaccctgttgccagggactgcccactggaccttctgatggatgggaaaactggcgccatcatctcttctctcctgcattcaaactgcttacctgcacctttctgccaatgcagtcatgcagtcaagtggcagctgaaaacggtgcacagctgctgtcccctgggagaagtgcaaccccagcgaaggtgtgtgatagccacagccaaggaaaaaggcattggggtgaagcatcattgcaacatccacagtgacaatgtcaacagcatcatcacagcaacagtagcagcacatcagcagcaacaactgccacaaaatggcaacaacagcggtatcaaaaataatcagaacagtagtgaaaacactgtcaccaacaacagcaaaaacatcagcaaccacataatctgcagaaacagcagcaaaaatagcaagagcagtagcagcagcagcagtaacaataacaaaaacagcagcaacaccatcaacagcaataacaaggctaggtag

SEQ ID NO: 10917 - DNA, 672 bp, Homo sapiens
  SIMILAR (1)..(1857): 971254mologous to Homo sapiens ATP-binding cassette, sub- family F (GCN20), member 2,accession number BC001661,Smith-Waterman Score=3137.
atgatgtcctttgattccatgtctcacatccaggtcatgctgttgcaagaggtcccaagttcttatcctgcgtccaagaagaatgaagcacgcagacaagtggaggtggccctggaacaccaaggaagggcctgggagagctgctgttgttcctatgagcccagctgtgggcacactgcgctgacacaatgtcatggccctcatgacgaggatgacttggaggagccaatcctgacaactgaccctgttgccagggacttaacaatgccaacagcagcatcacaacatctacagaaacagtgtctagagcatcatcactacttccatagttacaacatcaacagcgatataacagtatcaagaaacaacatcagcagcatcatcacaacacctgtacatcattgcaacatccacagtgacaatgtcaacagcatcatcacagcaacagtagcagcacatcagcagcaacaactgccacaaaatggcaacaacagcggtatcaaaaataatcagaacagtagtgaaaacactgtcaccaacaacagcaaaaacatcagcaaccacataatctgcagaaacagcagcaaaaatagcaagagcagtagcagcagcagcagtaacaataacaaaaacagcagcaacaccatcaacagcaataacaaggctaggtag

SEQ ID NO: 10918 - DNA, 4407 bp, Homo sapiens
  SIMILAR (1)..(1125): 971254mologous to Mus musculus SOX-5,accession number X65657,Smith-Waterman Score=1911.
tcatcgaatccccagggccttttccaccaggtcttcagaggcctgttcctcacagaggtgaattttgtcttcgatgcacttcttcagaagctctcccttgcttttactcttggaccgtgactttctcaccttggactgttgctgcagctcaggggcagccacggcctggtccagcttcacgaactctgcttctcgccacgcagtctgaaattgctgcagcagaactcgggcccggatcttggggagggccaagctcctgtccatctgagcaaagcagccatggacctcctgcctcatcctgagcagctcctcttcagacagggagaagactgaggagcagagcttcatgaagatcaggtgctcccagcgtcgcagctctgcctgctcctctgtcacggcctcaggagcgtcatccttcagtctctgcctcacgctctggacaccctcctggtccctgtccctctcctccccctccagctgctcggcccgtgcagccatctccttgccgtgctcctccaggatctgctgcaggaagagccagggcaccccacgcttgagcagctcctgggtcatggctgagttctgcaggcgccgcagctcgtcggtggccttttcaaacagcgaaagggtcagggtcctgagatcgtccagggcggcctggtccagacgctcctgcagctcctccagggtggcaccgtgctcctccatcaggctcctcttctggtgcaggtactggccggcatcctcaaccgttcggaaggcctcgccgacggacgcctgctccctacgctgctccctgtgcttttgtagcaactctcgtcttctcttagttattaatttttggtggagctttttcttttcctgctttaagtcattgtccaacttctgcttgattgaaaagacttctgtctgagcccgctccaatagcatttccatttggtcttcatccaggtaccctgctctctcgtgcttctgaatgaggtgagtcagctgggctgcagcggtgctcagaaggccctgcacacgggtctctgatgactggaggttctggaccagatattccctgtggccaaatcttttacttagatgatacctcttactagcctggaaaaagtccattaactcttctacattctcctgtattttagaataattttgcagcagcattttagctgcctctggtttcaattcccctttgaaaatagcactttttatctgggtaaaaaagatactgtgcagttcatttctctggaaaacagccagctgtctgtgagctttggcaaagtcttcttcttgttgcaaagcgagagacttcctcaagtgctcctgttccaggccatggagggtccgcagaaggttgctgcactctacagcagacctctcaccagcacgtttcagcaactcttctgcttcctccattgccatcatctctctctggtactggttttccatcttctttcttgtttccaggtcacattcagctgtcaatgccaccatcttccgatcgtactcctcttgtatttcattttccagcaatagaaactgctttttgaaaacagcactcatttttctctctacttggggtgagaggtggccactgctggtgagatttttcagcagaagggcaatgatatccttgctgatttgtgttcgacaagcctccagatctgcatctgcccgattcagggttgcaatctccaacctctgctttctcttgcgggcccacagcatcttttctaatcctctgcttatcagatctcctcgcagtttgccatctaaggcttgccaccagctctggtgtttcctccgcctgcccacgtcggcctgctccgctccgccatcgctctcagctgcgtggtccacatgtctctcggtggccgaatccagcagggccagcagctgaggctgtgaggctgtgggcagtaccacactcaggagccggcgaagcgtggccccgggcaccatggccatcctcgccaggtacgatgccagtctcagctctttctcctcctcctcacattctgtgaggccattaggcaccaggcgagcagtgcaggctctggaaacaacagaagtgtccctaaaccagtggacaattgaagacactgtgctatacccatgccacaggataccactctcccctgcagctagcaaggcccacgggtcagctctcaggttgcgagggaaacctgctgcagggacttggaggcatttgcttccttgatgagaaagaacgggcatggtggcagttctttgacctcttccctccttgctctgaaagttattgcagctggaactgtgagaaggaaagacaccagaagcacaggaagcccatcgcaggatgcgtataaaacccgatcggtagcagacagtcaggtacatgactgcataaggctccgtgcacagcctcagggctcttctcacctggctgcacagggttgcaaaggtgtctgcctccatgttttccaacaagtcttctagcacgacactgttctgttgttcctctctcaaacactgctgatgttgctccagtaatgtctggctcttgctcagggcttggtgcaggacagtagagacctgcctttcagaatccacctccccaggttcgttcagaatcccgggcccatcggccacccactgctgccagctcgccagggcctgctgctgctgggctgcctcctgctgcaccagctggtcctccagcttcctctccaactcctggagctccctcacagcgccttcgtaggtgggtgttacttgcagaaacttcttgctaaaagcctggaatccttccgaggtcctgtttcccacagagtcccaaatggtgagaccagcaatgctgtccagcaagagcagctccgagaggttggctgacgaggttgtcttggtgttgttaacaagcagccatatgcgggctgtctgtgcttcactcgacccagacacgctgagcccaggggcctgcactggaactgtcacagccgctgggaagtctgcgctgcaggtgccagccatgaggctcaggagccagggactgcccgcggcatttttcccaccatggggaaaggatgtaactgcctgtgaaagatgctcaccagaggaaagcagggcggctgcagtcttaaagtgacagcattccactttgggccaaatcatacagggcaagtcctgccctttctttgcatttccaagggtttcctccaatctttggtgggcaatggcagtgcaggccagcagcccaggggcatcactgtgggggtggctggagttttgctgatgttttctgaattccacactgtgccttatagcctcaaattttctctgcaggcgactttccaccaagaacaccattgtgtagaggcacctactgtgccaggcactgttggaggcatttgtacaaacacaatttcgagacagtttagaggcaatgttggtagcatccagaaagagtcctaagctcatttcttctaaggcttgaagcatgctcccagggtcctcggaagacagaatgtctatcatttggtcgttaagggaaaggtcctcattcacgccatcagctgaggtgaacggcaagggttccagcttgctctcatactgccaaaccttcaggagaattgcggaaataataattgattgggccttcttgtgaattccacgtgctttaacaattcttgtccctgtgccaggtattattttcagtgctttctttgtgttatcatgaagccgatgtctggtgagcatgtttcccttcagacactgatagcgaaccatgaggaagagggcagcccaggtcagcacaagggagaggaggaaggcaatgaagaaccctgctgcgtggaggccgtggtgcggcagaacggtattttgattttcgctgaagcctccatgaggttgcctgctggcccacagtggatttgggaagtcccactgcttcctagcactgctgccataacatctgtagggcatggatcggggatttgctacctctgagggcctcagtttccccaactgtgaaatgagagtaataacaacgttcacttcataggatggttgttgaggtaaatggatcaagggctgtaaagtactcagcacagtgcctggcactgtgagggctccataaatgtcagctgttgtcgtcagcagtattattaagtccctggcaacagggtcagttgtcaggattggctcctccaagtcatcctcgtcatgagggccatgacattgtgtcagcgcagtgtgcccacagctgggctcataggaacaacagcagctctcccaggcccttccttggtgttccagggccacctccacttgtctgcgtgcttcattcttcttggacgcaggataagaacttgggacctcttgcaacagcatgacctggatgtgagacatggaatcaaaggacatcat

SEQ ID NO: 10919 - DNA, 5232 bp, Homo sapiens
  SIMILAR (1399)..(2199): 991254mologous to Homo sapiens Human secreted protein clone pm514_4 protein sequence SEQ ID NO:30,accession number Y53012,Smith -Waterman Score=1379.
atgtcggcgggcggccgtgacgaggagcggcggaagctggccgacatcatccaccactggaacgccaaccggctggacctgttcgagatcagccagccgaccgaggatttggagttccatggagtgatgagattttattttcaagataaagctgctggaaactttgcaacaaaatgtattcgggtctctagtactgccaccactcaagatgtaatcgaaacgctcgcggagaaatttcgacctgatatgcgaatgctgtcctctcccaagtattcactctatgaagtgcatgtcagcggagaaagaagattggatatagatgagaaacctctagttgtacaactgaattggaacaaagatgatcgggaaggcagatttgttcttaagaatgagaatgacgccattcctcctaaggctcaaagtaatggacctgaaaagcaggaaaaagaaggggttatccagaacttcaagagaactctctcaaagaaagaaaagaaggaaaaaaagaagagagaaaaagaggcattgcgacaggcatctgataaagatgatagacctttccaaggggaggatgttgaaaattctcgactggctgctgaggtttacaaagacatgccggaaaccagctttactcgaaccatttctaatcctgaggtggttatgaaacgacggaggcagcaaaaattggaaaagagaatgcaggaatttcggagctcagatgggcggcctgattcaggtggaacattgagaatttatgcagatagtttaaaaccaaatattccctacaagacaatcctgctgtctactacagatcctgcagactttgctgtggctgaagctttagagaagtatggtctggaaaaagaaaaccctaaggattactgcatcgcccgggttatgcttcctcctggagcccagcattctgatgaaaagggtgctaaagaaattattcttgatgatgatgagtgtcctttacaaatcttcagggaatggccaagtgacaaagggattttagtctttcagttgaagaggaggccaccagaccacatcccaaagaaaaccaagaaacacttggaaggcaagacacccaagggaaaggagagagctgacgggtctggctatggctccacccttcctccggagaagctgccctatttagtagagttaagcccagatggttctgactctagagataagccaaagctttaccgccttcagttaagtgttactgaagttgggacagaaaagttggatgacaactctatccagttgtttggcccaggaattcagccccatcactgtgaccttaccaacatggatggagtggtcactgtgacgcccagaagtatggacgcagaaacctacgtggaaggccagcgcatctcagaaaccaccatgctgcagagtggcatgaaagtgcagtttggggcgtcccatgtatttaagtttgtggaccccagtcaggatcatgctcttgcaaaaagatctgtggatggaggcctgatggttaagggcccaagacataaacctggaattgttcaggagacaacttttgatttgggaggagatattcatagtgggacagcattaccgacaagcaagagcaccactaggctggacagcgacagagtgtcgtctgcctctagcacagccgagcggggaatggtgaagccgatgatcagagtagaacagcagccagattatcgcaggcaagaaagcagaacacaggatgcttctgggcctgagctgatactacctgcaagcattgaattcagggaaagttctgaagattcatttttgtctgccattataaattatactaatagctctacagtccactttaagttgtcccctacatatgtattatatatggcatgccggtatgtattgtccaaccagtacagacctgacatcagccctacagagcgcacacataaagtcattgcagtcgtcaacaagatggtgagcatgatggagggtgtcatccagaaacagaagaatattgcaggggcacttgccttctggatggcaaatgcatctgaacttctcaacttcattaagcaagaccgagaccttagtcggatcacactggatgctcaagatgttttagcacatttggttcaaatggcatttaaatacttggttcactgtcttcaatcagaacttaataattacatgccagcctttctagatgaccctgaagagaacagtctgcaacgaccaaaaatagatgatgtgctgcacacgctcacaggagccatgtccttgctacgacgctgcagagtcaatgccgccctgaccatccagctcttctctcagctcttccacttcatcaatatgtggctgttcaatagattggtgaccgacccagattcggggctgtgctcccattactggggtgcgattatccgtcagcagttgggccatattgaagcctgggctgagaagcaggggctggaactggctgcggactgtcatctgagcaggatcgtgcaggcaacgactttgcttaccatggataagtatgcacctgatgacattccaaatataaacagcacctgctttaagttaaattcattacaacttcaagccttattacagaactatcactgtgcacctgatgagccttttatcccaacggatcttatagaaaatgtagtgactgtggctgaaaacactgccgatgagctggcccgcagtgatggaagggaagtgcagttggaggaggatcctgatctgcagctgccgtttcttttgccagaagatggttattcttgtgatgttgtcagaaacattccaaatggtttacaagaatttttagaccctctgtgccagagaggattttgcaggttaattcctcacacacgttcaccaggtacttggacaatatattttgaaggtgcagattatgaaagtcaccttctgcgtgagaacacagagctggctcagcctctgaggaaagaacctgaaataatcactgtgaccctaaaaaagcagaatggaatgggccttagcattgttgcagcaaagggtgctggtcaagataaactaggaatctatgtgaagtcggttgtgaaaggaggtgctgcagatgatggacgtctagctgcaggtgatcagctcctcagtgtggatggacgaagtctggttggactctctcaggaaagggcggcagaactcatgacaagaacaagctctgtggtgacactggaagtagcaaagcagggtgccatctaccacggtctggccacccttctcaatcagccatcccccatgatgcagagaatttcagatcgtcgtggctcaggtaaaccccgaccaaagagtgaaggctttgagctctataataattcaactcaaaatgggtctcctgagagtcctcagctgccttgggcagaatatagtgaaccaaagaaattgcctggtgatgacagactgatgaaaaatagagctgatcaccgttccagccccaacgtagcaaatcagcctcctagtcctggagggaaaagtgcatatgcctctggaacaacagcgaagataacatctgtctctactggaaacctctgcactgaggagcagacgcctccgcctagacctgaagcctaccccatccccactcagacgtacaccagagagtattttaccttcccagcttccaaatcccaggatcggatggctcctcctcagaaccagtggccaaattatgaggaaaagccacatatgcacacagatagtaatcattccagtattgcaattcagcgtgttacacgttcccaagaagaacttcgagaagataaagcttaccaacttgagcggcatcgaatagaggcagctatggaccgaaagtctgatagtgatatgtggataaatcagagctcctcactggactccagtacctctagccaggagcatctgaaccattcctctaagtcggtcacccctgcttccacactgaccaaaagtggccctggccgttggaaaacaccagcagccataccggccacccctgtggccgtctcccagccaatccgaacagacctgcctccgccacccccgccacctccagtccactatgccggtgatttcgatggaatgtccatggatttgcctctcccaccacccccttccgccaaccagatagggctgccgtctgcgcaggtggctgctgctgaacggagaaagagagaagaacatcagcgttggtatgagaaggagaaggcccgcctggaggaggagcgggagaggaagcggagagagcaggagaggaagttgggccagatgcgcactcagtccttaaaccctgctccgttttctcccctgactgcacagcagatgaagcccgaaaagccttccacactccagcggccacaggaaacagtcattcgggagctgcagcctcagcagcagccccgcacgatcgagcgcagagacttgcagtacattacagtcagcaaagaggagctttcctcgggggacagtctgtcccccgacccgtggaagcgggacgccaaggagaagctggagaagcagcagcagatgcacatcgtggacatgctgagcaaggagatccaggagctccagagcaaaccggaccgcagcgccgaggagagcgaccggctgcgcaagctcatgctggagtggcagttccagaagagactccaggagtcgaagcagaaggacgaagatgacgaggaggaggaggacgatgatgtggacaccatgctgatcatgcagcgcctggaggctgaacgaagagcgaggttgcaggacgaggagcggaggcggcagcagcagttagaagagatgcgcaagcgggaagcggaagaccgagcgaggcaagaggaagagcgccggcggcaggaggaggagcgaacaaaacgagacgctgaagaaaagaggcgacaggaagaagggtattacagccgcctggaagccgagaggcgcagacagcacgacgaggcggcgcgcaggttgctggagcccgaggcgcccggaccaaactcttacccaggatctactggagcagctgttggagcccatgacgcctgtcgggatgcaaaagagaagcgctctaaaagccaagatgcagattcacctggaagttctggggcccctgaaaacttgacattcaaggaacgccagcgtcttttttcacaaggtcaagatgtatccaataaagtgaaagcttctcgtaaattaacagaactggagaatgaactgaacacaaagtga

SEQ ID NO: 10920 - DNA, 7047 bp, Homo sapiens
  SIMILAR (398)..(258): 361254mologous to Homo sapiens immunoglobulin heavy chain variable region,accession number AJ402382,Smith-Waterman Score=68.
atgtcggcgggcggccgtgacgaggagcggcggaagctggccgacatcatccaccactggaacgccaaccggctggacctgttcgagatcagccagccgaccgaggcccaccgcgggccccggcgtcccccgcagcccccgtccccctgccgcggtgtatcccggggtcgcgcgggccgagcgggggctggcggggcgcggcagtcacttgttcccctctccggccgctcacctggtggctcacctgggccgccgcccccacccccgcgagcgcggcgcggccccggcctcatccccggcggcgcggggggcgcggcggcgcgcggggccggcgccctccacctgcagcccggttgtggctcgcggcgccccttcgccgtggccgggatggagcctgtgacgcgcgctgtgcttcgggttcataaacttgcaggctgccagctgggaggggaaagtcagtatcacaaagttcgggaggatttggagttccatggagtgatgagattttattttcaagataaagctgctggaaactttgcaacaaaatgtattcgggtctctagtactgccaccactcaagatgtaatcgaaacgctcgcggagaaatttcgacctgatatgcgaatgctgtcctctcccaagtattcactctatgaagtgcatgtcagcggagaagaaagaagattggatatagatgagaaacctctagttgtacaactgaattggaacaaagatgatcgggaaggcagatttgttcttaagaatgagaatgacgccattcctcctaagaaggctcaaagtaatggacctgaaaagcaggaaaaagaaggggttatccagaacttcaagagaactctctcaaagaaagaaaagaaggaaaaaaagaagagagaaaaagaggcattgcgacaggcatctgataaagatgatagacctttccaaggggaggatgttgaaaattctcgactggctgctgaggtttacaaagacatgccggaaaccagctttactcgaaccatttctaatcctgaggtggttatgaaacgacggaggcagcaaaaattggaaaagagaatgcaggaatttcggagctcagatgggcggcctgattcaggtggaacattgagaatttatgcagatagtttaaaaccaaatattccctacaagacaatcctgctgtctactacagatcctgcagactttgctgtggctgaagctttagagaagtatggtctggaaaaagaaaaccctaaggattactgcatcgcccgggttatgcttcctcctggagcccagcattctgatgaaaagggtgctaaagaaattattcttgatgatgatgagtgtcctttacaaatcttcagggaatggccaagtgacaaagggattttagtctttcagttgaagaggaggccaccagaccacatcccaaagaaaaccaagaaacacttggaaggcaagacacccaagggaaaggagagagctgacgggtctggctatggctccacccttcctccggagaagctgccctatttagtagagttaagcccagggagaaggaatcactttgcctactacaactatcacacttacgaagatggttctgactctagagataagccaaagctttaccgccttcagttaagtgttactgaagttgggacagaaaagttggatgacaactctatccagttgtttggcccaggaattcagccccatcactgtgaccttaccaacatggatggagtggtcactgtgacgcccagaagtatggacgcagaaacctacgtggaaggccagcgcatctcagaaaccaccatgctgcagagtggcatgaaagtgcagtttggggcgtcccatgtatttaagtttgtggaccccagtcaggatcatgctcttgcaaaaagatctgtggatggaggcctgatggttaagggcccaagacataaacctggaattgttcaggagacaacttttgatttgggaggagatattcatagtgggacagcattaccgacaagcaagagcaccactaggctggacagcgacagagtgtcgtctgcctctagcacagccgagcggggaatggtgaagccgatgatcagagtagaacagcagccagattatcgcaggcaagaaagcagacctgacatcagccctacagagcgcacacataaagtcattgcagtcgtcaacaagatggtgagcatgatggagggtgtcatccaggaagtagaccaggttgaccagaaacagaagaatattgcaggggcacttgccttctggatggcaaatgcatctgaacttctcaacttcattaagcaagaccgagaccttagtcggatcacactggatgctcaagatgttttagcacatttggttcaaatggcatttaaatacttggttcactgtcttcaatcagaacttaataattacatgccagcctttctagatgaccctgaagagaacagtctgcaacgaccaaaaatagatgatgtgctgcacacgctcacaggagccatgtccttgctacgacgctgcagagtcaatgccgccctgaccatccagctcttctctcagctcttccacttcatcaatatgtggctgttcaatagattggtgaccgacccagattcggggctgtgctcccattactggggtgcgattatccgtcagcagttgggccatattgaagcctgggctgagaagcaggggctggaactggctgcggactgtcatctgagcaggatcgtgcaggcaacgactttgcttaccatggataagtatgcacctgatgacattccaaatataaacagcacctgctttaagttaaattcattacaacttcaagccttattacagaactatcactgtgcacctgatgagccttttatcccaacggatcttatagaaaatgtagtgactgtggctgaaaacactgccgatgagctggcccgcagtgatggaagggaagtgcagttggaggaggatcctgatctgcagctgccgtttcttttgccagaagatggttattcttgtgatgttgtcagaaacattccaaatggtttacaagaatttttagaccctctgtgccagagaggattttgcaggttaattcctcacacacgttcaccaggtacttggacaatatattttgaaggtgcagattatgaaagtcaccttctgcgtgagaacacagagctggcaagtattttgagggctcagcctctgaggaaagaacctgaaataatcactgtgaccctaaaaaagcagaatggaatgggccttagcattgttgcagcaaaggtcactcacacagcaagtcttccctgggcggcagaactcatgacaagaacaagctctgtggtgacactggaagtagcaaagcagggtgccatctaccacggtctggccacccttctcaatcagccatcccccatgatgcagagaaatcgtcgtggctcaggtaaaccccgaccaaagagtgaaggctttgagctctataataattcaactcaaaatgggtctcctgagagtcctcagctgccttgggcagaatatagtgaaccaaagaaattgcctggtgatgacagactgatgaaaaatagagctgatcaccgttccagccccaacgagcagacgcctccgcctagacctgaagcctaccccatccccactcagacgtacaccagagagtattttaccttcccagcttccaaatcccaggatcggatggctcctcctcagaaccagtggccaaattatgaggaaaagccacatatgcacacagatagtaatcattccagtattgcaattcagcgtgttacacgttcccaagaagaacttcgagaagataaagcttaccaacttgagcggcatcgaatagaggcagctatggaccgaaagtctgatagtgatatgtggataaatcagagctcctcactggactccagtacctctagccaggagcatctgaaccattcctctaagtcggtcacccctgcttccacactgaccaaaagtggccctggccgttggaaaacaccagcagccataccggccacccctgtggccgtctcccagccaatccgaacagacctgcctccgccacccccgccacctccagtccactatgccggtgatttcgatggaatgtccatggatttgcctctcccaccacccccttccgccaaccagatagggctgccgtctgcgcaggtggctgctgctgaacggagaaagagagaagaacatcagcgttggtatgagaaggagaaggcccgcctggaggaggagcgggagaggaagcggagagagcaggagaggaagttgggccagatgcgcactcagtccttaaaccctgctccgttttctcccctgactgcacagcagatgaagcccgaaaagccttccacactccagcggccacaggaaacagtcattcgggagctgcagcctcagcagcagccccgcacgatcgagcgcagagacttgcagtacattacagtcagcaaagaggagctttcctcgggggacagtctgtcccccgacccgtggaagcgggacgccaaggagaagctggagaagcagcagcagatgcacatcgtggacatgctgagcaaggagatccaggagctccagagcaaaccggaccgcagcgccgaggagagcgaccggctgcgcaagctcatgctggagtggcagttccagaagagactccaggagtcgaagcagaaggacgaagatgacgaggaggaggaggacgatgatgtggacaccatgctgatcatgcagcgcctggaggctgaacgaagagcgagggacgaggagcggaggcggcagcagcagttagaagagatgcgcaagcgggaagcggaagaccgagcgaggcaagaggaagagcgccggcggcaggaggaggagcgaacaaaacgagacgctgaagaaaagaggcgacaggaagaagggtattacagccgcctggaagccgagaggcgcagacagcacgacgaggcggcgcgcaggttgctggagcccgaggcgcccggtctgtgccgccctccgcttccccgggactacgagcccccgtccccgtcccccgcgcccggcgcccctcctcccccgcctcagcgaaacgcctcctacctcaaaacacaggtcctctcccccgactcgctgttcactgccaagtttgttgcatacaatgaggaggaggaggaggaggactgcagcctagcaggaccaaactcttacccaggatctactggagcagctgttggagcccatgacgcctgtcgggatgcaaaagagaagcgctctaaaagccaagatgcagattcacctggaagttctggggcccctgaaaacttgacattcaaggaacgccagcgtcttttttcacaaggtcaagatgtatccaataaagtgaaagcttctcgtaaattaacagaactggagaatgaactgaacacaaagtcctgctcctgggactcagccgtgcgcctctgggaagggccggtccaggacgtccgcaagttgcgggagaacctggcgggagggacagatgccagcatttctcaccccagcacccagttgaagaggctaaattcctggttgcgtgctccctatgagaatctaatgcctgatgacctgaggtggaagagtttcatcccaaaaccaccctacccccagcctgtggacaaactgtcttccacgaaaccagcccctgatgggaaaaagcacagccgtgcagcccaggacggcagttccttgccgagggcccgtgtgtttgtgtctggtgtgcgctgtgttccgaggatgaaagtgatggccgatgaacagaactctcgtgttgtcggccaaagaagacaagatagcagaactggaaacggaaaacgctgtccttcttctgaaattggcacaggacagcggggagcacagaaggcctgcgccggttccctccagtccgtccacgaggcacaggtccgtccccaaaggccccgcttctcaacgccaccacatcgagggttaagcttccgcgtgaattttggaggtggctcattcaaaccacagcagccaccatcaccacaagccaggtgcccggtgtctccatcacctcgaaggccccacaagccaggcactgaagacacaggcggcaacaccgaggcccagagagcacccccagcgcaatccggcctccctgtacccacgcaggcccgctcccccgtctttctgttgcccacggccaaatcccccaaagcccagggcagccccacgttgagcgcagaccatcctggcgccatggattttcttagaactgccgttccacgccgggtgagtccccggggctctggaaccgtggattttctgggatttgccgttccacgccgggtgagtccccggggctctggaaccgcggattttctgggatttgccgttccacgccgggtgagtccccggggctctggaaccgtggattttctcggaattgccgttccacgcccggactcgggcctgggcttagctccccggaggcaccgcaggcagcgcgcgaccccgagctcacacgcgggcatcgccgagtcacacgtgggcatcccgggcctcacacgcagcccctcttccaggacgttctgcctccccgcacctggccgggaccctcaggctcagccctggggatgcctcccccgacggctcctgtggctccgtgccccgcgcgcccctggatcacctggagttgtccccaccgtgttccctgctgcatacaagggaaagatggaaaagagtcgcagtgaggccacgcggatttccaccctgtacaacaaacagcagtgtctgcagagaaacacacgctcagccttgagccagctgggtcatgtcattcagaaacttaaccaggatatacaggcgtttcattcttcttctcgggtgctcttaagagattatcaggatgagtatcaggaccgtgtttctgaaatagtgaccgcggtgcaaagaacacagcagagtgccgagaccctgctagctgacaccaaattccacaggtga

SEQ ID NO: 10921 - DNA, 3231 bp, Homo sapiens
  SIMILAR (601)..(1113): 501254mologous to Homo sapiens Human homer interacting protein I42,accession number Y83008,Smith-Waterman Score=345.
atgggtggacagacacagagagatgtaggggtgagggtggaaaccatccacaggagagatgtgtggacagacacagagggatgtaggggtgagggtggaagccatccacaggagacatgtggacagacacagagggatgtaggtgtgagggtggaaaccatccacaggagagatgtgtggacagacacagagggatgtaggggtgagggtggaagccatccacaggagacgtgtggacagacacagagggatgtagggggtgctggtcaagataaactaggaatctatgtgaagtcggttgtgaaaggaggtgctgcagatgtggtcagtatcattttgaaagaagtacattttcagtgtgtcatatattcagcaaatgatgatggacgtctagctgcaggtgatcagctcctcagtgtggatggacgaagtctggttggactctctcaggaaagggcggcagaactcatgacaagaacaagctctgtggtgacactggaagtagcaaagcagggtgccatctaccacggtctggccacccttctcaatcagccatcccccatgatgcagagaaaacaattcttatggaattttaatgataatcagggtgttgaaaataaaatcttaagagatactgaatatgctttgattccagtttcagatcgtcgtggctcaggtaaaccccgaccaaagagtgaaggctttgagctctataataattcaactcaaaatgggtctcctgagagtcctcagctgccttgggcagaatatagtgaaccaaagaaattgcctggtgatgacagactgatgaaaaatagagctgatcaccgttccagccccaacgtagcaaatcagcctcctagtcctggagggaaaagtgcatatgcctctggaacaacagcgaagataacatctgtctctactggaaacctctgcactgaggagcagacgcctccgcctagacctgaagcctaccccatccccactcagacgtacaccagagagtattttaccttcccagcttccaaatcccaggatcggatggctcctcctcagaaccagtggccaaattatgaggaaaagccacatatgcacacagatagtaatcattccagtattgcaattcagggaaatgagacagacacaacagacacagcatggtcagtgctgtgggagaagaggccccagcaggggatggagcttctcagtcttggacgagaacctgggcacagctgtatgcacggaagggccttccaggaggagggaaaggcacagagatgtgtagtagttcagcaggaaccctggcgtgttacacgttcccaagaagaacttcgagaagataaagcttaccaacttgagcggcatcgaatagaggcagctatggaccgaaagtctgatagtgatatgtggataaatcagagctcctcactggactccagtacctctagccaggagcatctgaaccattcctctaagtcggtcacccctgcttccacactgaccaaaagtggccctggccgttggaaaacaccagcagccataccggccacccctgtggccgtctcccagccaatccgaacagacctgcctccgccacccccgccacctccagtccactatgccggtgatttcgatggaatgtccatggatttgcctctcccaccacccccttccgccaaccagatagggctgccgtctgcgcaggtggctgctgctgaacggagaaagagagaagaacatcagcgttggtatgagaaggagaaggcccgcctggaggaggagcgggagaggaagcggagagagcaggagaggaagttgggccagatgcgcactcagtccttaaaccctgctccgttttctcccctgactgcacagcagatgaagcccgaaaagccttccacactccagcggccacaggaaacagtcattcgggagctgcagcctcagcagcagccccgcacgatcgagcgcagagacttgcagtacattacagtcagcaaagaggagctttcctcgggggacagtctgtcccccgacccgtggaagcgggacgccaaggagaagctggagaagcagcagcagatgcacatcgtggacatgctgagcaaggagatccaggagctccagagcaaaccggaccgcagcgccgaggagagcgaccggctgcgcaagctcatgctggagtggcagttccagaagagactccaggagtcgaagcagaaggacgaagatgacgaggaggaggaggacgatgatgtggacaccatgctgatcatgcagcgcctggaggctgaacgaagagcgagggcatgtttgtctcttctgggtagcgccacctccatgggaacagtgacctttgtccaagtttctagaagagttctggagtgtggtaggcagtcgagtgagtgggatcggattccaggccaaggtcccaagctctcgaagtttttcttgacccctgaaatccttgctgaacgtttccatcctttgctctggcccctggtgcaggaagcctgtggggagctgtggctggttctgtcaactcaagggcaaggcgtcaccgacggcttccttgacgaggagcggaggcggcagcagcagttagaagagatgcgcaagcgggaagcggaagaccgagcgaggcaagaggaagagcgccggcggcaggaggaggagcgaacaaaacgagacgctgaagaaaagaggcgacaggaagaagggtattacagccgcctggaagccgagaggcgcagacagcacgacgaggcggcgcgcaggttgctggagcccgaggcgcccggtctgtgccgccctccgcttccccgggactacgagcccccgtccccgtcccccgcgcccggcgcccctcctcccccgcctcagcgaaacgcctcctacctcaaaacacaggtcctctcccccgactcgctgttcactgccaagtttgttgcatacaatgaggaggaggaggaggaggactgcagcctagcaggaccaaactcttacccaggatctactggagcagctgttggagcccatgacgcctgtcgggatgcaaaagagaagcgctctaaaagccaagatgcagattcacctggaagttctggggcccctgaaaacttgacattcaaggaacgccagcgtcttttttcacaaggtcaagatgtatccaataaagtgaaagcttctcgtaaattaacagaactggagaatgaactgaacacaaagtga

SEQ ID NO: 10922 - DNA, 1052 bp, Homo sapiens
  SIMILAR (31)..(195): 981254mologous to Homo sapiens dJ470B24.1.4 (myeloid/lymphoid or mixed-lineage leukemia (trithorax (Drosophila) homolog); translocated to, 4 (AF-6) (isoform 4)),accession number AL049698,Smith-Waterman Score=261.
gcgcgatagacactatcaggtggagaaccccagcgcctggaggctgaacgaagagcgaggttgcaggacgaggagcggaggcggcagcagcagttagaatagatgcgcaagcgggaagcggaagaccgagcgaggcaagaggaagagcgccggcggcaggaggaggagcgaacaaaacgagacgctgaagaaaaggttatggtcctttaagggcagctagaattttaccaagttagcctgaacgtaatcgattggctggggcagagcgggctggaagttctgtttttttcttaagaagcacgaggcagagcagggcctggctcccccagctttgtgattggacctgtaactttaccccatctggcccacctacctctcttctggactgtctccagatccccttatctgtcaagatttggctccttcaaacttctgaactcttgggcgtgtgtagcagtgagcctctttgcaaagggttcggtacctcgggcactcatctttactgaacatggcccagcttgtcattgtgaaggtgacattggctcagtgattgcttaaatggcatgtggaccgtgggaagcagtaggagcgtagtaagacagttggctgccattcaacatttcaaatagatggtttactcaaatcactcacttctggttgatggtaaagagagcagatggcttagaaaacatgatacaggaaaatttagtatgtaatccagtaaatatcctaagttatttattttcatgtgtgtgtgtgtgtttaaatcaagtaacccttttaattgaattttaaaatgacagcgaattttgacattctgagaaatggggattttgagatgtttctctccatatctccctttgtcctgtgggtgtggccgacgccctctggatgaagaggctgtagccgttgagctccctgtgggggcctgtttcatcccgaggggactgcgtgttgctctgtgtggtttgagagaagctgctcttctctgttacttcccttctatgaaggtagaagctttcagtgttacaacttctgatggcggaaaattt

SEQ ID NO: 10923 - DNA, 461 bp, Homo sapiens
  SIMILAR (427)..(2): 971254mologous to Homo sapiens phosphoglycerate mutase 2,accession number J04173,Smith-Waterman Score=749.
cccggaggctgttgccatgggctgcaatcagtacacgtttcccctccttgatctggggaactatttcttcattccagaagggcagagctctgtcaatagtatccttcagactctcacaggagggtagctgatcttctgtgaggtctgcatacctgcgatccttactgatgttgctgtagaaaggatggtcgggctccatcggaggtggtgggacatcataggagcgcctccagatcttcacctgggcctcaccatgctttgcagcagtttctgctttattgagaccggttagacccccatagtgccgctcattgaggcgccaagtcctcaccactggcagccacatgtgatcaatggcatctagcactgtccagagggtccggatcgctctcttctgcactgaggtgaagcactcgtcgaactcataagggcttgcatgattctcagcgtcatggctcaga

SEQ ID NO: 10924 - DNA, 434 bp, Homo sapiens
  SIMILAR (1)..(1053): 1001254mologous to Homo sapiens WNT-8B protein,accession number Y11094,Smith-Waterman Score=1918.
ctgtccttttctgtggaatcacacaagctcattacacctacaacaatctgtcggtggaatcaagaagtcgaaccaagcagctctttgaggtgttacatttcctggcagagaacttcatcttctcctacatgggcctggcactgtttaccttccagaagcacgttttcagccccattttcatcatcggagcttttgttgccatcttcctgggcagagccgcgcacatctacccgctctccttcttcctcaacttgggcagaaggcataagattggctggaattttcaacacatgatgatgttttcaggcctcaggggagcaatggcatttgcgttggccatccgtgacacggcatcctatgctcgccagatgatgttcacgaccacccttctcattgtgttcttcactgtctggatcattggaggaggcacgaat

SEQ ID NO: 10925 - DNA, 1536 bp, Homo sapiens
  SIMILAR (257)..(400): 911254mologous to Rattus norvegicus kinesin-like protein KIF2,accession number AF155824,Smith-Waterman Score=226.
gtcggcggtgctgctggtccccgggcagaggaggcgtgggcggctccgggaccacggagcctggtgacgcggcgctcccctgcccgggtcgggttgcccaggcgccgccgcggcggctgctgctgctgctgccgctgctgctgggtaggggacttcgagtaacggccgaggcctcggcctcctcctctggggcggcggtcgagaacagcagcgccatggaggagctcgtcactgagaaggaggcggaagagagccaccggccagacagtgtgagcctgctcaccttcatcctgctgctcacgctggccatcctcaccatatggctcttcaagtactgccgggtgcactttctgcatgagaccgggctggccatgatctgtgggctcatcgttggggtgatcctgaggtatggtacccctggcaccaggggccgtgacaaattactcaattgcactcaagaagatcaggccttcagcactttagtagtggatgtcagcggtaaattcttcgaatacaccctgaaaagagaaatcagccctggcaagatcaacagcgtaaagcagaatgacatgctagggaagtcagttggcatttttctaggtatatttagtggctgttttaccatgggagctgtgactggtgttgtgactgctttagtgaccaagtttaccaaactggactgctttcccctgctggagacggcgctcttcttcctcatgtcctggagcacgtttctcttggcagaagcttgcggatttacaggcgttgtagctgtccttttctgtggaatcacacaagctcattacaccttcaacaatctgtcggtggaatcaagaagtcgaagcaagcagctctttgaggcagagaacttcatcttctcctgcatgatcctggcgctatttaccttccagaagcacgttttcagccctgttttcatcattggagcttttgttgctgtcttcctgggcagagccgcccatatctacccgctctctttcttcctcagcttgggcagaaggcataagattggctggaattttcaacacacgatgatgttttcaggcctcaggggagcaatggcatttgcgttggccatctgtgacacggcatcctatgctcgccagatgacgttccccaccacgcctttcatcgtgttcttcaccatctggatcattggaggaggcacgacacccatgttgtcatggcttaatatcagagttagcatcaaggagccctccaaagaggaccacaacgaacaccaccgacagtacttcagagttggtgttgaccctgatcaagatccaccacccaacaatgacagctttcaagtcttacaaggggacagcccagattctgccagaggaaactggacaaaacaggagagcacatggatattcaggcggtggtacagctttgatcacaattacctgaagcccatcctcacacacagcggctccccgctaaccaccactctcccgcctgtgaggaaactgaggcactggaagatgaaggctacagaggtagaaagtgatggag

SEQ ID NO: 10926 - DNA, 1267 bp, Homo sapiens
  SIMILAR (735)..(989): 971254mologous to Homo sapiens dJ71L16.5 (KIAA0267 LIKE putative Na(+)/H(+) exchanger),accession number AL022165,Smith- Waterman Score=415.
ttggcatcttaatgagtggcactctggtggtctgaccgacctccgtaaagcagaaactgctgccaagcatggtaaagatctggaggcgctcctggaatgaagaaatagttccccagattaaggaggggaaatgggtactgattacagcccatggcaacagcttccccggcattgtcaagcatctggagggtctctctgcagagcagaacctgctgactgctattctcgttgtctatgaattggacaagaacttgaagcacatcaggcgcatgcagaccacatctgtaggcatctgaagttgtagctacagatgagtaccagtggctcccatttttcatttcagccatttttctcctgcacccactgtcttcacacaatctagacaagatagcatgcagtgcattttgagacaacattgtcatttaatccttataagtagatcttcttctttggtccccgcaggcctcaggggagcaatggcatttgcgttggccatccgtgacacggcatcctatgctcgccagatgatgttcacgaccacccttctcatttgcccagagctcctggctctcctgttgtccctgtcacactcacgttcccttcttctgcatggctaccatgggccaagctaatacgctctgtttttctctttgtctttctccctggtgacttgggttggtgccaaacctggaagatatcagtctctcatttttgttgttgttgttggttgcacttttcagaaccaagagccactgagagaggaagactctgatttcatcctgaccgaaggcgacctgacattgacctacggggacagcacagtgactgcaaatggctcctcaagttcgcacaccgcctccacgagtctggagggcagccggagaacgaagagcagctcggaggaagtgctggagcgagacctgggaatgggagaccagaaggtttcgagccggggcacccgcctagtgtttcccctggaagataatgcttgactttccccccaagccctggcgcgatggggtaggctcccgatggggtgaggacagctgcaagccctagtgttgttggaggtggggcagtgactagattgaactaactcttctattttattggggtctgaagctattgtaacacttaaaatttaactcacaatgcagatggtgaggcaaaagtgtctctaaattcagacaaacgtagacctattcccacttttttcacatagtagtgcgctgtttcagagttaaccaaccaaaaaaaaaaaaaaaaa

SEQ ID NO: 10927 - DNA, 378 bp, Homo sapiens
  SIMILAR (15)..(302): 351254mologous to Bos taurus collectin-43,accession number X75912,Smith-Waterman Score=91.
atggtcctctgcgccccactgcaccagggggaatacggggacgagaaactcctacaggaagaactccctcccagaatccgcttccagttttctcaccggcaggagagcattcaggcctttcagggcactccagccctgtccaaccacactcggaatccaccatcccaccagacgttaaaatccccagggagaggccaccggcctggctgcaagaatgtggcagctttatcttcccaaggacagtcccagtggaagcctttgggccgcaggtgctgcagtcgtcccgtggccaagatggagacacaaaacactcaaaataatccatgcagaagagtgtccgatgtggtgatggatgcggagacagtgaaacctgaataa

SEQ ID NO: 10928 - DNA, 1035 bp, Homo sapiens
  SIMILAR (66)..(2519): 971254mologous to Homo sapiens myosin I beta,accession number X98507,Smith-Waterman Score=4131.
atggcccccccactccgcggaggccccgcccccttccttcttccctcccgagccgtcgctcgcgggacccgcccaggattccgctctgcgcttagtttccgcagacccggaaacagatcgcgcggagtgaacctgattaaacttgggcttcgcagtcctccacctccataccccggatttggaggttcgtacacgcctgaaaattctcaaccgctcccctcactgctactccaccccctggaaaaatgtgctctgcgggatgcagagagacagttaaaaccacctgaccatcacctgatggttgcctggctcattcctgatgtgtggaatggggagggggagccctctccttctcataccagacactctctcagggcaagttcatccaactatgtgcttcgagctccagaggggaatctccttgccaggaggttacctcgagaaacagcaatcaatctacaacccaaagcctgctacaaaactctctcccacccggagagtttcagccacttttacaaccagttctgcccacgaaggcaccagtggctgccagctcaaccccctggtcacttcttccttgggtaacataaaagagtctttagaagtcaatactgaatatccaaaatatgctgcttagggctgagaatctatacatccccttcatgtgccacagtcacatgcacagatctcaccctgtggaaagatggtcctctgcgccccactgcaccaggggaatacggggacgagaaactcctacaggaagaaggagaggccaccggcctgctgcaagaatgtggcagctttatcttcccaaggacagtcccagtggaacctttgggccgcagtcctcttcacttgatgatgagtttccgaattaaattcctgcatgcaaatctctgtgtcagatctgtttcccagcttctgaacttctcgccacccttcctgaagggaatccaggaccccgactgcgagcgcatcacctgctggaaggcaaagcccctgcccaggatggcaccgggccccggtgatgtgtag

SEQ ID NO: 10929 - DNA, 894 bp, Homo sapiens
  SIMILAR (12)..(311): 361254mologous to Lemna gibba NPR1,accession number X64327,Smith-Waterman Score=96.
ggaattccccgagccggccgcgctcctcccagcgaggcgtggcggggaggcgtagtgaggctgggcccgtggcggttccctgaggagggccgaaaaagggccgggggtgctaggggaacgggcgctgggggcagcggccccggtggatgctaagggcttcgggatcgggagagtccaccacgcctgcctgctcggctgagaatcgccatgccagctaaaggaaaaaaaggaaaaggccagggcaagtttcatgggaagaaacagaagaaaccagaagtggacattctcagccccgcggccatgctgaacctctactacatcgcccacaacgtcgctgactgcctgcatctgcgaggcttccattggccgggtgctcccaaaggaaagaaagggagaagcaagtgacagcattttcacaaacacatctctgttacagaccaccagggacctggggaagagaagtcaggataacacaactgttgccagcaacatagactttactccagacgacttgagatgcaaaattaagtgtgctttttctgtgatggtggaagatcaggaaatgcaccttacctcctctgttatgccagatatggttagccactttggtttttttaggagctataggatgggaaaagcctgagtaattcctacacagtgtgctgaaattaatagaactttcagaaattattataattctgggtcaggattaaactttgctctcagaaggcagttctagttgcattaattgttttcttttgccaaagagcgtttgtcatttagagaagacacggcaagaaacactgggtttccttaggaacattcctctcttgggcaccatttccttttttttttttaatggaaaataataaatactttgtttaaataaaaaaa

SEQ ID NO: 10930 - DNA, 977 bp, Homo sapiens
  SIMILAR (238)..(14): 561254mologous to Mus musculus retinitis pigmentosa GTPase regulator,accession number AF286473,Smith-Waterman Score=181.
ctaccattttgtcttcgtgatcttcttcctcttcctcttccccttccccttccccttccccttccccttccccttctccttctccttctccttctccttctccttctccttctccttctccttctccttcttcttctttctttttgagatggagtcccgctctatttcccaggtctctctctttctctctctttcctggaactgggacacccttctcctgtccttgaacatcagaatcccaggttctacagccttggattttagaacttgcacaagtggtccccccatggttcccaggactctagcttctgactgagttccaccatcatcttccctgattctgaggcggtcagactcagaaccacgttggcctgagccatgttgcttacagtgaacacggatgcagtcataatagtatcgccactcatctggagaaaatgtaacggtgaccgtgagggacaagccagggaccaggtggtgttcctggaagacaggtggcatcttgttgggacaagccccggactttcttacataattgatctcaaagtatttggtttgcgggggtaaaatatgaacacgtgtgtcttcattggaaacattgaccagatgcagaatctgttggtgttgtttttctacttgatagcctccaaaatgtattatgccaggtcttgcctgtatgaccttattattcacaagttttgcataaacctttgattctaggaggtgattaggtactacttttctttttttcggctcctccactaggttcttcaagagatggggtgatgcattattaaagggttctttagcattctttagtcctctgctgggggttttcaccactgccattttatcatgaaaaatggagtcttctttttagagccaaaggtcatgtccctggaggtggttcccgggccggattcggccggcgccagcggaattccgccacactgcactacggatctcgaggttcaaaa

SEQ ID NO: 10931 - DNA, 489 bp, Homo sapiens
  SIMILAR (84)..(233): 441254mologous to Hordeum bulbosum chitinase,accession number AJ400135,Smith-Waterman Score=68.
ctactgatttagttggctcctaaaaggagtatctggttagaactaaatgacagaaaggaaagggagagaatcccctcgttaaaataacatttcggccaccacctgggctgaggacctatccatctgctccttggtccgctcgaagcacctacgggcgagctgctgctgtctggcgtcctcactcaccatcagctccccgtagaggtacacacccatggcctgcagggcacagaggccaaagggcatcaggcgaaggtgtgggtacccacacacacgcacacatgagctcagtctgtgcttgttccacacacacttgctggtctagaaattgcaaagaccccagagaagacagaggccgtgggctgactgtgcttttggaagctgcagtctgcaattcctgtctcctccttgtactcaaaaccccaaggaatcctcagctcccaattctctacacagactctgacacgaaatcgtcgaccgggaatccgg

SEQ ID NO: 10932 - DNA, 1494 bp, Homo sapiens
  SIMILAR (720)..(782): 451254mologous to Human immunodeficiency virus type 1 Tat protein,accession number AF000531,Smith-Waterman Score=54.
atggctgctgccagtttttacatcactggccacatgcagaaaggcaaaggtaaaggacgaatgcacaaaccttcctctcacagtccgacacgatcccttcatgaggctcagacgctgctctgcacttacagccatttactccaggacacaggagatggttatcaaatggaatcagttaagcgagcacaagtctgtcccgtgtggcggtgtggaggcctggagggctgctttatggagggacacgttggggcagcttgcagccattctcagcaaggacagtttggtgactgctttgctttgaaatacactctttgggtccacaaatcaaatcttcccatgttccttgtctggaaaaagttgtggggatttcctaaagtgtacctcagaattcaattggtgaggaaggcattcattgtttccccaactgacagcaagaagccaagccccagtcaggccctctgcaaatctgaaaatccaagacccagtaaagacaaaactggccacacaagtgactcgggagcatctgttatcaagcatggacttaatccggagaagatcttcatgcaggtgcattatttaaagggctacttccttcttcggtttcttgccaaaagacttggagatgaaacctatttttcatttttaagaaaatttgtgcacacatttcatggacagctgattctttcccaggctccaagtcacccggctaaacagatctgcatccaggctcacgtgtcccacccctttgccctttccattgccttcattgtcattgccattgtctgtaattatgttttcatcatggggctatttgtttcttttcgctgtcctccactctacgtatatgcccaacaaggccagaccattctatttcaccagtacttagcacatgattggcacacagtagatactgtcagcccacagccactgcagacgtggcccattgctacttccttgtccacagcaacagtgctggatacggctcagtgccttgtcagacagacaagagttgttgatgagtctgcaaagcagagctgccccagcaaccgccattctactttctgtctctgtgagtttgactcttctaggtacctcatgccacccccacctggagtggtagataggcctcttggcttgagtgctgtggccagccaggtgttcacaggtctcacctgtgcatctggggctcagatgggcactgttggccagtctctacacaagggtcagatttcacttcctccattgttgcaggaatcctggtttgctgcctcatggttgcaagatggccatcactgctccatccaccaggcttgtggggaagagccgctgcagagggagcgtcgcgccggggcggagtgcgggcttgcgcggcaagtgcgcgccgaggtcacgaaatggattggagtgaaccggagaccccgaaaacggaagcgcagggagaaggaagaggtgtttgaaaagagggtcatatatgtcacttcagttgaagaataa

SEQ ID NO: 10933 - DNA, 1046 bp, Homo sapiens
  SIMILAR (621)..(2000): 691254mologous to Rana catesbeiana myosin I beta,accession number U14549,Smith-Waterman Score=1588.
gttggaattcaaaatactccatcggaaagttgctgcctatttaaagtagtgagtttgatcttggctttgatctaaaccttttgatcttgaaagaaggatggagtagcaataaagagagggcaagacagattttctttaaagaaatgtgataaagttaaagggatggtcaagacccagcaagcaacaggacaacccgactctccgccccggcccgccctcaccggcaggcgggttccagcaactgctgatgcggatgagaaggcctttggcgggtggaggaaaatcttggggtatcgcacatttttataaaccgctgcagagggagcgtcgcgccggggcggagtgcgggcttgcgcggcaagtgcgcgccgaggtcacgaaatggattggagtgaaccggagaccccgaaaacggaagcgcatggagaaggaagaggtgtttgaaaagcttcttccagaccagctgggcttgcttctggagcatctcttggagcagaagactctgagcccccgaactctgcaaagcctccagaggacataccacctccaggatcaggatgcagaggttcgccatcggtggtgtgaactcattgttaagcacaagttcacgaaagcctacaaaagtgtggagaggttccttcaggaggatcaggccatgggtgtgtacctctacggggagctgatggtgagtgaggacgccagacagcagcagctcgcccgtaggtgcttcgagcggaccaaggagcagatggataggtcctcagcccaggtggtggccgaaatgttattttaacgaggaaagaccacagcaagattctttcattcgtctcctcctagcctgggggaccaggctcgaactgaccctggacatcaaaggagggattatgtggctgctaaagccatcggcccacagccctgttcacgtcttggtgcttctctttcccagaggctggtcccagccaggcacacacaaaaggcagattctcgtaaacgcagcctccctccctggaggctgcctcctgcccttgatctggagtggagctgct

SEQ ID NO: 10934 - DNA, 688 bp, Homo sapiens
  SIMILAR (292)..(840): 861254mologous to Homo sapiens serine hydroxymethyltransferase,accession number L23928,Smith-Waterman Score=792.
  misc_feature (1)...(688): n = a,t,c or g
aatgcgccggtacnagggngcgtcccattcgccatttcaggctgcgcaactgttggaagggcgatcggggcgggccttttcgcttattacgccagctggcgaaagggggatgtgctgcaaggcgantaagttgggtaacgccagggtttttccagtcacgacgttgtaaaacgacggccagtgaattggatttaggtgacactatagaagagctatgacgtcgcatgcacgcgtacgtaagcttggatcctttagagcggccgccctttttttttttttttttgttttttttttttttttttttttttttgagacggagtttcgcccttgttgcccaggctggagtgcactggcgtgatctcggctcaccgcaacctccacctcccaggtttaagtgattctcctgcctcagcctcccaagtagctggaattacaggcatgcgccaccacgcccggctaattttgtgtttttagtagagactggtctccaactcccaacctcaggtgatctgcccgcctcggcctcccaaagtgttgggattacaggcgtgagccattgcgcctggccaggaaactggcttttaaaggaaactcgttgtggttcttctgtagggaggcagataacaggccccattaccccggacgcgtgggtcgacccgggaattccggaccggtacctgcaggcgtt

SEQ ID NO: 10935 - DNA, 382 bp, Homo sapiens
  SIMILAR (3)..(194): 781254mologous to Homo sapiens PRO2550,accession number AF130089,Smith-Waterman Score=276.
tttttttttttttttttttgagacagagttttgctcttgttgcccaggctggagtgcaatggcgtgatctctgctcaccacaacctccgcctcccaggtttaagtgattctcctgcctcagcctcccgagtagctggaattacaggcatgggccaccacacccggctaatttttgtatttttagtagagatggagtttcaccatgttggccaggcctgtctcaaactcctgccctcaggtgatccacccgccttggcctcccaaagtgctgggattacaggtgtgagccaccgagcctagctgcaactggttatctttatgtgttaatagctgaagcccaaactgtgggatgaaggctattggctgtctggagccctgaaca

SEQ ID NO: 10936 - DNA, 577 bp, Homo sapiens
  SIMILAR (116)..(316): 921254mologous to Homo sapiens Similar to MYB binding protein (P160) 1a,accession number BC000641,Smith-Waterman Score=311.
agccccatcagtaagaagcggaaacgaaagggatcttgccagagacgaagaagcgcaagaaacgcaagtcagaggatgccacgccagcggaggatggcacacctgcagccaccgcgggagccagccccccagcatgggcaggaagaagaggaacaggacaaaggctaaggtcccagcccaggcaaacgggacgccaaccaccaagagtccagcccctggcgcccccacccggagccccagcacccctgccaaatccccaaaactgcagaagaaaaaccagaagccacccccggttctgggctgggaccctggctccagggccatgtccagggctctggtgtttgcctgggttggtgcaggttgatgtgctggctgcaggcaggtgtgaccatctctcgtgcctgccacctctttgcccccaggcttttttgctgtgagggagccaccagggggtgatttaaataggtttatttcttcatttacaagaggaatatatttggcttctctcttaagactctgagattcacaatcagcagctctaaaaaataaaggagcagtttggcttccggaaggaaaa

SEQ ID NO: 10937 - DNA, 3639 bp, Homo sapiens
  SIMILAR (474)..(1010): 961254mologous to Homo sapiens serine hydroxymethyltransferase,accession number L23928,Smith-Waterman Score=887.
atgagccaccgcgcccagctgaggactctccagggagttgtatcttatgattccagtagtggaaagaacaaaatcaaaacactgtatggcgaaatcctcaacgggaaggacctggaattcacatccttcgagatatcatctgtacctcagcactgttgtgacccgtattccagcgtggtattccttgaagtagatgtggatgactgtcaggatgttgcttcagagtgtgaagccgaatgcatgccaacattccagtgttttaagaagggacaaaaggctcactttcagatgccctccaggtggccttgtcctggccactgccacatctgcaccgtggagaaaccccagctgaggtatagggctggcccaggtcacacagtgaggccgtgtgaggaagagcaccggtctgctctgggcctggtcctcgcctggtggctgggagtgttcatctgtagcttcatggtggctgcccccatcttcggctacctgggcgaccgcttcaacaggaaggtgattctcagctgcggcattttcttctggtcggccgtcaccttctccagctccttcattccccagcagtcccctgcagagagctgtgacctgctgggtgacatccagacctgcatcaggaaaagtctgggagagaagccccgccggagccgcaccaagaccatcgacccccaggaacccccgtgggtagaggtgctggtggagatcttgctggccctgttggcccagcccagccacctcatgcgccaggtggcccggagcgtgtttggccacatctgctcccacctgaccccgcgtgccctgcagctaattctggatgtgctgaaccccgagaccagtgaggatgagaatgaccgtgtggtggtgacggacgattctgatgagcgccggctgaagggtgcagaggacaagagcgaggaaggtgaggacaacagaagctcagagagtgaagaggagagcgagggggaggagagcgaggaggaggagcgcgacggggacgtggatcagggcttccgggaacagctgatgaccgtgctgcaggctgggaaggcgctgggtggagaggacagtgagaacgaggaggagctgggggatgaggccatgatggccctggaccagagcctcgccagcctctttgccgagcagaagctgcgtatccaggcccggcgagacgagaagaacaagctgcagaaggagaaggctctgcggcgcgacttccagatccgggtgctggacctggtggaggtgctagtgaccaagcagcccgagaatgccctggtcctggagctgctggagccgctgctgagcatcatccggcgcagcctgcgcagcagcagctccaaacaggagcaggaccttctgcacaagacggcgcgcatcttcacgcaccacctgtgccgtgcccggcgctactgccacgacttgggtgagcgcgcaggggccctgcacgcccaggtggagcggttggtgcagcaggctggccgccagcccgactcccccaccgccctctaccacttcaacgcctctctctacctgctccgggtcttgaagggcaacactgctgagggctgcgtgcatgagacacaggagaagcagaaagctggcactgaccccagccacatgcccacgggcccgcaggctgccagctgcttggacttgaacctggtgacccgggtgtactcgacagcactgagctccttcctgaccaagcgcaacagccccctcacagttcccatgttcctcagcctcttctcccggcacccggtgctctgtcagagcctgctccccatcctggtccagcatatcacgggcccggtgcggccccgtcatcaggcctgcctgctgctccagaagaccctgtccatgcgggaggtgaggtcgtgctttgaggaccccgagtggaagcagctgatgggccaggtcctagcaaaggtcaccgagaacttgcgcgtgctgggggaggcgcagaccaaggcgcagcatcagcaggcactgtcctccctggagctgctcaacgttctcttcaggacctgcaaacatgagaagctgaccttggacctgacggtgctcctgggtgtgctgcatagggcaacagtaagagcctacagcagggggcacactccaccggctatagacgcctgcacgagctatactggcaggccatgaaaaccctgggagctcagcgccccatgatggagaataacgatgcctaagagatacccattgccacccatagccccaatagtaggaagcggaagaaaaagggattcttgccagagacgaagaagcgcaagaaacgcaagtcagaggatggcacgccagcggaggatggcacacctgcagccaccggcgggagccagccccccaatgcatgggcaggaagaagaggaacaggacaaagtgttaaggtcccagcccaggcaaacgggaacgccaaccaccaagagtccagcccctggcgcccccacccggaagccccagcacccctgccaaatccccaaaactgcaggaagaaaaccagaaagccgtcccaggtgaatggagctcccgggtcccccacggaacctgcaggccaaaagcagcatcagaaggctcttcccaaaaagggggtcttgggcaaatcaccactgtccgcgctggcacggaaaaaggcaaggctgtctttggtcatcaggagtcccagcctgcttcagagtggggccaagaagaaagcacaggtgaggaaggcagggaagccctgagcacaggtacgggcccccctcagcccctgccttccatctgcctgagacgcctattttttttttttttttttaaaaccatgattttaatacgcaagctgtttctaaggcgctgccactggggagggtggctgttgccgcctgcccgggcatcctgctctggcaagcacagcctgagccattccttgcaggggtcccagggtgcaagagacttccccccccccggttttgggctgggaccctggctccagggccatgtccagggctttggtgtttgcctgggttggtgcaggttaatgtgctggctgcaggcaggtgtgaccatctttcgtgcctgccacctctttgcccccatggctttttttgctgtgagggagcccccagggggtgatttaaataggtttagtttcttcatttacaagaggaatatatttggcttctctcttaagactctgagattcacaatcagcagctctaaaaaataaaggagcagtttggcttccggaaggaagagcgaggcaacactcggacctggttcttgtacaacaagaaaacatcgctgggcgccccgctgaggctggtagtgggggtggaggctggtctttggaggatgccacccccaccccatcctcttttcagggccctcggggtaccccagaagcttgggtggggtgagtattccacctgtttacacaccactggaaggccacagccaggccagtaactacaggggcaagaaagagcattgtccaagctggctcttggggggggtcccccattggccacaaaggcctcaccccccaccccatccccgtaaccagaaaccaccttgattgcagcagaaattcaggcagatgggtagcgcaggggggctaacccccccacaagcggg

SEQ ID NO: 10938 - DNA, 1214 bp, Homo sapiens
  SIMILAR (27)..(812): 601254mologous to Homo sapiens Cellular DNA-binding protein RS1,accession number R14163,Smith-Waterman Score=659.
ggactcggagatccaggagtaccagttcttagatcaggaggactggggcccccagcggacctcaaaggagatcaggcagttgcagaatgactgcatgaggcttcgggagtcactgaacaccacccaagtgcacaacctggccctgggggagaagctgcagaacctgcccaccttattgtataagagcctgaaggagggagcccaggccatccaggaggaggcccaggccatccaggatgaagtgaaggccctgcaggaggaaagccaggccctgccggaggtggctctgctcagggctgtcgcagaagctctgagccgtctggcacatagagtggacgaagcccacgatgaggccctcacggacaccctgactgcagaactcaccctgcaagagaaggtgcccaggtccacagcaggtcccctcttccaggtggggctcctgtacgaagagggtgttcgcaaggcccagagcagcgactccagcaagaggactttctccgtgtacagcagctctcggcagcagggccgctacgcccccagctatacccccaagtctggctgtgccccgatgaacaccaacttcttgagcaatatcccagaagctatttctctgaacgtattgatgtgttcaagccctgtggagttcaacaagggtgtccggtgcttgaccgggcatcatcaaagatcagccctgaagacgctgctgggagtgtggtgcggctgcgcagcctttgggcggcttcgggcttgcagcaaggtgcaagtggacttgccacttttctgcagcttcttacctgtggcgttttgtggcccgacgaagaactcgtgcacttgctgctggacgaagtggtggcctctgctgccctgcgctgcccagaccctgtgcccatggagcccacgtgtggttgaggtcatcttgcgaagcgcggctaggcgcagccgcatagccatgcacacggtctgtccctgcaccccatggagacccaggatctggtctcggtggtccttccccgcaggcaaggtgtcaggaccggcctaataaacatgtgtggcctcctcctctcgcttgctgggcgggcctttccgggggcggggttttgaagctgaggcgtctgaggcgcccgcgtcgggtccgcccccgagcgccgattggctggtgtgctgggcccagcatgggcagggggcggttccacttaaaaaccctgggacgaaaa

SEQ ID NO: 10939 - DNA, 993 bp, Homo sapiens
  SIMILAR (314)..(165): 571254mologous to Homo sapiens Human secreted protein, SEQ ID NO: 7115,accession number G03034,Smith-Waterman Score=144.
atgatgaagttggttatccacctcaacctcattttttccagtgagaaactgagttgggggaaattatttcttgtgcttgataccagtcagaatgaggggagagacgtcacaaatgtggaagtgtgtccagaattgatgttcagatgggtccggagtttcttccttctggtgggttcgtggctgacatcaggagtgaagctgcatccctttgtggtgagtgttacagctcttaaaggcgatgcgtctggagttattccttcctcccggtgggttcatggtcttgctggcctcaggtgtgaagctgcagaccttcgcgactcaggtgcccagctggcttcacccagtggatccctcaccaggactggaggtggagctgcctgccagtcccgtgcagtgtgcccacactcctcagcctttgggtggtcgatgggactgggtgccatggagcagggggcagcgctcatcggggaggctcgggcctcacgggagcccatggaggaggtgggaggctcaggcatggcagcctgcaggtcccaagccctgccccgtgggcagctaaggcccagtgagaaatcgagggcagcgccggtgggctggcactgctggggacccagtacaccctccgcagccactggcccaggtgctaagcccctcattgcccggggccgacagggccggccagctgctcagagtgcagggcccgccaagcccatgcccacccggaactccagctggcccgcaagggcggtgcgcagccccggttcccactggcgtctctccctccacacctccctgcaagctgagagagcaggctccggccttggccagcccagaaaggggctcccacagtgcagcagtgggctgaagggctcctcaagtgctgccaaagtggtagcccaggcagaggaggcacagagagcgagcgagggctgtgaggactacctagcacgctgtcacctctcaataaggaagatgagacgtagaaatcaatga

SEQ ID NO: 10940 - DNA, 1560 bp, Homo sapiens
  SIMILAR (1530)..(1709): 451254mologous to Homo sapiens guanine nucleotide-binding regulatory protein 2,accession number M60165,Smith-Waterman Score= 100.
atgagccacctgggccgactggccctccttccccacagagcccctggcacccaggacttcctggcaggtggtcaagcacccacgtggtcttcacacatctgcaccttgcaggtccaggatggagctgcgatcatcgctggatgggaaagcagcttcctgtctccctctcagcaagtggagtgcagggggttcccaggttcagatctcaggatatgtatcaaagctcaaggaacaagtttccttctggggctgcccatgtcccccaagaatgggctgtcccctggaagaaccaggggaacactcatcagtcctctagaccgtctgaatctggttgctgtgcccaagctgaaggctccaaccaatgccatcaaaggcaggaggcagctggtcccagcaggctcagtcttcctgacggtggaagacgtctggagacacctagacaccctaatggtccctggtattggaacaactcaccacagcgcctcaattaatggagaagaggggatccttcgtggccagaacctcaagggaaaccccacacaggaggagcacgtgttccagcgtgccaaagaagggagatctgtctttcccccttccggggcccacggcgaagacaaaaagagaacatttatgagtacctgtgacatgcaacgcactgcacctcgtgctgggggtgcagggcaaggtgtcaacccccgaagagtgctcagacctgtggggcaacaagcctgtaaccaaaccgaaggcgtggtgctccacagaagagtgttttctgggtggcaatcatctctttatatcatctttcttcctgcgccgtggggactcaccaaggaccttacagttgttggtgtcatctgcgaaagccatatccccttcacccaggatgaagtccacacactgaatgcagctttcaggccacggcgtgctgcgctgggtgctcagagcaaagatcagccaaaaggagtccacgcctctgctgttcagtgcaagggcgatgacagtgtaaacaagagcagtgccctgacacctgaggagctgaatgaggatgctcggctgctcgcggctcctctcctggaaaagtggaaaaacacaccggggtccctgggcagcctgctaaaggctaagggctacagtgtgaatgccagccgaccaataggttctgccgaaaagaccctctctggctcacaaggtgctccctggaatgaacaggagctggccgtgcctgccaccatctatgcccacccctttcctggtgcagcaaagatcctgtggatcagggagcactgcggatgttcatttaacatcatagagacagaaggaagcctaaccgtgagcttccaggatggtgtctgtggccccagcgcccaggagcccatctttgataccctctactgtgctcctatattaattatgcagggtgctatcacagcacttatcacagtgaatctaacagggaagagagaaattaaacaagtcattacggtaaaagagcatgacgaaaggacccccagggagaaggtagttcatcctgaacactcctccctggtgatatgcttttga

SEQ ID NO: 10941 - DNA, 438 bp, Homo sapiens; identical to SEQ ID NO: 1740
  SIMILAR (222)..(461): 981254mologous to Homo sapiens ribosomal protein L21,accession number X89401,Smith-Waterman Score=415.

SEQ ID NO: 10942 - DNA, 1163 bp, Homo sapiens
  SIMILAR (72)..(590): 431254mologous to Rattus norvegicus ribosomal protein L21,accession number M27905,Smith-Waterman Score=246.
tgggaagaggtcatggatgatgactgttgaatgctaaggctccatggctgagcgatgcctagtgtactcccctcaagaacacgaggagcttagaagagagaagcaggcctcatctggggcccaacacactggtggtctggctcagaaattgggcaaggataatcctaggggtgaagagcatcattagtccagcgcaattttgcccatttttcctttcttattcagggaccttccttggtgaccttcgtggaccctactctgtctcatgcagcctggcttctcacgtggcttgtacagggctctccatggatttgggcaaaccctcgtggcctcaagtgacagtcacatgactccaaccccattgatggctgtccctctggcttccttccctcctcccctacagtgtttccttcagttcccaaatcaactttctgcactggaatccttgtctcaggatatgcttctgggggaacctacgacacttgtcattgccagccccaaatctgcttctcttcctagggacctctatctcagtgccctccccttccccgcctcctcccaccccttggtgtatatagtaaaggccgggcgccgcacgcagacacacactcgccaggacacaggcgcacacacgctcacgcacaaccagcagcggcggcggcgacagcgactcggtgacagcggcgacggcggctcccaccgcggcgcacccccttcaggcggccggcggcgaggccagaccggagagttccagcacactcatctgccgttctgccccggcccggaaaacccggcgccttccaggcccttcgaaagatggattctgttgacgtatctggcggccctggcgagcctggtggaaagttgggttttgccagattgcgccgggctccacctgatcgtctgcccgggtgcccatcatctcattctttccagactcaaagcctttccttcatggctcacaatgttgatgagcctcttgagtctgccacttcactccttgggctcctcagaaggagttggttttgtttcacatggcagaagcagactgtttactggagcacaggaagaatccgacattctggcgaaaaataattcattaacagccagggtattaccagttccctggaaaagctcctccagctgcactgtagcaactgttc

SEQ ID NO: 10943 - DNA, 2265 bp, Homo sapiens
  SIMILAR (110)..(3): 771254mologous to Homo sapiens Human gene 52-encoded protein fragment, SEQ ID NO:394,accession number Y86479,Smith-Waterman Score=163.
tcaatatcgctgatgaacatcgatgtgaaaatcctcaataaaatactggcaaaccaaatccaacagcacatcagaaagcttatccaccatgactgagtcggctttatcccttgcttgagaattttggtgatctatatttaacaaggctgtaaaatcctctatggctgcaaaccagttttcattttcacaataaaacagcccacgtttcaataatgcatctgttcttttgggatcataaaaaatacatctctgcagatcattcatggcactctgcaactttcccagtttcctataaatagctccacgcctacaatatgcaaatgcaggatattttgtcttatcatttatttcttcagtcaaaatcttcacttcagattcataatatttaatgacctcttgtggaagatcagactccacataatcatttaattttagttttggtggttctttcactctttcaggtgggtcttcaggaactgatattttatcatctttctcttttacaggtatgctcgcatctttgtactcaatgagcctatcaagagcccatgtccgaggatcaatattttctggaattcctcccttagcttggacgaatttttcaaaatttaaatacaaaggtaaactgggacaccgtatttgacgttcatataatggaactttgaacaaatatttcttctgtcccggaagtattccatgagatgctgatctttcaagagattttggaggcttggataactcttcatgcacgaatataagtttttgttgtttcaatcttttcttccatctcatcttctttttcttgggataaacaatgtaactaatgccagcttttttagacgcttcaatgagagtcaaagagagatttctcaaactgtgtttttcgcacatgttatcaaagatgtcatctatactttctttcacatagttgggctcctcagttttattttgcttagtgagctggagctgacgtttcaattcctttgctttctgaaacataacctcttttatactgctttgcatatcattcttgatttccaaaggagctatgatcttctccttcctcaagtctacagaagattttactcgttcctctcccaagacttccaagtgtggtttgtgagcacgctctctagttccttgtgccaattcaggtggtatcccttgcggtgtcggaggaatatggacatattcttggttgtcatccataacaggaattccatacaatattctatctgtttgttcttcatctgtaaagcgatcatctaagaaagaggttccaaattttccaagcagggtatcgtggcctttcctgttagcagtgtgatacactcgagaagccaggcgcaagtcaacaggcagctcctgggctgggatggtggtgcacagatcatgaaggtgcggcatggagtagtcttgtggaatttttttatgtagttttttatcacaaagaggttttgaagactttcttggtctcagtgatttacgtttccgcattcgcttaatttcttttccttcgatttgcaagaattctggtgattttgccgttaaagacacccacttggcttcttttgaatcacttgtgggctgtccatcttccaaaggtttacttaattcctctgctggctgaacttgcgaaatttcctgaggtttaaatactatgctttctgcttctgagggtccccattctatatcctcttgttcaatctggagaatacttgacatggtttcagaaagttccttatgcacgctcatttgcgattcctcagcacccatctggaatttatactctgcttgtatctcaggtgtttctgcttgcataggtgatgttttgaggtacatttttcccattaaagaaatatctaaattgaagagacagaaatcagatgagaggaggacaaaggggctagaatttgtaaggaacagtgtggagatgagggcactgcatagagaaagagctccagaaatcggcatagggtccttgaggctttggctgaaagtctgcccatgcaatggagaaacccatgaggctagacaaagaaaccatagaccactgagggcccatggcctcaggtaaaaggcactaccgcagagcataaagttacagacaagagcctctttccggctttcgggcttcaaaaatctagacttgacagtatttgacacagttattgcatccttcttgaaatgttttttcacttggtttccaccaaacacattctcctggtttttctcttctaccaggctcccctcagcttctttcat

SEQ ID NO: 10944 - DNA, 851 bp, Homo sapiens
  SIMILAR (68)..(259): 381254mologous to Rattus norvegicus proline-rich salivary protein,accession number M11901,Smith-Waterman Score=84.
tttatttctcaaaactatgtttaagttttaattccataattacctgttcatgtcaaaagactaaaatcagcgtcttccacagccctttctccctacaactcctccaccaccagctacaagagccacataagatgaagaaaaaagtccatacccgggcccaggcagtgataagaagtgcccaactctccaactaccttcccctcccactccctctgcaggtggctttccacccttgggtgaatctgggtcacctggagggcttgttaaagcacagattatggaggggatcagtatgtagcaatagctgctgactttaactatatttgcatttaccaaataccactgaactgactccttgggcccccaacttactcctgcttcttctgatcacttgtatgctcccaactcttccctaacctcactccacaacctcctctgccaatgtccttcagccctgtttctgttcactgggtaccacttgcattttggatagggcagttctctgtgcggagctgtcccacacactgtaggatgtgaagtacctctgatactctcattcccccaggatgctacagagcccacaggaagaacttctactctagcagctctaaagccacctgcccaccagggtttgactaaaggtccccccccctgagtatgatctcaatctggtcagcttgcttcagtctcttcctctggaaaatgggaataaatactaataattaccctgccatgtgtcagtgatgatccaatgaattaaagatcctaaagtggccagttatactctcattcgtgttattagagtaacttaggaattaatacccactctattctacatgatcacatcctga

SEQ ID NO: 10945 - DNA, 6933 bp, Homo sapiens
  SIMILAR (1033)..(3681): 941254mologous to Homo sapiens myosin X,accession number AF234532,Smith-Waterman Score=4250.
accgccaccttccagaggtgtgtgcacgttgcagagggtcgcacacaaggggctgcctgtagcctgtccccatcatggcccatctggctcttgctccaggcagaaggcctgaaaaggtgcactaagaacacagaaccaggtaagcccatcctgacagtgactgagcgccttgcactgcccatgctggggaatgtcctgctgctctgcttctttgtcttcttcatctttggcatcataggtgtgcagctctgggcgggcctgctgcgtaaccgctgcttcctggaggagaacttcaccatgtgagttcatcccctgccacccatgcagctccggccggaggaggatgatgagatgcccttcatctgctccctgtcgggcgacaatgggataatgggctgccatgagatccccccgctcaaggagcagggccgtgagtgctgcctgtccaaggacgacgtctacgactttggggcggggcgccaggacctcaatgccagcggcctctgtgtcaactggaaccgttactacaatgtgtgccgcacgggcagcgccaacccccacaagggtgccatcaactttgacaacatcggttatgcttggattgtcatcttccaggtgaggccattcaggcctggggccagcctggtctactacgtgatggatgctcactccttctacaacttcatctacttcatcctgcttatcatagtaagtgtcagggagcctgggctcctaggtgtgagcttcagcacagcacagtccccaaaatgtcaaggtgattcattcccaggagtcgctgctgaatccctgctgctgcgaggttgggttctctggcttcctggtggtgggagagaggtgaggggtccttggccttcaagcccaggccctgttgtcatagcgacccagttctcggagaccaagcaacgggagcaccggctgatgctggagcagcggcagcgctacctgtcctccagcacggtggccagctacgccgagcctggcgactgctacgaggagatcttccagtatgtctgccacatcctgcgcaaggccaagcgccgcgccctgggcctctaccaggccctgcagagccggcgccaggccctgggcccggaggccccggcccccgccaaacctgggccccacgccaaggagccccggcactaccgtaagtggccctgcatccgacgcggcactcaggcgccccacaccctggtgcagcccatccccgccacgctggcttccgatcccgccagctgcccttgctgccagcatgaggacggccggcggccctcgggcctgggcagcaccgactcgggccaggagggctcgggctccgggagctccgctggtggcgaggacgaggcggatggggacggggcccggagcagcgaggacggagcctcctcagaactggggaaggaggaggaggaggaggagcaggcggatggggcggtctggctgtgcggggatgtgtggcgggagacgcgagccaagctgcgcggcatcgtggacagcaagtacttcaaccggggcatcatgatggccatcctggtcaacaccgtcagcatgggcatcgagcaccacgagcaggccagtgcagcgcagccgggccgggcctgcgggagaggtgtgagggccccaggaccctgcccaggcctggatgacacatttgtgctgaactggggcctcatcagaaaaggggggcaggtgaaggcacctgggccatggaggtggggatgtaatgtggtcttcaccagcatgtttgccctggagatgatcctgaagctggctgcatttgggctcttcgactacctgcgtaacccctacaacatcttcgacagcatcattgtcatcatcaggtacccctcccccaacccacccggcagcagagtgctgtcggtgctgcggaccttccggctgctgcgcgtgctgaaactggtgcgcttcatgcctgccctgcggcgccagctcgtggtgctcatgaagaccatggacaacgtggccaccttctgcatgctgctcatgctcttcatcttcatcttcaggtgagcctgccctgctgggggccatacctcagccagcctccgcacggacactggagacacggtgcccgacaggaagaacttcgactccctgctgtgggccatcgtcactgtgttccaggtgagtggccgctgcgtgttcatgtttgctgggtacaatggcatggcctccacttctccctgggcctccctctactttgtcgccctcatgaccttcggcaactatgtgctcttcaacctgctggtggccatcctggtggagggcttccaggcggaggtgactgtggtcttggcagaggaagcacccccacagggtctgcgaaagactgggcgagggagaggtggcctggatgggggagggctgcaattcaaacttctagcaggcaacctatccctaaaggagggggttgctgatgaggtggtgagctcttcatcataggaagcatgcaaatggcagagctcatccaacatagaagagtttgataagctccaggaaggcctggacagcagcggaggtaaacaggccctcgcttgtcacctagagagccatgggcacctggaccccagtctcccactgggtgggcacctaggtcctgctggggctgcgggacctgccccccgactctcactgcagccggaccccatgctggtggccctgggctcccgaaagagcagtgtcatgtctctagggaggatgagctatgaccagcgctccctggtgagtccttgtggggagctctggacgggcgctgctgcctttgggcacctggtgccccagccgtgggtgtgcctgtggggcgctgacccgaacgggaactccttccagtccagctcccggagctcctactacgggccatggggccgcagcgcggcctgggccagccgtcgctccagctggaacagcctcaagcacaagccgccgtcggcggagcatgagtccctgctctctgcggagcgcggcggcggcgcccgggtctgcgaggttgccgcggacgaggggccgccgcgggccgcacccctgcacaccccacacgcccaccacattcatcacgggccccatctggcgcaccgccaccgccaccaccgccggacgctgtccctcgacaacagggactcggtggacctggccgagctggtgcccgcggtgggcgcccacccccgggccgcctggagggcggcaggcccggcccccgggcatgaggactgcaatggcaggatgcccagcatcgccaaagacgtcttcaccaagatgggcgaccgcggggatcgcggggaggatgaggaggaaatcgactacgtgagtgggggcggggccgaaggggacctggtgcggtgggataggacagaagtgggtgcggccgtctataagcccgactggtgcgaggtccgcgaagactggtctgtctacctcttctctcccgagaacaggtgggcagggccaggcctggggtgagggttagaccagggaaaggtgggtgacctcgtggtgtgggtgtatggtcagaggaggcagcgccaggtgggcaccctgagcaggtgtagagtcggcacccccaccctgcccaggttccgggtcctgtgtcagaccattattgcccacaaactcttcgactacgtcgtcctggccttcatctttctcaactgcatcaccatcgccctggagcggcctcagatcgaggccggcagcaccgtgagtggctgtagcctttgggcagggcaggcgttcacggccatcttcgtgggcgagatgacattgaaggtagctcccggtttcacccgggacccctgctaggcgtacctacgcagcagctggaacgtgctggatggctttcttgtcttcgtgtccatcatcgacatcgtggtgtccctggcctcagccgggggagccaagatcttgggggtcctccgagtcttgcggctcctgcgcaccctacgccccctgcggtgaggacccctcctgggcggatgggggaaagtggtggagacactcatctcctccctcaagcccatcggcaacatcgtgctcatctgctgtgccttcttcatcatctttggcatcctgggagtgcaggtgaggggtgcccagtctgggcagggactgggcgtggacacccgcaacatcaccaaccgctcggactgcatggccgccaactaccgctgggtccatcacaaatacaacttcgacaacctgggccaggtgagcaccaccgtcctagccctgatcagacccgatggttgggtgaacatcatgtacaatggactggatgctgttgctgtggaccagcaggtgggtgtagctgggaccaggccaagccttgattacttcatctccttcctgctcatcgtcagcttctttgtgctcaacatgtttgtgggtgtcgtggtggagaacttccacaagtgccggcagcaccaggaggctgaagaggcacggcggcgtgaggagaagcggctgcggcgcctggagaagaagcgccggagtgagtgggtgcctgtggagggcgtgggccaccgtcacacccggctgctcatccactccatgtgcaccagccactacctggacatcttcatcaccttcatcatctgcctcaacgtggtcaccatgtccctggagcactacaatcagcccacggtgagccctggtctgcctcccagcccaaggttaatgttcaccactgtctttgtgctggaggctgtgctgaagctggtggcatttggtctgaggcgcttcttcaaggaccggtgagtggccaggctggattagggcagtaataggtcagtcatgggcatcaccctggaggagatcgagatcaatgcggccctgcccatcaatcccaccatcatccgcatcatgagggttctgcgcattgcccgaggtgaggggcaaggggtgggacagggaacggggagggccctgctggacacggtggtgcaagctttgccccaggtaagagccactctttctggcagccctcctaggttcttcatctatgctgctctcggggtggagctctttgggaagctgggtgagtgactcccagagcaggcccgtggtgggggccggcatgccaccttcgagaacttcggcatggccttcctcacactcttccaggtctccacgggtgacaactggaacgggatcatgaaggtactcctgggcgggctggggtggagaaatcagagctgcctgagcagcctgcagtttgtgtcgccgctgtacttcgtgagcttcgtgctcaccgcgcagttcgtgctcatcaacgtggtggtggctgtgctcatgaagcacctggacgacagcaacaaggaggcgcaggaggacgccgagatggatgccgagctcgagctggagatggcccatggcctgggccctggcccgaggctgcctaccggctccccgggcgcccctggccgagggccgggaggggcgggcggcgggggcgacaccgagggcggcttgtgccggcgctgctactcgcctgcccaggtgggcaggggctggagaggtgtgagggtcgccatcaaggactccttggagggggagctgaccatcatcgacaacctgtcgggctccatcttccaccactactcctcgcctgccggctgcaagaagtgtcaccacgacaagcaagaggtaatggcagcccgggaggcctggccccttgtgcaggtctgcccatcccaaacctgggtgacccgaggccaccccctcttcctgcaggtgcagctggctgagacggaggccttctccctgaactcagacaggtcctcgtccatcctgctgggtgacgacctgagtctcgaggaccccacagcctgcccacctggccgcaaagacagcaaggtcagctcccctggggactcctgagcaggcgggggagacctgggcgaatgcttcttccccttgtcctctacggccgtctcgccggatccagagaacttcctgtgtgagatggaggagatcccattcaaccctgtccggtcctggctgaaacatgacagcagtcaaggtgaggggtgggagccctgccagctccccacagccagccctctcctgcccatgccagccgagttcttccaccctgcagtgtctgccagccagaaaggcccagaaaagggcactggcactggaaccctccccaagattgcgctgcagggctcctgggcatctctgcggtcaccaagggtcaactgtaccctcctccggcaggtaccgacacctcccaggccctagagcactggtcccagcagctccgcgggcagcctgcagaccacgctcgaggacagcctgaccctgagcgacagcccccggcgtgccctggggccgcccgcgcctgctccaggaccccgggccggcctgtcccccgccgctcgccgccgcctgagcctgcgcggccggggcctcttcagcctgcgggggctgcgggcgcatcagcgcagccacagcagcgggggctccaccagcccgggctgcacccaccacgactccatggacccctcggacgaggagggccgcggtggcgcgggcggcgggggcgcgggcagcgagcactcggagaccctcagcagcctctcgctcacctccctcttctgcccgccgcccccgccgccagcccccggcctcacgcccgccaggaagttcagcagcaccagcagcctggccgcccccggccgcccccacgccgccgccctggcccacggcctggcccggagcccctcgtgggccgcggaccgcagcaaggacccccccggccgggcaccgctgcccatgggcctgggccccttggcgcccccgccgcaaccgctccccggagagctggagccgggagacgccgccagcaagaggaagagatgagggtcgcaggggcccccggccgcccaccgcccg

SEQ ID NO: 10946 - DNA, 405 bp, Homo sapiens
  SIMILAR (400)..(134): 751254mologous to Podocoryne carnea 60S ribosomal protein L17,accession number X71382,Smith-Waterman Score=346.
tcctcttctggtttaggaacaatctgttccttttccgtaaggatcatctcaatgtggcagggagagctcatgtatgggttaatccgaccatgagctctgtaggtccggcggcgcatcttaggtgctttgttaattcagcactctttttgggccaccgaccttgtgtccagccccattgcttggcctgcgcacacctgccaactccaccattgtaacgtcggaatggtacacactgtttctgtaaagtgacatctttcagatacttcgtggcttttcgtatatgcatacccttgatggcctgagcagtttcacgagtgttcttaaagtgaacacgaagattggaacctcttgatttgcatgatttcgtggggttctccgggtcaagtgaatagcgaaccattttca

SEQ ID NO: 10947 - DNA, 372 bp, Homo sapiens
  SIMILAR (261)..(4): 841254mologous to Homo sapiens putative ribosomal protein (AA 1-184),accession number X53777,Smith-Waterman Score=364.
ttactcccatgccataagtttttgtttcatcagtttcttctgggatatctttttcttctgggcaacttcttcttctggtttaggagcaatctgttccttttcagtaaggctcatctcaatgtggcagggagagctcatgtatgggttaatccgactatgagctctgtaggtctggcagcacatcttagatgctttattcatttggatatgctcaatggccagagagtctacatctaaacccttaagttcaccattactgtccttgatggcctgggcagtttcacgagtgttcttaaggtgaatacaaagattggaacctcttgatttgcatgattttgtggggttctcccggtcaagtgtatagggcaccat

SEQ ID NO: 10948 - DNA, 530 bp, Homo sapiens
  SIMILAR (355)..(1404): 981254mologous to Homo sapiens HKR1,accession number AB013897,Smith-Waterman Score=1920.
attctctggtcattgagcatatccaagtgaacaaagcacctaagatgcgccgccggacctacagagctcatggtcggattaacccatacatgagctctccctgccacattgagatgatccttacggaaaaggaacagattgttcctaaaccagaagaggaggttgcccagaagaaaaagttgaggagctcaagctttgggaaaaatgcgtgcattccttgtatcgtcattccagttctgctctggatctacaaaaaattcctggagccatatatataccctctggtttcccccttcgttagtcgtatatggcctaagaaagcaatacaagaatccaatgatacaaacaaaggcaaagtaaactttaagggtgcagacatgaatggattaccaatcaaaggaccaacagaaatctgtgataaaaagaaagactaaagaaattttcctaaaggaccccatcatttaaaaaatggacctgataatatgaagcatcttccttggaattgtctctgacctttctatctgagaccg

SEQ ID NO: 10949 - DNA, 342 bp, Homo sapiens
  SIMILAR (61)..(210): 961254mologous to Homo sapiens dJ1153D9.1 (A novel protein (protein X 0001)),accession number AL109806,Smith-Waterman Score= 259.
ggctcgagagtgaacatagcacctaagatgcgccgccggacctacagagctcatggtcggattaacccatacatgagctctccctgccacattgagatgatccttactgaaaaggaacagattgttcctaaaccaaaaaaagagggtgcccacactaaaaaggtaaataaatagttgctcggttttgtttgtgatagaaaaaagatttgtgggtgctgggaggactatcttaggacacctttggaataactatcaaagaaaactattctgagcaaccctttctacctgccttattttggcttttggaagactggttcttgactaataataaatggtaagttt

SEQ ID NO: 10950 - DNA, 879 bp, Homo sapiens; identical to SEQ ID NO: 7210

SEQ ID NO: 10951 - DNA, 744 bp, Homo sapiens
  SIMILAR (434)..(607): 601254mologous to Homo sapiens PRO0663,accession number AF090944,Smith-Waterman Score=167.
tttttttttttttttttccttttaattacatttattttaatgctgaatttactcccgtgccataagtttttgtttcttcagtttcttctgggatatctggggaaagaaaaatgtgttgttaagtttcttagagaaaaccacagtacatcttggaggacttcagcttattctggaggcaggaaacctagtcgttaaggactaagggggaaaaatacttaaatggtagaaatcaacagaacttaagttcattagatgtaaaaagaagtgtacagaatcactcaggttcttgacttaaaagaactaaatgtgatcaattactgaaaacaagcttcttagatttggggagagggcccattttgaagtggctatgtacatctaagtggggccatcagcagataatcatacgggcctgaggtactgaatataaaactaccagttttttttttttttttgagacagcgtctcggctctgtcacccaggctgggaatgcagtggcgcgatctcggctcactcctagttcctcctcccgggttcatgccattctcctgcctcagcgtcctgagtagctgtgactacagatacccgcgaacacgcccagcttatttttttttgacattttagtagagacgggtttcacgtggtagccagatggctcgatctcctgacctgtgatctaccactcagcctccaagtgctgggatacagaaactacattattatagtcagacaacttccaagccgat

SEQ ID NO: 10952 - DNA, 974 bp, Homo sapiens
  SIMILAR (832)..(434): 381254mologous to Homo sapiens putative ribosomal protein (AA 1-184),accession number X53777,Smith-Waterman Score=98.
cattgcttccaagccatttaatttgggtacccccaggtttttcccctccccccgtttttaaaacccggcccccgaattttattttgggggccctataaaaaaaattttaccttgcaagcccgcgtaagtaaactttgatcctttaaaacggcccccccaggattttttttttccttttaattacatttaattttaatgctgaaatttactcccggtgccataaagttggtgtttctttcagtttcttctggggatatcttttttctttctgggcaaacctccctcttcctggtttaggaacgaatcgtgttccgttttccgtaaggagtcatctcaatcgtggcagggaagagctcatgtatggggttaatccgacccatggagctctggtaggtcccggcgggcgcatctttaggtgcttgggttcacttgggatatgctccaatgaccaggagaatcttacatctaaaccccttaaggttcaggcattactctctttgcgtttttaaggcatgtggcaggcaaaaatttcaggcactctttttgggggccacccgacccttggtggtcccaggccccattggcttgggcctgcggcacacctggcccaactgtcacccattgtaacggtcgggaatggggacacactggtttctggtaaggtggacatctttcaggatacttcgtggggctttttcgtatatggcataccctttgatgggcctgaggcagttttcacgagtggtccttaaagggaacacgaagattggaacctctttgattttgcatgatttcataggagttctccggggtcaagtgaatagcgaaccatttttcacagatcaccctagaggaaagtacagtgtaattctgtcaatacgtacttacagtaactcattcagtataaatatcagatgattcgaacagcttgcttcagaagagagtgtggttcattattaatccaaaggtgtcct

SEQ ID NO: 10953 - DNA, 960 bp, Homo sapiens
  SIMILAR (714)..(223): 571254mologous to Homo sapiens sporulation-induced transcript 4-associated protein SAPLb,accession number AF264780,Smith- Waterman Score=416.
ctaggtccataccacggaggccacgtgcaccaccactggagccaaaccctgtccatggccgtcaaaactcgccaccaggcaagaccacagtgtgttatccaccagcaatccccgaggtccaacgccacacaagtcaggcagccctgagacagcaggagccctgtcctctggggatgctggttccagaggagaaggcccgaggacagtctcttcagagaggagctcaccagggaaaggcggttccactctgctcgggactactgcttgagggccgggcccagcacacttcgcctctgcggtcttggggccctcttccaagtctttacaagcagcgtcttgagaggtagacagtttcccttcttcacttttaaagaccgcagtctctgtcttggcatctacagtaaggctgagcgtttccttcatgcctccattcatcactgtctcagttacctcgtctgtaatttctgcatcctcctctccatccgagctggcttccatggccacattgcctggtgcttctggctgagctgccagggcagttaattttgagttggatgaggaatgatcattttcctttattttctcagtggatgaggaatgatcattttcctttattttctcagttaccctggagctgtacaagtcacacacagctccattggagagaaaactggatggaaccatttgactgaaaatccatgtcaaaaggccaacaagaaagagctgagacacccttttagtgcctaaaatcttagatttgtgctttctaccttgaagaagcacaaaaagcacttgtcgaaacactggttgaatgaatctgttactgcctttaatattctttctttcattttggccttggaaaatgggatgattacgtgtcttggggatgatcttcttgtgtagaatcttgcaggagttctctgtatttgaccgttggcctctttctcctccttctgccat

SEQ ID NO: 10954 - DNA, 549 bp, Homo sapiens
  SIMILAR (337)..(441): 571254mologous to Homo sapiens FIC1,accession number AF038007,Smith-Waterman Score=113.
atgttcgctggagtgctgtcagctggtaatgatgaatttagagtgatgctaaatatgctggcctgtacaactttctccagcaaagctgagctatttgagtacagacatggagaagcctcagcctatacccccaactgcccaagaaagtatgcccaaccagtaccaccaggagtgggactgcccctaaagtcaaactgtgtccattgtgggagaattacccatcccaagaaagcgttgcgagatcggcatctgggatgcccagaaaagatccctcgactcactggtccctgggccacgatcagtgtgcctactataagcaaaaaggccactggcaatcacagcatcctaaccatccccgggccagataccaaattaatgcagaatagtggaaagtccacttttaaacgaacacagatagaccatctcatgaatgtccttgtactctggtggtccacagaacgttggaccaactacggcataaaagctctacatcggggggcaagactcatggttgacactggggtctttatcaaaatctccctggattaa

SEQ ID NO: 10955 - DNA, 477 bp, Homo sapiens
  SIMILAR (167)..(226): 751254mologous to Human endogenous retrovirus Method: conceptual translation supplied by author; putative hybrid protein similar to HERV-H protease and HERV-E integrase,accession number U34991,Smith-Waterman Score=82.
ttaatccagggagatttcaataaagaccccagtgacaaccaggagtcttgccccccgatgtagagcttttatgccatagtcagtccaacgttctgtggaccacctctgagaccatccttgaacatcagtagactgggagctgtacttggacgggagcagcttcgccaacccttgcaaagtgactctgaagacgacgacaagccctgcttcagtcacaccggaagctgactggtccatgcacagccaaagcatgaggaactcattgcgggactcattttccttaaaatttggactgatcattatccatgactttctcacacccacattcaatccattagaaaatccttgtggctttctgacacgattttgctgtgtccccaaccaaatctcatcttgaattgtatctcctttaattcccatgtattgtgagagggacctggtgggagataactgagccatgggggcggttttccccat

SEQ ID NO: 10956 - DNA, 915 bp, Homo sapiens
  SIMILAR (1)..(840): 1001254mologous to Homo sapiens dJ486I3.2 (KIAA0721 (NAP (Nucleosome Assembly Protein) domain containg protein)),accession number AL050331,Smith-Waterman Score=1424.
ccccctaccaacccaaagctaagaaagatttaactttttcatctattctattactcttctttctttcctcgtgctattgctgaccatctagttattaacataaccaagtcaatttcacctcaaactattgcatttaatgcttgccttgttataccctgtggggacttgccaagtcaaagacagctctctacttcagaaaagtacttctgtccctcctgactctcctcagactggacattagtaaactaggaccatttaatccagggagatttcgataaagaccccagtgccaaccaggagtcttgccccccgatgtagaactttcatgccatagttggtccaacgttctgtggaccactgcagccaaaacgccaattttctgctcctactgagaggtgaagccagctggacttcctgggttgagtggggacttggagaacttttctgtcttacaagaggattgtaaaatgcaccaatcagcactctgtagctaggactgtaaaacacaccaatcagtgctctgtaaaacgcaccaatcagcagaatcctccccgtctgtatgcagccaccatgcagcccacctaggctgtgggctctgttgatgccgccttggagtgtgcggcttgctctgggtgggccttccaggggaggagggaagttggaactggcaatcgagccgtagagagagagcaaatgggaagcagcttgtgttccccaggcctggactagcatgcccttcctggcatccatttttcctgctgggccccaagggacctggccctgtgcgtcagttctgtggctgctagaccttgggctctgtggtcgggtctttggacatgacatctgcacgggctgggggctgaggctgctggccagggcgagccagggcaggccaccaggctgcagaacccacat

SEQ ID NO: 10957 - DNA, 1404 bp, Homo sapiens
  SIMILAR (33)..(272): 971254mologous to Homo sapiens gluRC,accession number Z83848,Smith-Waterman Score=409.
cggacgcgtgggcggacgcgtgggcgcagccgcctccagggcaatttgcatatttctccaaagaaccatccagaacctgagcagcctgtcttcagacagagagaggcccacggctgtttcttgaaatctggcgctgggaatggccatgtggaaccaggccatgccagaggctgcctcagcagcctctggtagctgagcccactgcagagggggagccacacctgcccacgggccgggagctgactgaggccaaccgcttcgcctatgctgccctctgtggcatctccctgtcccagttatttcctgaacccgaacacagctccttctgcacagagttcatggcaggcctggtgaagtggctggagttgtctgaagctgtcttgccaaccatgactgcttttgcgagcggcctgggaggtgaaggaacagatgtgtctgttcaaactttactgaaggaccccatcttgaaggatgacccgacggtgatcactcaggaccttctgagcttctcactcaaggatgggcactatgacgcccgggccagagtcctcgtttgccacatgacctccctgctccaagtgcccttggaggagctggatgtccttgaagagatgttcctggagagcctgaaggaaatcaaagaagaggaatctgaaatggccgaggcatcccgaaagaagaaagaaaaccggaggaaatggaagcgttatctcctgataggcctggcgactgtcggaggcggaacggtgatcggtgtgactggaggtctagctgcaccccttgttgccgctggagcagcgacgattattggcagcgccggggcagcggctctgggctcagcagccggcatagccatcatgacctcgctgtttggtgcagctggagctggcctgacaggatacaagatgaagaagcgagtgggagccattgaagagttcacgtttctgcctctgacggagggcaggcagctgcacatcaccatcgccgtcacggggtggctcgcttctggcaaataccgcaccttcagtgccccgtgggctgccctggcccacagccgtgagcagtactgcctggcctgggaagccaagtacctgatggagctcggcaatgccctggagaccatcctcagtggtctcgccaacatggtggcccaggaggccctaaagtacacagtgttgtctggcattgtggctgccctgacctggccagcctcactcctcagtgtcgccaatgtcatcgacaacccctggggggtgtgtctccatcgatcagcagaggttggcaagcacctggcccacatcctgctctcccggcagcaggggcgacgacctgtcaccttgattggcttcagcctgggagccagagtcatctacttctgtctgcaggagatggctcaagagaaag

SEQ ID NO: 10958 - DNA, 1693 bp, Homo sapiens
  SIMILAR (280)..(2706): 991254mologous to Homo sapiens glutamate receptor subunit GluRC,accession number X82068,Smith-Waterman Score=4228.
catgccagaggctgcctcagcagcctctggtagctgagcccactgcagagggggagccacacctgcccacgggccgggagctgactgaggccaaccgcttcgcctatgctgccctctgtggcatctccctgtcccagttatttcctgaacccgaacacaggtgagttcttctgtcttgccccctggggactcctgtaggactgcactcagatgcccactatggacagagactggcggtggcagtgcacgtggagggcactcttcccttcacttcttccacatttgcagcagccagcgttttccagaaagcacgtccttggcagcatccaggagagcagatggccttctctgggaagccttttctggtggctgccgtcacttctgcaggtggatccggggctccctctgtgggctgcactgaactgatctccacctctgtcctagggtaccacacggctctagagatggcaggcctggtgcagtggctggagttgtctgaagctgtcttgccaaccatgactgcttttgcgagcggcctgggaggtgaaggagcagatgtgtttgttcaaattttactgaaggaccccatcttgaaggacgacccgacggtgatcactcaggtacacccaacacctggtgtcaaggatggtaagttgattttctaagccagagtcctcgtttgccacatgacctccctgctccaagtgcccttggaggagctggatgtccttgaagagatgttcctggagagcctgaaggaaatcaaagaagaggaatctgagtaagagagccccgcgaccaaaacagaaggtggtggtgaggataaggacagaaaacaccctcttatgggagataagatgacagagagtaagaccgatttatggatctatgagatgggcaatgcgggcgtcttgctcttcaggaggtatctctggcttcagcctaagaagaaagaaaaccggaggaaatggaagcgttatctcctgataggcctggcgactgtcggaggcggaacggtgatcggtgagtccagctagagatgtgcaccccttgttgccgctggagcagcgacgattattggcagcgccggggcagcggctctgggctcagcagccggcatagccatcatgacctcgctgtttggtgcagctggagctggcctgacaggtaaggttcaaaaggaatgagtgggagccattgaagagttcacgtttctgcctctgacggagggcaggcagctgcacatcaccatcgccgtcacggggtggctcgcttctggcaaataccgtgaggaccaggaggaccaggctgccctggcccacagccgtgagcagtactgcctggcctgggaagccaagtacctgatggagctcggcaatgccctggagaccatcctcagtggtctcgccaacatggtggcccaggaggccctaaagtacacagtgttgtctggtaagtgcccccacctgccctggccagcctcactcctcagtgtcgccaatgtcatcgacaacccctggggggtgtgtctccatcgatcagcagaggttggcaagcacctggcccacatcctgctctcccggcagcaggtacctgggaatggctgtgtgattggcttcagcctgggagccagagtcatctacttctgtctgcaggagatggctcaagagaaaggtgagcatggattattgtc

SEQ ID NO: 10959 - DNA, 324 bp, Homo sapiens
  SIMILAR (276)..(121): 441254mologous to Homo sapiens putative p150,accession number U93565,Smith-Waterman Score=139.
tcactgtgaacttgtcagtgctgcagcaaatccatcaatatgcaagtagcatatcgcgatatgcaagcataacatgctttcacttccaccattactgtcaggcaccagttcatttggtctcccttgctgctgatttttggtgtccatttgcatgaaatgccttattccacccctcactttaagtttatgtgagtccttatgtgttaggtgagtctcttgaaggcagcagataattggttggtgaattcttatccattctgcaattctgtatcttctgaattctttttcaggtgaatcagggatttcttcttgttttggatccat

SEQ ID NO: 10960 - DNA, 1980 bp, Homo sapiens
  SIMILAR (410)..(523): 1001254mologous to Homo sapiens gluRC,accession number Z83848,Smith-Waterman Score=208.
ttacattgttttttctagttcagtgaagaatgatggttgtgtttttatcggaattgcaatgtgtttccatttgtttgtgtcatctctgatttctttcagcagtgtttcattgttttccttgtagaggcctttcacctccttagttaggtatactcctaagtattttttttcagctattgtgaaagcagtagaattcttgatttgattctcagcttggttgctgttcatgtataggaaggctactgatttgtgtgcattacttttatatcctagaactttgctgaatttattgaccaggtctaggagctttttagatgagtctttagggtcttctaggtatatgatcatgtcacaaagaaacaatgacagtttgacttcctctttaccaatttggatgctcttgatttctttctcttgtctcattgctctggctaggacttccagtactatgttgaatagaggtggtgagagtgggcatccttgtcttattccagttctcaggggaaatactttcaacttttccccattcagcataatgctggctgtgggtttgtcataaatggcttttattaccttaaggtatttcacttgtacaccaattttgctgaggattttaatcacaaagcgatgctggattttgtcaaatgctttttctgttgctattgagatgataacgtgatttttgttcttaattctctttatgtggtgtatcacatttattggcttgtgtatgttaaaccatccctgcatccctggtatgaaatccacttgatcatggtggattatctttttgatttgcttaagtttatgtgagtccttatgtgtcaggtgagtctcttgaagacagcaaatagttggttggtgaattcttatccgttctgacattctgtacctagcctcgggagcctttgtcctggggcagatggtcagcgcgggcacgacaggaggggccctctggaccactccccgaggacccaggactctcctagagacagggccttggatcctgggacagagggaagcagaggccttgcgagttggcggtagggcgtccgtgacctccaccccctgagccggagctccagtgcggcaggacccggcccgggctgccccagctgcgcctcgcttccggctacaagtttgccccgtgcccgccaaattggtgagtctggaagcttctcttgggctccaggaagagggtccctgcttctgcttcggctgttccccacacggccaagtcgggggcgtcacccccagtctgtaggtgtcgctggatcttgcgccccctgcaacacctgtttcccagagcgtctggcgaggactctgcgttagcgaagcggcgcgcacacgaacacacacgcccattatacatgtcacttgccttaagtggttaggttggctctgttttgtgaaatatcgggggcgaatttcacccgatatctggctgaatttcccctgatagttcctaaatgtaacttctagtctcatcacatattctggcagttcatttcctggatgagtaaaatagccaagctcacactccccttgttcatcacctttatttctttccatacatattttcccgtgtgaatctttaattactagtttgaagtcttgaagggaaactaaagcagatatctgagctctttgtatcatgtcagaagggcattctcgtacttcccatccacaatctatctggttgggctgccctgggctacaagtacgtggatttaacatctttttagcttctttgtaggtttttgtgcgaacatatgttttttgagcagttgggtaaagacctaggagagcaactgctggattgtatggtgaaactgggtttaggtttgtaagaaacttccaattgtcttctaaagtggctgtatcaccttgtatcccacccccagcaattactgatggttgttgtacctccatattctcactagcaattggtgttttcttttttgcttgttttatagccat

SEQ ID NO: 10961 - DNA, 730 bp, Homo sapiens
  SIMILAR (167)..(583): 641254mologous to Homo sapiens DNA primase (p58 subunit),accession number X74331,Smith-Waterman Score=390.
aatggaatagtgcctcacctcgcaatactaacattgaatgtaaatgtcctaaatgctccacttaaaagatacagaattgcagaatgggtaagaatccaccagccaactatctgctgccttcaagagactcccctaacacataaggactcacataaacttaagttaaaggggtggaataaggcatttcatgcaaatggacaccaaaagctactatgaacacctttatgcacataaactagaaaacctagaagagatggataaattcctggaaaaatacaaacctcctagcttaaatcaggaagaattagataccctgaacagaccaataacaaggagcaagattgaaatgataagtgatgaagagaagactcttcgagaacaggagattgttgcctcatcaccaagtttaagtggacttaagttggggttcgagtccatttataagatcccttttgctgatgctctggatttgtttcgaggaaggaaagtctatttggaagatggctttgcttacgtaccacttaaggacattgtggcaatcatcctgaatgaatttagagccaaactgtccaaggctttggcaggccgagcctggttgagagaaggtccagagaacactttttcttatgtaggagagtggtgggagtccctgcctgggagcatgtcccgccagctgtggaaaggagcaggagagaagcgaaggagttcatttagggctgtggcgaagtag

SEQ ID NO: 10962 - DNA, 1281 bp, Homo sapiens
  SIMILAR (16)..(222): 421254mologous to Homo sapiens putative p150,accession number U93570,Smith-Waterman Score=130.
tcaaagggcttgccgtatgctgagaaacaccttcagaacgaagtgtccatcctgtctttttagcagcatctgctcagaaggtggggcagaagtggcctgcttttgaatgaccgttgagtcagcaatgaaatcaagatggaaattaacaaattcattgaactgaacaataatagtgacacaatctatcaaaccctctgggatacagcaaacacagtgcttaagtttatgtgagtccttatgtgtcaggtgagtctcttgaagacagcagatacttgactggtgaattcttatccattctgcaattaaaagagtttttcctttttccttggccttgccaggtgtccagttcaggagtacgtgtgtgcgctggagaaggaagcgcccatttaaatcatttaaaaggtatttattgaacataactttccgccctatccccaccatggtctttttaattactggagggtaccgagcacgaattcgtaagcatgtctttgtattttgggagtagataacttgtttctcgaatttcccaggttcactgttatcccatgccgatctcacctttgtattttgggagtagataacttgtttcttgaatttcccaggttcacagatgaagaagaattgtgcctgaggatggataacttccagagccttggatgatgcaatttggcacttttgagctaatctgccagctggattcaggctccccagaggttgcatcctgggcaaagctgacccatagcagccaaaaaaggacagcagctgctcattaaaatggagctgcatgttttgggtgccccgtactgggggagaattgaggacatttgagctcttctgccgggggtctttgtaccaggccaggacagccccttttgggcccccaggtgcaactctgtggagctcagtgagtttgcgggtcagttccctcagactcagctcaagaagaaacagagctcgcttttctgagaggctcttaattaaatgataaaaatgtgttccttcacagtgactgccaactcctgtccacctctccctgggcttggttctggctccaggcagagcctggaggatgcagaatgacaggtcggctccaagggcaagcagcgtgcctccagagcaatgagattgcacaccctcattttgggaagatttatggctggctcccaggagattctgctggggaccagactcaacaccacctgtagggtacccaaagtccggtggctcagtgaggagcacggtgcaccttgaggggcagtggttagcaaaagctgccat

SEQ ID NO: 10963 - DNA, 651 bp, Homo sapiens
  SIMILAR (1084)..(2460): 931254mologous to Homo sapiens putative p150,accession number U93564,Smith-Waterman Score=2255.
atggtggatgtcggaaagtggcccatcttcactctactctcccctcaagagatcgcgtctattcggaaggcgtgtgtcttcggcacctcagccagtgaagcactgtacgttactgacaatgatgaggtctttgtatttggactgaactatagtaactgtctaggaactggagataaccagagtacacttgtacccaaaaagctagaaggcttatgtggaaagaagattaaaagcctcagttacgggagtggaccacatgttcttctcagcaccgaagggaaagaatatggcaaagctgatgcaagatgggtttattttgatccaaccattgtgtctgtggaaattctgaccgtcgccctggatgggtctctggcattgttcctcatttatgccatagtcaaagaaaaatattaccgacaagtaaggtcatggaaatgtgagagtttggcattactataccaagtgtccaactccctgggtatcaagaggcagtcatggcgggagcagcaggtctgtggtctgagtagccccagtggtggcctcactggtagtgctgcccttgggggtggtccattctgtggtcatcccgtagtcacccccaagagcttagccaagcatctatatcctgtaacccggcagtttgactcctag

SEQ ID NO: 10964 - DNA, 861 bp, Homo sapiens
  SIMILAR (188)..(559): 721254mologous to Homo sapiens Amino acid sequence of a human secreted peptide,accession number Y12916,Smith-Waterman Score=413.
cggaagcctgaagcatgggcgctgagtgggagctgggggccgaggctggcggttcgctgctgctgtgcgccgcgctgctggcggcgggctgcgccctgggcctgcgcctgggccgcgggcagggggcggcggaccgcggggcgctcatctggctctgctacgacgcgctggtgcacttcgcgctgggaaagaatatggcaaagctgatgcaagatgggtttattttgatccaaccattgtgtctgtggaaattctggccgtcgccctagatgtgtctctggcattgttcctcatttatgccatagtcaaagaaaaatattaccggcatttcctgcagatcaccctgtgcgtgtgcgagctgtatggctgctggatgaccttcctcccagagtgggctcacccagaagcccccaaccttcaacaaccggcaactggctggctgtactggttgggctttaccctgttttttttttaacggtgtgtggggttcctgatccccaggaactggctactgtgggcagtccatgggcctagaacctcaagaaaatggcatcagaaaggaaaccagtttcagtggaaggaagttttcagtggaacttttcaaaacccataaacacccttattcttaactttcatggaaccagaatgaattcaaatctttttgtttggcccaaaatgtaatacattccagtctacactttgtttttgtattgttgctcctgaacaacctgtttcaaattggttttaaggcgaccagttttcgttgtattgttgttcaaataaatggggatatagggaaaagagaacaacattggaatttgtaataataaaatgtttaattataaaaacaaaaaaaaaaaa

SEQ ID NO: 10965 - DNA, 833 bp, Homo sapiens
  SIMILAR (263)..(832): 901254mologous to Homo sapiens gamma tubulin ring complex protein,accession number AJ249677,Smith-Waterman Score=886.
ggcacgaggccgggcgggagtagctggtggaccccgttgagctgccgaacttccgggactcccccgcgaccccttcccagcttcccgtccgctccgccgcagcgattgtctcggtgggttgattcggcacaaaccgcccgacccaggggccggtgcgcgtgtggaaggggaagcactcccctcgtggtcgcctggaggtgcgctggaggagggggtgacataaccagggactcgaggtccgccgtgggaatgatccacgaacttgctcttggctctgagcgggtaccctgggtccattttcacctggaacaagcggagtggcctgcaggtatcgcaggacttccctttcctccaccccagtgagaccagtgtcctgaatcgactctgccggctcggcacagactatattcgcttcactgagttcattgaacagtacacgggccatgtgcaacagcaggatcaccatccatctcaacaagggccaaggtgggttacaatggaatctaactgcgggccttctgcaaaagggctggattctgttttgcagccttatcgccaagcactgcttgatttggaacaagagttcctgggtgatccccatctctccatatcacatgtcaactacttcctagaccagttccagcttctttttccctctgtgatggttgtagtagaacaaattaaaagtcaaaagattcatggttgtcaaatcctggaaacagtctacaaacacagctgtggggggttgcctcctgttccaagtgcactgggaaaaatcctgggcgtttgtcatggggtcatgtataaacagctctcaacctggatgcttcatg

SEQ ID NO: 10966 - DNA, 1427 bp, Homo sapiens
  SIMILAR (946)..(2256): 951254mologous to Homo sapiens putative p150,accession number U93574,Smith-Waterman Score=2181.
tcagggatcaggttcggagaggccagggcggagagcccgcccgaatccagtgcccccgacggcggttgggcgagggtccgggagctccaaaccgcctagggccgcctgctcgggatccccgttgctcaccttggcctcgggctgactctcctcgagatcccaaccggctttcatcgcctcagctgccccgaccagcttatttggggcctgcctgctttccctgaccttcctggggtgtctctcggtcccttccctctctggctccatggcgtccgcatcggttaccggattctcaacggttccccaacggcggaagtagaagtcgagcgacttccggcagctggacttggaaaagcaaggagtgtcgggaatggcgaccaagcggctcgcgcggtactcgagggagttccgggtcgggggcgggtagctccgggtccagcgctggcgttggccgcagagcagggcacggcaggtggcatctgcggtgagggcctctattccccgcagccccggcgtctgcgacctgccctctctggcacggttggaaaggcgcctccctggacctcggtcttcagccttgggccaccttctacccgagggtgacaggagcccgaggcggacgaaccctggggccttgactgtgtggccttgaaccaatgcctgcctattttaggccttgggaaacgactggacgtgacagtgccctgcagactggttggaggtctcaggcaggccacacactgaatctgtcaaggtgttcaacctgttcgaaatgctcgttcctcggtgctgtaaagaaatagaacttaaacttaaatttaatttatttagtaaggccatttttacttcctgcagaaagggtacactcgccagcagtttttgccaggagagtacactgaacaaaggagacagggtcatttataacgtggcgcgtccaccctactgctgtgtccagtttccactggcgtggaacgggacctcacattctgtatttgtcctgattggctagcaacttagatctttttaaaagaggcagaggcagaggagagcaaagtaagggggcactcacttgtggaacgctgagaaaggtaaaaacgccttcaaataaggaagaggaacaggctatgacttaatgcttgcttgggccagtataagcattgccagggcaaatatttaggctaaattgtgggagctaagaatgtaaagtgtaatgatttctttaccatggctagcagatatttaagaatgttagcacaggtctttgaataaattttgcttctaagagaagctactatttattcctaattaaatgaagaggaaagtctctgaagaggaacctctacttcactttttactgatgtctcaagtacagcaggtaaaaatctcatcagaacaaacaacaaaggcttctatgaaacaggctgatt

SEQ ID NO: 10967 - DNA, 462 bp, Homo sapiens
  SIMILAR (452)..(87): 241254mologous to Cavia porcellus enterophilin-2S,accession number AF126832,Smith-Waterman Score=111.
  misc_feature (1)...(462): n = a,t,c or g
nttgctcaagcaacagttggttctcttccnccagctgctcaagcgggctcaggtntgcattgtggatgcgactatctcactgtcctcttccgaagggcgtcatagtccttcttgaccacctccaacttgtccatggccgtgtcatacagtttgttgagaatctcggatgacccgttgtgcttcaacacctgctgctgctgggcacggaggtcaccgatctccttctggtcctcctcgtggagccgcttcatgtcctcccatgactgctgcagcaggtttcgctcccgcagcagctgcccattctcccgcctcagcatgtccacgtcatccttcagccgagtctggtcactcaggagccggctgtggagtgtgtggtagaagtcagtctccttggccacctccacacacctcttcaaggagttggtgtgctggttctgcaggctctgcaggtccgacacgaaa

SEQ ID NO: 10968 - DNA, 1506 bp, Homo sapiens
  SIMILAR (1432)..(2619): 881254mologous to Homo sapiens putative p150,accession number U93563,Smith-Waterman Score=1863.
tcactgcactccagccgcaacgatcctgtctcccacagcaagggacccttctttagcggcagggcttccaggcagcacagcggcagcatacactccattctccagactgatgccactgtctttctgtccactgaggttgatgtgcagcggcgtgaccaccttcccacccagggacttcctccgccgcacgaccatgttgatggccccctccccattgaggagcgccttgatggcctgcttcttgtccttgttgatgaggtccacatcgttgattctcagcagccagtcattgacccttaagcggccatcagcaatgcttcctttgtccactttagtgacaaatatgccacagtcccccgggaaacaaggctcattcacaccttctgccatatcaaaccccagtgccttcaagtcaatatcctccgtctccctctcgaactctacaacttccgtttcccactccatggaatccgtgtcaatggccgagtcgtgggagctgtgggccatcagctgtcggaaccgggcctccttttccaactgggattccatctgttccttgagctccttcagctcgcggctgacatcattcttctgcttgcgggtgtcatccaggctgcgcagggcctcagccagctcgctcaccgcacggtcccgctcccgcctcaggttgtcacacagtgtccggatgctgtcacgctctgctacaatcttgtctcgctcctggaaggcccagtcccgccggcacttggccacatccgcctcctggagggcttccttcagctcctggcacagagccttgcactgctttcgaaggatttcaacctccttgttggctctcccagcatccattgtcaccgtgtctttgatctgccgcagcgcctccatctcctcattggccgccttcttctcagatgtgctgctcttgagcttggactcggccagctccacttcggtctgcagcttgtccagctcagagatgacctggtcacgctcactcatgatgagcttgtactcgctgtacacagcgtcccgctcctccctgtatttctccgactcctttgctgtcttcacctgcgtggttctcagctcggtcagctctgactgcagcagctccatctcccactgcaggtccttgttctgcgccgtggccttgttcagctcatggtggatcgcctcaaacctcctcagggagagggcgcactggtgctgcagctggatggccgtgtccctctgctgggtcagcatctctgtctgcttcagcaaccgctggttctcctcccccagctgctccaggcggctcaggtctgcattgtggatggcgactttctcactgtacctcttccgaagggcgtcatagtccttcttgaccacctccaacttgtccatggccgtgtcatacagtttgttgagaatctcggatgacccgttgtgcttcaacaccctaaagcttttgagagtcttgaggtccaattctccaggccctgcagtcacactgggctgattcat

SEQ ID NO: 10969 - DNA, 2865 bp, Homo sapiens
  SIMILAR (700)..(1794): 931254mologous to Homo sapiens putative p150,accession number U93572,Smith-Waterman Score=1835.
ttaatgaacacaggactgaggccagaaatgccgaagttctgcagaaaccgacagctcttggtcactaccaagcagcctgtaagaaccttcagacttgcgcacaaaagcaaagtaagactctcttttgtttaagtccctgttgtggagctcctggatccacagcaagccccatctggagagcccactggaaaatgagctcagccacttgccttcaaagagtggaatggagtcactggaaaaggcatccaaggcgagcaggtctttcccgtccttggacccgctgcgtttgtgcttgtgtttcctccgaaaaaaggaccggcgtgcagccgctgacagcgtctttgtggcgctattgtcatctttgacttcagacatgctgagcctcctggagaattcttggtccatcacatatttgctgggaatctgcccgcgctggatcttctgggcattctcgtccagctgccaagccatccaggacccgaacgtgccctggggtaaggtgtcatccacgtagaggatgtcgtccttcttaaagctcaactcttgctccacatctgccagccggtcgtacagggccctgatgtagaagctgtcaccaggcaggcccttggccttcgtgaactcctcagggcggtactgcaccttcaggcggacgccatccctgggcttcagcatctccacatagacttcctccactgtaatgttccgcacgtccaggctgccatactccaggatgaggtcccctggcacgaggccgtcaggacccttggcaggactgtcatcctccacctcggccacaaacaccccatgcaggttcccaccacacaagtgcaccccaagctccagctgggactttttgatgaagacaacgcgtggctccagggtcttcttgttggcatctcccgcaatcctggagctgctctgcttggctgggggggtgctaggcccctcgtcctgctccatcagtgggtcgatgacagatggatgctccggggtggtggtgccactgccctggagagtggagtgggtaccggcagggtccaggtgtgagctggaccgggagtggctgctgagctggtgcacgtgggggttgtactgggccaggatggtgatggtatcacactgctgcccgatgatgagccgcgcctgctgctccgtggcgctccgcaggtttatgccgttgaactggggaaacaccaggatgggctcagtgggggggtcggggctgtggacagggaggaggccctggggacttgggagcagtgctgttccctccagtaactgatccccatactcgaggccagcctggtgagcgatgctccccacggtcaccttggagacgtagatgccgcccttctctccactcacgatggagatgcccagcggctctgagcccttctgcaccttcacgtggcgtggctcctccacataaggcccaagtctggcaaccactggagaaggaggcagattgtccttttccttttggtgttcaggatcagatttcagaggtaagggatttggtttggactttgcttccaggccctgtatgcctgtgcttccaggagccagagagatgtccaggtaaacttcctggccacctccaggccctggccacactgctgagggagctgctgctttctgagtctgagggcatggtggacaggacgctgtaggtagaacctgctgctgctgggcacggaggtcaccgatctccttctggtcctcctcgtggagccgcttcatgtcctcccatgactgctgcagcaggtttcgctcccgcagcagctgcccattctcccgcctcagcatgtccacgtcatccttcagccgagtctggtcactcaggagccggctgtggagtgtgcccagggcatcaccagcctcaggtcccaacacttcccgtagatacagcggacaggagccaatggcaggtaggtctgtagcactcagaggcaagccaaaacctgctaacagcccaattccagaaacatccaaatcaccacttacaaactggtagaagtcagtctccttggccacctcctcacacctcttcaaggcgttggtgtgctggttctgcaggctctgcaggtccgacatggctcgcacgcactggatcttcagcctctcatagtcaggattcagcctgtggtagggcctcttgtcaaaggccgtgccatgcgtagcaaaggccaggcgcttgcggagctcgtttctctcccgggtcatcagccgcagctgaatggagaggttctccaccttctcattcacttgccggtcagtgaggaggggtggtggggacggcgccttcccggtagtgcagcagatgagtaacctccaggctcttgagcccctggcttgccattctttctcccgaacctggcccagtgccatgctaggcggggggcatgtgttggaaacctggctgacacgtgtgagtccgggagcgattgggcaccttcggtcattctgctgtggttcgtcaggctgtggttcctcagtgtgagcggcaatgaccagtagcctcattatcacattttcagagactctgaagaatctgaaggcgttgagcatgggctgaagagaatgactggggaatgggtaggtgtcttgtctctcaatacgactgtcagaagggattagatttgttcttgatggcctccagcagccaaaccaggagcagcgggtggatgctggagaaagctgcatctctaaacaggtctggatggccacggtcagcactgccaggtatgaaaagccattgtcatcatcgcctctgctgtcgtgcttctcttttgcatgtttggaaagcctcaagcgggaggaggaattcctcttgcaggttacacttgctttgtcatccgtcat

SEQ ID NO: 10970 - DNA, 642 bp, Homo sapiens; identical to SEQ ID NO: 6220
  SIMILAR (178)..(20): 441254mologous to Homo sapiens salivary proline-rich protein 1,accession number K02576,Smith-Waterman Score=70.

SEQ ID NO: 10971 - DNA, 461 bp, Homo sapiens
  SIMILAR (124)..(225): 671254mologous to Homo sapiens Peptide sequence derived from a human secreted protein,accession number Y40039,Smith-Waterman Score=110.
  misc_feature (1)...(461): n = a,t,c or g
tttttttttttttgagcatctcacgtatcacccagactgagtgcagtgcacaatccaggctcactcaacctccggcctccggngttcatttaatcaagctatgtttttaaaagcatattaacagcatttggaatgacctggatgagactggagactattattctaagtgaagtaactcagggatgaaaaaccaaacatcagatgttctcactgatatgtgggagctaagctatgaggatgcaagggcataagaataatacaatggactttggggacttggagggaagggtgagacgggaacaagggataaatgactacaaatagggtgcagtgtacactgctcgggtgatgggtgcaccaaaatctcacgcatcacaactaaggaacttactcatgtaaccaaataccatctgttccccccaaaaatctatggaaataaaaaaaataataaaaataaaata

SEQ ID NO: 10972 - DNA, 1679 bp, Homo sapiens
  SIMILAR (904)..(2883): 841254mologous to Homo sapiens putative p150,accession number U93572,Smith-Waterman Score=2834.
ggcaaggcagaccagatagaggcagcaaacatgggccaaaacgcatacacccaagtggtccatcagctcaggccagcacgccaccttctcaattcattccagaaaaattagcctggagccagggggcggcagagagcacagtgattggtaacaaaaataggaagagttgggtaacaaaataggagacgaaagagatgtcattctaatcagcatgaagtgaccagggtgatgatcagcaagacacccaggcagcaggaaccctgtgaggcaccaactaggtagccaagtgtatctaacggagaatccagggcctgaccaccaacacccgctttggccttcacctgccctacgtctgcagcagcacctctggctcagacaatgagcaatacagagtgtatcctaattcgtctatttcttcaggggtgaactctgcaaaataagttccaccttggggtttaagggcactgggcaaggactccagccctctaaagtaagctgataagtcccctcaaggcctgcaggaaacggtcggccagcatatccggagaccagtcagcctcctcctgggccaagtggaggatgacattggttagctggctggcagtgaggtggcccagagccggggtggacttgcatatggccttgaggatcttgaggcacagagatcggcagcccgagtcagcctggtccagagcccgcaggcgtgccgtctccgcgggacgcaggctcagccgccacaggttgtcatactgggctagccggtgtggtttggccaccgaggctgtgtcaccggagggtcactgatggcaggaagtcaatgaagagatgtttgtcacgctcatactgcacctccagtgtgagggcttctgggggtggggccgggcggatcacatagtccaagagggaccctatggctggccaattgatggagccagccactaccttctcaaatgtatctgcgactgtctttggagagaggtagccccctactacacagcggtcccagtaactgctcccacgaggaaagtactctggattctcacgacgcaccaggaagaagccagggacattcatgatggtgtcttcaccaggaaatctgtgccaacaacactatggtgctcagcactcaaaccccacccaccatgagaaccaccttgttacctgcaggtcatcgtagaggctgccactcaagtacatgtcccgaagcggcatgtcaggcaacttggcccgcaggaagctccggagctcggcacatatgtccacagcagcttgcttggcccgagcctgctctccagcagggatggctgcccggttccggtagtaagtaagaagtttctcctgcagggacatgcggagttctgctgagtgcaggagtggtactgaaagtccagagaggtcccaggaggggcagcagcccttctcacctgtgtcgaaggtggaggagtctgtgggaagggtctgcaaggaccggctcaggcccgtcttcatgtccctgttcagcagtcgtggggagcccatccagttgggttcttccctataaaacattacatcttatgaccataccactacattccacccccagccctggctgcatgcacttacccgcttaactgccagcgtggcgatgcccagcatggccgctccacccacccccagcaccagccgggcattggagagca

SEQ ID NO: 10973 - DNA, 408 bp, Homo sapiens
  SIMILAR (200)..(3): 801254mologous to Homo sapiens Human secreted protein HLYES38, SEQ ID NO:220,accession number Y86305,Smith-Waterman Score =296.
tgcatgacagcaactgtaatctcaaaaaccattattacaactaatccagtaagtacaatagttgatgtctacacagttgaacaattaaagggaaaagctttgaagaatgaaggaaaagctgatccttcctatggcatcctttatgcctacatttccacactcaacattgatgatgaaactacaaaagtagttcgaaatagatgttccagctgtggttatattgtaaatgaagcatctaacatgtgcacaacttgcaacaaaaactccttggactttaaatctgtctttctcagtttccatgtgctgattgatctgactgatcacacaggcacccttcattcctgtagtctcacaggaagtgttgctgaggagactttgggctgcacggtacatgagtttcttgcaatg

SEQ ID NO: 10974 - DNA, 359 bp, Homo sapiens
caatagttgatgtctccacagttgaacaattaaagggaaaagctttgaagaatgaaggaaaagctgatccttcctatggcatcctttaggcctacatttccacactcaccattgatgatgaaactacaaaagtagttcgaaatagatggtaaggatccgtgtcacttttagcaaattcatttttgtaagaaataattattgttaataaattttaagctctctaaaagttaaagctgtttgttgatgtaacaggggttatgtattggagataaatgtgtaaaaaactgtactgaaaagtttccatagcaaaccagattaaaatattataattgccttttaaaatataatctgtatttcca

SEQ ID NO: 10975 - DNA, 908 bp, Homo sapiens
  SIMILAR (23)..(127): 721254mologous to Homo sapiens A secreted protein encoded by clone dh40_3,accession number W80406,Smith-Waterman Score=127.
ttgaccacaatgcaggctgcatcttagacagggtctcgctctgtcgcccaagctggagtgcagcagtgctatcacagctcactgcagcctcgaactcccggggtcaagcaatcctccctcagcttcccgtttctgaggttacagcccaaagtctcctcagcaacacttcctgtgagactacaggaatgaagggtgcctgtgtgatcagtcagatcaatcagcacatggaaactgagaaagacagatttaaagtccaaggagtttttgttgcaagttgtgcacatgttagatgcttcatttacaatataaccacagctggaacatctatttcgaactacttttgtagtttcatcatcaatgttgagtgtggaaatgtaggcataaaggatgccataggaaggatcagcttttccttcattcttcaaagcttttccctttaattgttcaactgtgtagacatcaactattgtacttaaatttatggattctttgaaataactgtcaatttcatcatccagaacattcgtttctttattttctcgtataaaattcagcagaatgttagcttctggtatatctggattagttgtaataatggtttttgagattacagttgctgtcatgcagttccgaaatttgtcaaaatttattcttacatctgaggcaaatattacacagtcaccaaccctaaagctgtcagaaagagacttgatgtaatcttcattgccccaggaagctgcatttacaaaatgtgctggtgaatcccgaatggtgaagctgaaagtgtacctttctgatccaatatcccaagccagctcagaaccttccaattctatggaaaacacctggtaactgaagctcagcgtctcaaaggcagccttgaatcctcccttctcctccactgtcat

SEQ ID NO: 10976 - DNA, 521 bp, Homo sapiens
  SIMILAR (848)..(1177): 761254mologous to Homo sapiens putative p150,accession number U93563,Smith-Waterman Score=426.
ctgcgcaaggatgacacgcaaattcgtgaagcgttccatatttttgtccagtcctggcgtcccgccctgcccagcctcccgtccctgcccctagcccgtgccctggcagagaccctgaaccagccctttggcagcggccttatcaccccctcggggatcctgctcaacagccagatgctggacttctcctggcccaaccggacagctaaccactctgcacccagcctggtaggatttgcttccctgctttcctggggaccctgaggcctataggtaggaggtgcaatggcatggctgcccctttctccctactttctccagaatcttctagtataaggaagcctaaagaagaggttcacctcatccctagccctgctaagtctgggacatggagcctggtgggtctgaagaacccttgtcccattctgtcactgtcttactgtgtgaccttgtgaagatcttgccctctctgggcaatttcttcacctgtacaaagaggggtctgggctccaatttgaagc

SEQ ID NO: 10977 - DNA, 396 bp, Homo sapiens
  SIMILAR (178)..(74): 421254mologous to Rattus norvegicus malic enzyme (EC 1.1.1.40),accession number M35258,Smith-Waterman Score=76.
agcagaactgcttacgtcatgcttggcacgaggttcagtgcagccagggaagcggccactctctttcctgctgcccacagtggtccgacccgcggaggggctgtgtggaacctacctcgctctgggggccaatggagctgcgcggggcctcagcggcctgacacaggtgaggtttacgccatggttggcctttttcagccgggagccaagctgtggcctagactgcagatgcctgtcatatctgtggcttgtttccattcctcatgcggcaaacatgggctgaggctgttttgtgccaggcgcatcctgggcaatgtggacatgggctgcgctgagtttcttagtgaaaatggagccctgatgctccctgtcttttccggttggaagggaaatggg

SEQ ID NO: 10978 - DNA, 2331 bp, Homo sapiens
  SIMILAR (130)..(1131): 821254mologous to Homo sapiens putative p150,accession number U93569,Smith-Waterman Score=1387.
atggcggcggagaacgaggccagccaggagagcgccctgggcgcctactcgccagtggactacatgagcatcaccagcttcccgcggctgcccgaggacgagccggcgcccgcggccccgctgaggggccgcaaggacgaggacgcctttctgggagaccccgacaccggtgaggcccgctgaccccgtccctgccctgccttgggaagtccccggtcttccttcttctgtgtcaagcatccagggtcgccgctacgcgagacgcgcaaagacccgttctccgccgcagcggccgagtgctcctgccgccaggatgggctcacggtcatcgtcacggcctgtctcaccttcgctaccggtgtcaccgtggcgctggtcatgcagatctacttcggggacccccaggtgagggggacaaatggggagggggaggaaactggggagtggggagtggggtaatgtttgaggaactgtggaaagggatcttctgtggacgcagcggtggcagcagccttgtgtttgggtatcgtggctccacacagttctggcctgggcgggtaaggagcagtggaggtcggggtcccccaggcctacttcttgcctccaggtctgtaggcctcatgtgcagcacgggccctcagggaagagaccctgcaaagatcctgggagaccaaggtggggaccctggtgagaagagagagttcaggggagtctctcttcattgcccttctgctaacccaagcattaatttgctaagtattggcccaagatggcttcaacgtgactcatgatctaggtcagtggggcctggggatttgggagagacatgaggttgatggagaagggtagaatctttgagatttggagcccccgccactacctggctcgttgctgcatcggcccgacctggctgaggtgctggatgtacttggcacctccggcccggctgccttctacgcaggtggcaacctcacactggagatggtggccgaggtaagtgctcgtgttgtgcgggtgggggcatgccccaaggtccctattgcaggacatccgcgtccgcatttttttggcgtgtacagaggtgacctctcccccggctcccagggtcccccctcaggagaagcctcccagtccatggccacatcgttttggcctttcaatctcaccagcctggtatcccgagaacaggctcttcactgggtggcagaggtaaggctgacccgtctgcctttccctggatttaaggatattaggagtggggagattgggtactgccatagggcggatgacatgctcaggtgggtcttgggcaggacctgggggctacagaggcagcggtgggtgtggggaaagggtcaggagaaaagcagctatgaactagacggagctcccacggctgcccaggtgctgatcatgggacctgatgacttcattgtggccatggttaggtatgccagctcagactcagaacctggaacaagggatcctctgaaccaagagggggtgggggctgggtagaggttctcctggcccaaccggacagctaaccactctgcacccagcctggtaggatttgcttccctgctttcctggggaccctgaggcctataggtaggaggtgcaatggcatggctgcccctctgtggaacctacctcgctctgggggccaatggagctgcgcggggcctcagcggcctgacacaggtgaggtttacgccatggttggcctttttcagccgggagccaagctgtggcctagactgcagatgcctgtcatagcagtccaacctcctgcaggtggacagtgagtgcagagcagagacctcgtggggcgggcacagggacaggtagagaaaggactcctcccaagggtgcccatgggtccatggcagccgaaggaccaacaacttcatcatcgctgttaaggaccctcggagcccagatgcagctggagccaccatcctgtagagcagcggggtggggcggggtctctgctcccccactttgcatgttcccagagtccctccttctcccaggtttggtctcagggggaccccagggatgccccagatcaggggccagaggggatgcttagcatacccaatcccagagtaactggaaaattctccatcaggatgcctgaggtggtggcggagatgctactctatgcttgaatgtcctacatgacataagttctgccgacctttgagttccagtcattccaccttttattggagcgtagtagattgtagtcttactgggctgttgttctgagagttattagactgagtattatatttggtactgtttagttgatacgtgtctctcctg

SEQ ID NO: 10979 - DNA, 843 bp, Homo sapiens
  SIMILAR (1)..(1623): 921254mologous to Homo sapiens putative p150,accession number U93564,Smith-Waterman Score=2590.
tcatctatgactacagtccatgccactactgccacccagaagactgttggagaaactttggcgtgactgctgcagaacatcatccctgtatctactagtgtggccgaggctatgggcaaggtcatccctgagccagataagaggctcacaggtatggccttctgtgttcccacccataatatgttggttgtggctctcatctgccatctgcagaaagctgccaaatatgatggcatgagaagatgcttcaatgccacgactggcattaccttcaatggccactttgtcaggctcctttcctgggatgaatttggcagcagcaacagggtggtggaccttatggtccacacggcctccaaggagtaagacccccagaccaccagctccatcaagagcatgagaggaagagtgaacccccagctgctggggagtcattgccccactcaggctccccaaagtcagtttccattccagactcatccttggaggcatcagcagggctggctgggatgcaggctgccgcttgtgctgtgatgctgggatcacacgaccctgcaggcctttgagtcgctggaagctgttgccttccagagggagccctgcaccccagggcttgggctgagcactttcatgactggaagctttggagaacaagtccttgggcagtacctctggctgggctggctccaagagtttctgatcctggacagatcccagggtgcacctctccaagacatgtctgttcccatgacatatatttaaaacataagtcatatccacgataatacatttttgggatgataaaccaatgttaacctcatccaaaacttccctcacagacat

SEQ ID NO: 10980 - DNA, 319 bp, Homo sapiens
  SIMILAR (115)..(8): 471254mologous to Rattus norvegicus BAF60b,accession number AB003505,Smith-Waterman Score=70.
  misc_feature (1)...(319): n = a,t,c or g
cagaccntgcctcccctcccgccggccaacccntagtccccttcntgtctccacttgcattcaggggtggctgctgttctgagaacattattctgaactttcgtatccaagttagtccccnttattccactgtggcattgccgttntaagcagttacctgatgcctgctgctgaagagctgctcacaggaggcggcggcggccctggcactgcctgcattaggtcttgtgtttgatgtgttcttgtgaatttactttgtcagaacaaaatatttacgcgttgggttcaggaattttttttagctccccatcttggctgt

SEQ ID NO: 10981 - DNA, 401 bp, Homo sapiens
  SIMILAR (2)..(106): 431254mologous to Homo sapiens Human HUPF-I mutant protein fragment 53,accession number Y21405,Smith-Waterman Score=67.
  misc_feature (1)...(401): n = a,t,c or g
ttgcactccgcaagacaccccagtaaactggggcgtcccaaggtggcaagccttcatgaaggcactgcccagctcacaatcctgtgggccaacttcagtcaactctcctttccattagatttgttcctaattaaaagaccactcatnnnnnnnnnnnnnnnnnnnnnnnnnnnnnnnnnnnnnnnnnnnnnnnnnnnnnnnnnnnnnnnnnnnnnnnnnnnnnnnnnnnnnnnnnnnnnnnnnnnnnnnnnnnnnnnnnnnnnnnnnnnnnnnnnnnnnnnnnnnnnnnnnnnnnnnnnnnnnnnnnnnnnnnnnnnnnnnnnnnnnnnnnnnnnnnnnnnnnnnnnnnnnnnnnnnnnnnnnnnnnnnnnnnnnnnnnnnnnnnnnnnnnnnnnnnnnnc

SEQ ID NO: 10982 - DNA, 410 bp, Homo sapiens
  SIMILAR (400)..(296): 431254mologous to Homo sapiens Human HUPF-I mutant protein fragment 53,accession number Y21405,Smith-Waterman Score=67.
  misc_feature (1)...(410): n = a,t,c or g
gnnnnnnnnnnnnnnnnnnnnnnnnnnnnnnnnnnnnnnnnnnnnnnnnnnnnnnnnnnnnnnnnnnnnnnnnnnnnnnnnnnnnnnnnnnnnnnnnnnnnnnnnnnnnnnnnnnnnnnnnnnnnnnnnnnnnnnnnnnnnnnnnnnnnnnnnnnnnnnnnnnnnnnnnnnnnnnnnnnnnnnnnnnnnnnnnnnnnnnnnnnnnnnnnnnnnnnnnnnnnnnnnnnnnnnnnnnnnnnnnnnnnnnnnnnnnnnatgagtggtcttttaattaggaacaaatctaatggaaaggagagttgactgaagttggcccacaggattgtgagctgggcagtgccttcatgaaggcttgccaccttgggacgccccagtttactggggtgtcttgcggagtgcagaaggctttc

SEQ ID NO: 10983 - DNA, 439 bp, Homo sapiens
  SIMILAR (9)..(170): 421254mologous to Streptomyces coelicolor A3(2) putative lipoprotein,accession number AL118514,Smith-Waterman Score=76.
  misc_feature (1)...(439): n = a,t,c or g
ccttgaatgcaagtggagacaggaaggggactaggggttggccggcgggaggggaggcagggtctggccaaacccaggcagctgccagaaagccttctgcactccgcaagacaccccagtaaactggggcgtcccaaggtggcaagccttcatgaaggcactgcccagctcacaatcctgtgggccaacttcagtcaactctcctttccattagatttgttcctaattaaaagaccactcatnnnnnnnnnnnnnnnnnnnnnnnnnnnnnnnnnnnnnnnnnnnnnnnnnnnnnnnnnnnnnnnnnnnnnnnnnnnnnnnnnnnnnnnnnnnnnnnnnnnnnnnnnnnnnnnnnnnnnnnnnnnnnnnnnnnnnnnnnnnnnnnnnnnnnnnnnnnnnnnnntgcgctcgtccaaactatnncgtgatgatcatgctt

SEQ ID NO: 10984 - DNA, 454 bp, Homo sapiens
  SIMILAR (259)..(125): 321254mologous to Hepatitis C virus polyprotein,accession number AF206444,Smith-Waterman Score=60.
ttttcttcatttttattttcaaacttacagtaaacaaaacaatcacttaaattgtcaaaagaacagcaattttacacaatgaagagcatacacaccaagccaaaatacaatagcactcaggtctatatgttgcagtggtgctggcgctggagggaaaggccatgtgtcttcctgggaggcactgaaaggccagccagcatctccaaaatgcaggccattttaacactgctgtgaatgttctggggtcaccaagggggccccttagtggtcagatgcactttgtcacaatgtacacctacatggggtgattactaggcaacgggaggtttcctgaatttcacagccagatggggagctaaaagaaattcctgaacccaacgcgtaaatattttgttctgacaaagtagattcacaagaagacatcaaacacaagacctaatgcaaggggcagtgc

SEQ ID NO: 10985 - DNA, 5362 bp, Homo sapiens
  SIMILAR (1168)..(2478): 851254mologous to Homo sapiens putative p150,accession number U93565,Smith-Waterman Score=1954.
gcagccgcagctcgggggcggtgcctgccttgcagcctcccctcggcgatcgcgcagccccatctttgtccggcctccgcgctttgttctcggcgcccgggccttggccagcctggccagccgccgagcagcccccacgccgcgctggcgtcgtcctcgcctccctcgccgccgccccccgcgcgcggccgggccttgccccccatggtgtcccggccagagcccgagggcgaggccatggacgccgagctggcggtagcgccgccgggctgctcgcacctgggcagcttcaaggtggacaactggaagcagaacctgcgggccatctaccagtgcttcgtgtggagcggcacggctgaggcccgcaagcgcaaggccaagtcctgtatctgccatgtctgtggcgtccacctcaacaggctgcattcctgcctctactgtgtcttcttcggctgtttcacaaagaagcatattcacgagcatgcgaaggcgaagcggcacaacctggccattgatctgatgtatggaggcatctactgttttctgtgccaggactacatctatgacaaagacatggaaataatcgccaaggaggagcagcgaaaagcttggaaaatgcaaggcgttggagagaagttttcaacttgggaaccaaccaaacgggagcttgaactgctgaagcacaacccgaaaaggagaaagatcacctcgaactgcaccataggtctgcgtgggctgatcaaccttgggaacacatgcttcatgaactgcatcgtgcaggccctgacccacacgccacttctgcgggacttcttcctgtctgacaggcaccgctgtgagatgcagagccccagctcctgtctggtctgtgagatgtcctcactgtttcaggagttttactctggacaccggtcccctcacatcccgtataagttgctgcacctggtgtggacccacgcgaggcacctagcaggctacgagcagcaggacgcccacgagttcctcatcgcggccctggacgtgctccaccgacactgcaaaggtgatgacaatgggaagaaggccaacaaccccaaccactgcaactgcatcatagaccagatcttcacaggcgggttgcagtcagacgtcacctgccaagtctgccatggagtctccaccaccatcgaccccttctgggacatcagcttggatctccccggctcttccaccccattctggcccctgagcccagggagcgagggcaacgtggtaaacggggaaagccacgtgtcgggaaccaccacgctcacggactgcctgcgacgattcaccagaccagagcacttgggcagcagcgccaagatcaagtgcagcggttgccatagctaccaggagtccacaaagcagctcactatgaagaaactgcccatcgtagcctgttttcatctcaaacgatttgaacactcagccaagctgcggcggaagatcaccacgtatgtgtccttccccctggagctggacatgacccctttcatggcctccagcaaagagagcaggatgaatggacagtaccagcagcccacggacagtctcaacaatgacaacaagtattccctgtttgctgttgttaaccatcaagggaccttggagagtggccactacaccagctttatccggcagcacaaagaccagtggttcaagtgtgacgatgccatcatcaccaaggccagcatcaaggacgtcctggacagcgaagggtacttgctgttctatcacaaacagttcctggaatacgagtagccttatctgcagctggtcagaaaaacaaaggcaatgcattggcaagcctcacaaagtgatcctccctggccccccccctcccccaagtctcccgccgcctccccggcctggtgacaccacctcccatgcagatgtggcccctctgcacctgggacccatcgggtcgggatggaccacacggacggggaggctcctggagctgctttgaagatggatgagaatgaggggtgtgctctgggtgggaggagcagcgtacacccgtcaccagaacatctcttgtgtcatgacatgggggtgcaacgggggcctcacagcacagagtgaccgctgcctggcgttccccagcactcggtgtggaaaggcccctacctgctgtaagattatgggtccatgaaagcagtaagctggacacagaggtgtagtgtgcgggacagagggccttgcagatgcctttctgttggtgttttagtgttaaaatacggagagtatggaactcttcacctccattttctcagcggctgtgaagcagcctcctagcttcggaagtacggacactacgtcgcgttttcaagcgtgtctgttctgcaggtaacagcatcaagctgcacgtggaagcatctcgcggttttctagaaacaggcattttcttatccctctcccgctcctttttccacaaaggtgaatttcataaatgtaatactagtaaagtgaatgaattactgagtttatacagaaatttaggtaacttctcctttagtctcaagagcgagtcttgctttttaatgggtgccgtttatgttgctgcccgccctgtgtgcctggctcctctgggtgccttggtgtctgctggtggctggcagtgggcgcagcggaggagagttgtgctgcagctcatacggtgtgtctgtcatctcagtctggagtaaatgcagtgtctgccggtgtctgatgggttctgtccctcgtattttctttgccttctatcccattgcctggctaccgctgcctggcagccaagggtgttggtcgcgaagctggagtggcctctggtggagcctgcatcttgtctcgtctgcctctgctttacatttggtgtactttcgggcgtggtggcagtaaaatgacaccgtgattgagcttgtcagcagagctgaaagagaaagtagaaggatgtgcattgtttcttgtaagatatcttgcatgtatctgtgtattcaaattcaaacagagatggtttgtccatttgtccactgagaaattataaactagggacaagggggaggaaaagtactgaaatacagtttatgaagcaagtgtgtctcgggctgtgcttgtcccaggagccccagcagcatctgaactgaggcttcttcagtcctgcaggaacaggatcatctgtctcagcggtgggcagatgttttcatagacagccagggagtaaacactgttggctctgtgggctgtatggtctctgccataaatagtacagagatgtggctgtgtctagtacaacttttagacacagaaatctgaatgacatatattgttctgtgtcaagaaacttagattttttttttaactatttaaaaacgtgaaacctattcttagctcacaggccatggagaagctggtggggaccagacccagctccttagctggctgggctggggagggggcagtgacagtggcagctgctactcactgctcagtgtggaaaacacaggacttggcaatcacagcccgcagaaccatcatgtgtggcagaagcctgagggatgcggtttcttgcccacgtgctctgttcattttctgttgtttttctgcacttaaagaattcacatggaagcatgttttataaaatgaattaccagagaaacagagatgggccgagattctcagaaatggtcccatgtgaccaagttctgctgtttgggtgacagtgctttgaagatctcctttgaggatgtgcagtctttttttttttttttttttttttgagatggagtttgttgcccaggctggagtgagtggcacagtctcggctcactgcaacctccacctcctgggttcaagcagttctcgtgccgcagcctcccaagtagctgggactacaggcatgcaccaccacgccaggctaatttttgtatttttagtagagatggggtttcaccatgtctcaaactcctgacctcaggcgatccacccacctcagcgtcccaaagtgctggggattatagggcgtgacaaccggcacctgggccttatggagtggtctttttaattagggaacaaatctaatggaaaggagagttgactgaagttggcccacaggattgtgaagctgggcagtgccttcatgaaggcttgccaccttgggacggcccagtttactgggggtgtcttgcggagtgcagaaggcttttctggcagctgctagggttttggccagaccctgcctcccctcccgccggccaacccctaagtccccttccctgtcttccacttggcattcaggggtgggctgctgttctggagaacatttagaactgggaagagagaatggagtcacatggatttttggtggggcattatttctgaactttccgtatccaagttaagtcccccttatttccactgtgggcattgcctttctaaagcagttacctgattgcctgcttgcttgaagaagctgcttcacaggaggccggcggcggccctgggcacttgccccttgcattacggtcttgagctttgatgtgttcttgtgaatttactttgtcagaacaaaatatttacggcgttggggttcagggaatttcttttaagctccccatctgggctgtggaaattcagggaaacctccccgttgcctagtaattcacccccatgtaggggtgttacaattgtgaccaaagtggcatcttgacccactaaggggggcccccttgggtgacccccagcacaattcacaagcagtgttaaaaaatggccctgccattttggaagaatgcctggcctggccttttccagtgccctccccaggaaggacacatgggcctttaccctccttcagatgccctgaaggggagtggttttgagggcaggtgaatgtgctggggaagtgtggggcgggccctcccctctgggccccggggccctcctggtggacccttggctcccctccgttggaccctggggcttccgtggtgaagcacctggcagccttccctggggcattcccctccagcgcccagcacccactgcaaacatataagacctgagtgactattgtaattttggcttggtgtgtaatgctcttcattgagaaaaattgctgttcttttgacaattaaagagattgttatgattactgtagcgtttgaaaataaaaatgaagaaaaaaaattccgaatgactgtgctgtggttgggaagactttatttaccaagatgtttactcttcctttccccttccattttgaggagcttgtgtcactcctccgtcccccccaagtgctttgtagtctctcctatgtcataataaagctacattttctctgagaaaaaaaaaaaaaaaaaaa

SEQ ID NO: 10986 - DNA, 813 bp, Homo sapiens
  SIMILAR (115)..(813): 881254mologous to Homo sapiens putative p150,accession number U93565,Smith-Waterman Score=1043.
atggagctgaaaaccatggtacaagaactacgtgacacaagcacaagcttcagtagccaatttgatcaagtggaagaaagggtatcagagattgaagatcaaatgaatgaaatgaaaaccaatgacaaaaaccacatgactatctcaatagatgcagaaaaggccttcaacaaaattcaacagccattcatgctaaaaactctcaataaactaggtattgatgtgacatatctcaaaataataagagatatttatggcaaacccacagccaatatcatactgaatgggcaaaaactgggagcattccctttgaaaactggcacaagacagggatgccctctcccaccactcctattcaatgtagtgttggaagttctggccagggcaatcaggcaggagaaagaaatgaagaatattcaattagaaaaagaggaagtcaaattgtccctgtttgcagatgacatgattgtatatttagaaaaccccatcatcttagccccaaatctccttaagctgataagcaacttcagcaaagtctcaggatacaaaacccatgtgcaaaaatcacaagcattcttatacaccaataacagacaaacagagagccaaatcacgagtgaactcccattcgcaattgcttcaaagagaataaaatacctaggaatccaacttacaagggatgtgaaggacctcttcaaggagaactacaaaccacagctcaacgaaataaaagaggacacaaacaaatggaagaacattccatgctcatggataggaagaatcaatattgtgaaaatggccatattgcccaag

SEQ ID NO: 10987 - DNA, 1454 bp, Homo sapiens
  SIMILAR (1)..(1122): 901254mologous to Homo sapiens putative p150,accession number U93568,Smith-Waterman Score=1725.
atggcacaagaactacgtgacgaatgcacaagcctcagtagccgattcgatcaactggaagaaagggtatcagagatggaagatcacatgaatgaaatgaagcgagaagagaaatttagaaaaaaaggaataaaaagaaatgaacaaagcctccaagaaatatgggactatgtgaaaagaccaaatctacgtctgattggtgtacctgaaacccaaaatctccttaagctgataagcaacttcagcaaagtctcaggatacaaaatcaatgtgcaaaaatcacaggcattcttatacaccaataacagacaaacagagagccaaatcatcagtgaactcccattcacaattgcttcaaagagaataagatacttaggaatccaacttacaagggatgtgaaggacctcttcaaggagaactacaaaccactgctcaacgaaataaaagaggacacacacaaatggaagaacattccatgctcatggataggaagaatcaatatcgtgaaaatggccatactgcccaaggtaatttatagattcaatgccatgcccatcaagctaccactgactttcttcacagaattggagaaaactactttaaagttcatatggaaccaaaaaagagcccgcattgccaagtcaatcctaagccaaaagaacaaaactggaggcatcacgctacctgacttcaaactatactacaaggctacagtaaccaaagcagcatggtactggtaccaaaacagagatatagatcaatggaacagaatagagccctcagaaataataccacatatctacaactacctgatctttgacaaacctgagaaaaacaagaaatggggaaaggattccctgtttaacaaatggtgctgggaaaactggctagccatatgtagaaagctgaaactggatcccttcctgacaccttatactaaaattaattcaagatggattaaagacttacatgctagatctaaaaccataaaaaccctagaagaaaacctaggcaataccattcaggacataggcattggcaaggacttcatgtctaaaacaccaaaagcaatggcaacaaaagccaaaattgacaaatgggatctaattaaactaaagagcttctgcacagcaaaagaaactaccatcagagtgaacaggcaacctaaagaatgggagaaaatttttgcaatatactcatctgacaaaaggctaatatccagaatctacgaagaaatcaaacaaatttacaagaaaaaaacaaacaaccccatcaacaagtgggcaaaggatatgaacagacacttctcaaaagaagacatttatgcagccaacagacacatgaaaaaatgttcatcatcactggtcatcagagaaatgcaaatcaaaaccacaatgagataccatctcacaccagttagaatggtgatcattaaaaagtcaggaaacaacag

SEQ ID NO: 10988 - DNA, 1641 bp, Homo sapiens; identical to SEQ ID NO: 7833
  SIMILAR (1009)..(2544): 921254mologous to Homo sapiens putative p150,accession number U93572,Smith-Waterman Score=2525.

SEQ ID NO: 10989 - DNA, 1188 bp, Homo sapiens; identical to SEQ ID NO: 8953
  SIMILAR (1)..(1122): 901254mologous to Homo sapiens putative p150,accession number U93563,Smith-Waterman Score=1838.

SEQ ID NO: 10990 - DNA, 2307 bp, Homo sapiens; identical to SEQ ID NO: 10205
  SIMILAR (1)..(1605): 941254mologous to Homo sapiens putative p150,accession number U93564,Smith-Waterman Score=2626.

SEQ ID NO: 10991 - DNA, 2034 bp, Homo sapiens
  SIMILAR (1)..(1668): 931254mologous to Homo sapiens putative p150,accession number U93563,Smith-Waterman Score=2739.
atgggagactttaataccccactgtcaacattagacagatcaacaagacagacagttaagaaggatatccaggaattgaattcagctctgcaccaagtggacctaatagatatctacagaactctccaccccaaatcaacagaatatacattcttctcagcaccacaccacacctactccaaaattgaccacacagttggaagtaaagcactcctcagcaaatgtaaaagaacagaaattataacaaactgtctctcagaccacagtgcaatcaaactagaactcaggattaataaactcactcaaaaccactcaactacatgggaactgaataacctgctcctgaatgactactgggtacataacgaaatgaaggcagaaataaagatgttctttgaaaccaatgagaacaaagacacaacttaccaggatctctgggacacattcaaagcagtgggtagagggaaatttatagcactaaatgcccacaagagaaagcaggaaagatctaaaattgacaccctaacatcacaaataaaagaactagaaaagcaagagcaaacacattcaaaagctaggagaaggcaagaaataactaagatcagagcagaactgaaggagacagagacacaaaaacccttcaaaaaatcaatgaatccaggagctgaaatacaaactaccatcagagaatactataaacacctctatgcaaataaactagaaaatctagaagaaatggataaattcctcaacacatacactctcccaagactaaaccaggaagaagttgaatctctgaatagaacaataacaggctctgaaattgaggcaagaattaatagcttaccaaccaaaaaaagtccaggaccagatggattcacagctgaattctaccagaggtacaaggaggagatggtaccattccttctgaaactattccaatcaatagaaaaagagggaatcctccctaactcattttatgaggccagcatcatcctgataccaaagcctggcagagacacaacaaaaaaagagaattttagaccaatatccctgatgaacatcgatgcaaaaatcctcaataaaatactggcaaaccaaatccagcagcacatcaaaaaccttatccaccatgatcaagtgggcttcatccctgggatgcaaggctggttcaacatatgcaaatcagtaaatgtaatccagcatataaacagaaccaaagacaaaaaccacatgattttctcaatagatgcagaaaaggcctttgacaaatttcaacaactcttcatgctaaaaactctcaataaattaggtattgatgggatgtatctaaaaataataagagctatttatgacaaactcacagccaatatcatactgaatgggcaaaaactggaagcattccctttgaaaactgccacaagacagggatgccctctctcaccactcctattcaacatagtgttggaaattctgaccagggcaatcaggcaggagaaagaaataaagggtattcaattaggagaagaggaagtcaaattgtccctgtttgcagatgacatgattgtatatctagaaaaccctatcatctcagcccaaaatctccttaagctgataagcaacttcagcaaagtctcaggatacaaaatcaatgtgcaaaaatcacaagcattcttacacaccaataacagacaaacagagagccaaatgatgagtgaactcccattcacaattgcttcaaagagaacaaaatacctaggaatccaacttacaagggatgtgaaggacctcttcaaggagaactacaaaccactgctcaatgaaataaaagaggacacaaacaaatggaagaacattccatgctcatggataggaagaatcaatatcgtgaaaatggccatactgcccaaggtaatttatagattcaatgccatccccatcaagctaccaatgactttcttcacagaattggaaaaaactactttaaagttcatatggaaccaaaaaatagcctgcattgcaaatcaatcctaa

SEQ ID NO: 10992 - DNA, 1191 bp, Homo sapiens
  SIMILAR (490)..(1188): 941254mologous to Homo sapiens putative p150,accession number U93563,Smith-Waterman Score=1171.
atgggagttaataaaaatattgaagaagagacttatcccagaccaatatccttgatgaatattgatgcaaaaatcctcaataaaatactggcaaaccaaatccagcagtacatcaaaaagcttatccaccatgatcaagtgggcttcatccctgggatgcaaggctggttcaatatatgcaaatcaataaatgtaatccagcatataaacagaaccaaagacaaaaaccacatgattatctcaatagatgcagaaaaggcctttgacaaaattcaacaacgcttcatgctaaaaactctcaagaaattagaattggaaaaaactgctttaaagttcatatggaaccaaaaaagagcccgcatcaccaagtcaatcctaagccaaaagaacaaagctggaggcatcacgctacctgacttcaaactatactacaaggctacagtaaccaaaacagcatggctgcccttcatcctccagagctccaccagggtgatcgtagaccagaagggtccagtccaaaatctccttaagctgataagcaacttcagcaaagtctcaggatacaaaatcaatgtacaaaaatcacaagcattcttatacaccaataacagacaaacagagagccaaatcatgagtaaactcccattcacaattgcttcaaagagaataaaatacctaggaatccaacttacaagggacgtgaaggacctcttcaaggagaactacaaaccactgctcagtgaaataaaagaggatacaaacaaatggaagaacattccatgctcatgggtaggaagaatcaatattgtgaaaatggccatactgcccaaggtaatttatagattcaatgccatccccatcaagctaccaatgactttcttcacagaattggaaaaaactactttaaagttcatatggaaccaaaaaagagcccgcatcgccaagtcaatcctaagccaaaagaacaaagctggaggcatcatgctacgtgacttcaaactatactacaaggctacagtaaccaaaacagcatggtactggtaccaaaacagagatatagatcaatggaatagaacagagccctcagaaataacgccacatatctacaactatctgatctttgacaaacctgagaaaaacaagcaatggggaaaggattccctatttaataaatggtgctgggaaaactga

SEQ ID NO: 10993 - DNA, 353 bp, Homo sapiens
  SIMILAR (7)..(195): 931254mologous to Homo sapiens line-1 reverse transcriptase,accession number U83303,Smith-Waterman Score=318.
atgatcacaattgcttcaaagagaataaaatacctaggaatccaacttacaagggacgtgaaggacctcttcaaggagaactacaaaccactgctcaatgaaataaaagaggatacaaacaaatggaagaacattccatgctcatgggtaggaagaatcaatattgtgaaaatggccatactgcccaagattactgactcagcaatggagatgttatcggcaaaatgccattacctgcacattttggatatctctggttgtgtcttgcttactgaccaaatccttgaggaccttcagataggctgcaaacaactccggatccttaagatgcaatactgcacaaatatttccaa

SEQ ID NO: 10994 - DNA, 1608 bp, Homo sapiens
  SIMILAR (717)..(1184): 951254mologous to Cloning vector pZC320 SopA,accession number U26464,Smith-Waterman Score=780.
agaataaaatacctaggaatccaacttacaagggaagtgaaggacctcttcaaggagaactacaaaccactgctcaatgaaataaaagaggacacaaacaaatggaagaacattccatgctcatgggtaggtagaatcaatatcatgaaaatggccatactgcccaaggtaatttatagattcaatgccatctccaacaagctaccaatgactttcttcacagaattggaaaaaactactttaaacttcatatggaaccaaaaaagagcccgcatcgccaagtcaatcctaagccaaaagaacaaagctggaggcatcacgctacctgacttcaaacaatactacaaggctacagtaaccaaaacagcatggtactggtaccaaaacagagatatagatcaatggaacagaacagagccctcagaaataacaccgcatatctacacctatctgatctttgacaaacctgagaaaaacaagcaatggggaaaggattccctatttaataaatggtgctgggaaaactggctggccgtatgtagaaagctgaaactggatcccttccttacaccttatacaaaaattaattcaagatggattaaagacttaaacgttagacctaaaaccataaaaaccctagaagaaatcctaggcattaccattcaggacacaggcatgggcaaggacttcatgtctaaaacaccaaaagcaatggcaacaaaagccaaaattgacaagtgggatcaaattaaactaaagagcttctgcacagcaaaagagactaccatcagagtgaacaggcaacctacaaaatgggagaaaattttcgcaacctattcatctgacaaagggctaatattcagaatctacaatgaacttaaacaaatttacaagaaaaagacaaacaaccccatcaaaaagtgggcgaaggacatgaacagacccttctcaaaagaagacatttatgcagccaaaaaatacatgaaaaaatgctcaccatcactggccatcagagaaatgcaaatcaaaaccacaatgagataccatctcacaccagttagaatggcgatcattaaaaagtcaggaaataacagacaaacagagagccaaatcatgagtgaactcccaatcacaattgcttcaaagagaataaaatacctaggaatccaacttacaaaggatgtgaaggacctcttcaaggagaactacaaaccactgctcaatgaaataaaagaggacacaaacaaatggaagaacattccatgctcatggataggaagaatcaatattgtgaaaaatggccatactgcccaagcccacaaatgtacatgtcaccaacctggcagcccaagacactacagctctggaggcagcccaaatatccttggaagggcacccacaggagaaagaaataagcgtgaccgctatgccattattaagtccctcctgaccactgggtcagccatgaagaagatagaagacaacaacacacttgtggatgtcaaaatcaacaagtaccagatcaaacaggttgtaaagaagctctatgacactgatgtggtcaacaccctgatcaggcctgagggagagaagaaggcagatgtttga

SEQ ID NO: 10995 - DNA, 373 bp, Homo sapiens
  SIMILAR (1)..(1752): 921254mologous to Homo sapiens putative p150,accession number U93564,Smith-Waterman Score=2853.
atgagtgaactcccattcacaattgtttcaaagagaataaaatacctaggaatccaacttacaagggatgtgaaggacctcttcaaggagaactacaaaccactgctcaacgaaataaaagaggacacaaacaaatggaagaacattccatgctcatggataggaagaatcaatatcgtgaaaatggccatactgcccaagataggatattgtgtgcaagacacaacctctgccaatactacccttgttcatcagaccacaccttcacatgtaatgccaccaaatcaccaccaattagcatttaattatcaagaattagaacatttacagactgtgaaaaacatttcacctttacaaattctgcctccctcag

SEQ ID NO: 10996 - DNA, 557 bp, Homo sapiens
  SIMILAR (1)..(405): 941254mologous to Homo sapiens putative p150,accession number U93574,Smith-Waterman Score=666.
atgagtgaactcccattcacaattgcttcgaagagaataaaatacctaggaatccaacttacaagggatgtgaaggacctcttcaaggagaactacaaaccactgctcaacgaaacaaaagaggacacaaacaaatggaagaacattctatgctcctggataggaagaatcaatattgtgaaaatggccatactgcccaaggtaatttatagattcaatgccatccccatcaagctaccaatgactttctttacagaattggaaaaaactactttaacgttcatatggaaccaaaaaacagcccgcattgccaagacaatcctaagccaaaagaacaaagctggaggcatcacactacctgacttcaaactatactacaaggctacagtaaccaaaacagcatgggacatggatgaagctggaaaccatcattctgagcaaacgaccgcaaggacagaaaaccaaacactgcatgttctcactcataggtgggaattgaacaatgagaacacttggacacaggacagggaacatcacacaccggggcctgtcgtggg

SEQ ID NO: 10997 - DNA, 1260 bp, Homo sapiens; identical to SEQ ID NO: 8948
  SIMILAR (1)..(633): 991254mologous to Homo sapiens ART-4,accession number AB026125,Smith-Waterman Score=1104.

SEQ ID NO: 10998 - DNA, 3529 bp, Homo sapiens; identical to SEQ ID NO: 6262
  SIMILAR (305)..(1849): 891254mologous to Homo sapiens putative p150,accession number U93572,Smith-Waterman Score=2317.

SEQ ID NO: 10999 - DNA, 2376 bp, Homo sapiens; identical to SEQ ID NO: 5443
  SIMILAR (1390)..(2166): 841254mologous to Homo sapiens putative p150,accession number U93564,Smith-Waterman Score=1055.

SEQ ID NO: 11000 - DNA, 1758 bp, Homo sapiens; identical to SEQ ID NO: 10705
  SIMILAR (100)..(1581): 881254mologous to Homo sapiens putative p150,accession number U93564,Smith-Waterman Score=2244.

SEQ ID NO: 11001 - DNA, 1602 bp, Homo sapiens
  SIMILAR (4)..(774): 821254mologous to Homo sapiens putative p150,accession number U93569,Smith-Waterman Score=1050.
atgatttttgtctcaatagatgcagaaaaggcccttgacaaaattcaacagcgcttcatgctaaaaactctcagtaaattaggtattgatgggacatatctcaaaataataagagctatttatgacaaacccacagccagtatcatactgaatgggcaaaaactggaagcattccctttgaaaactggcacaagacagggatgccctctctcaccactcctattcaacacagtgttggaagttctggccagggcaatcaggcaggagaaagaaataaagcatattcaattagaacaagaggaagtcaaattgtccctgtttgcagacgacatgattgtatatctagaaaaccccattgtctcagcccaaaatctccttaagctgataagcaacttcagcaaagtctcaggatacaaaatcaatgtgcaaaaatcacaaacattcttatacaccaataacagacaaacagagagccaaatcatgagtggactcccattcacaattgcttcaaagagaataaaatacctaggaatccaacttacaagggatgtgaaggacctctgcaaggacaactacaaaccactgctcaatgaaataaaagaggacacaaacaaatggaagaacattccgtgctcatggataggaagaatcaatattgtgaaaatggccatactgcccaagctcttagatcattttaccggattctttggatttcttggattgcatttcaactttttcctggatctcagtgagcttctcaccatccaggttctaaattctatacctatcacttcagtcatttcagtctggttaagaaccattgctgggggctactgtgctcatttggaggtgttctgggctgtggggctccctcagatagaggtcatggctggcagacaggccacttccttcccagaccagccctgtggagagaggcaccccactttcatgctggtccatgaaccagggcatctcaaccctctcagtgttttgagagtgagaacatttcccccactcaggcaccaccaagccaatgacatgattgtatatttagaaaaccccatcgtctcagcccaaaatctccttaagctgataagcaacttcagcaaagactcaggatacaaaatcaatgtacagaaatcacaagcattcttatgtactaataacagacaaacagagagccaaatcatgagtgaactcccattaacaattgcttcaaagagaataaaatacctaggaatccaacttacaagggatgtgaagcacctcttcaaggagaactacaaaccactgctcaatgaaataaaagaggatacaaacaaatggaagaatattccatgctcatgggtaggaagaatcaatatcgtgaaaatggccatactgcccaagatgttacattcagcagagaataaacaatggcttagccccaaacagagaggtggcagcatggagaacaggattgatgtttggaatattgttcttaaggggctaagcacatcatccaacactgtcctggattcgagccccatagtattagtgacagattccccaggccacatctacattgatctttgtggaacatataacaacagggaaaattag

SEQ ID NO: 11002 - DNA, 1286 bp, Homo sapiens
  SIMILAR (226)..(432): 851254mologous to Homo sapiens Human secreted protein, SEQ ID NO: 7284,accession number G03203,Smith-Waterman Score=304.
tatctagagtacaaaactttggtgctgatagtgagaaatcaacgtgccgcacatttgctattccttgggttcttggtctcgctgacttcaagaatgaagccgcagaccctcgtggaacaaagccacagaccccggcagtgagtgttatagctcttaaaggtggcgcacgtccagagttgtttgttcctcccagtgggtttgtggtctcgctgacttcaggagtgaagccgcagaccctcgcgaattgcttcaaagagaataaaatacctaggaatccaacttacaagggatgtgaaggacctcttcaagcagaactacaaaccactgctcaacgaaatcaaagaggacacaaacaaatggaagaacattctatgctcatggataggaagaatcaatattgtgaaaatggccatactgcccaagtgttaccggacgagggtgtccaggttcctggcgttttgaacaaagaattggacaaaacacagaaacaaagcaatgaagcaatgaagccacaaaagcagagatgtattgaaaacgaaaagtacactccacagggcgtcggacccgaagtccacgagccggaactcagagcaggagccgaaggaccccagcgcagaatccgtggaggcgcacggcttcatccaccgcgctcccagatggggtcccagcccagatccggccacgaagacacaggcaaccccggcctgggtttcctgttccatgagctccaggaaggcgacagtcagtgcttgtctggggacccggaccggtgctttggggaactcccccggagggagagagtttggggaactctcccgagaagggaactttcccggagaggggggcgtggaccggacgctgctgcgcctcctctctcaggccgcggttctatgctgccctgtgcccgcgccaaacgccctgatctctctctgtctcctctctcaatctctctttgcctttcctcctttccagatgcgaaggctgtagggactttggtgactgaagctggaggagacgaggagaagaaaatacggtccaaacccgagcagggagctggagcagaagaagaaagtcacttctgtgcgggagctgccgaccccacgatcaaggataaccagaagcgcggcggtggcgaccaggagccctcgcagcagcagcctgaggcttccagcccaggactcctccgcggaggagccacaaccccaatattagcggcgtctcttcagccccagtgcgttcagcaggttgcacctgaaggagctagacagcattttcccacgctctga

SEQ ID NO: 11003 - DNA, 1826 bp, Homo sapiens
  SIMILAR (325)..(1698): 981254mologous to Homo sapiens putative p150,accession number U93564,Smith-Waterman Score=2386.
atgcacacagccccgtttatttttccagtgaagcgcactgtccctgaccccggtgaatactgggatggtagtcctgtagccacgggaccggaaagtctgggagtctttatgaaactacatctcccagcaaccctggcgacctggggctccagtcccaccgcagactctggtgggacgtgggtggcgcaagcacatcttggccctgcgactcagcttgagggggcccaagctgtcccactgagcaagcgcccagcaggccgccgtgctgtgggtcctggtcctcctggcatttgttggggtgcggaggccaccgaggagtctgaggtgttggaagttctggccagggcaatcaggcaggagaaggaaataaagggtattcaattaggaaaagaggaagtcaaattgtccctgtttgcagacgacatgattgtttatctagaaaaccccatcgtctcagccgaaaatctccttaagctgataagcaacttcagcaaagtctcaggatacaaaatcaatgtacaaaaatcacaagcattcttatacaccaacaacagacaaacagagagccaaatcatgggtgaactcccattcacaattgcttcaaagagaataaaatacctaggaatccaacttacaagggatgtgaaggacctcttcaaggagaactacaaaccactgctcaaggaaataaaagaggacacaaacaaatggaagaacattccatgctcatgggtaggaagaatcaatatcgtgaaaatggccatactgcccaaggtaatttacagattcaatgccatccccatcaagctaccaatgactttcttcacagaattggaaaaaactactttaaagttcatatggaaccaaaaaagagcccgcattgccaagtcaatcctaagccaaaagaacaaagctggaggcatcacactacctgacttcaaactatactacaaggctacagtaaccaaaacagcatggtactggtaccaaaacagagatatagatcaatggaacagaacagagccctcagaaataatgccacatatctacaactatctgatctttggcaaacctgagaaaaacaagcaatggggaaaggattccctatttaataaatggtgctgggaaaactggctagccatatgtagaaagctgaaactggatcccttccttacaccttatacaaaaatcaattcaagatggattaaagatttaaacgttaaacctaaaaccataaaaaccctagaagaaaacctaggcattaccattcaggacataggcgtgggcaaggacttcatgtccaaaacaccaaaagcaatggcaacaaaagccaaaattgacaaatgggatctaattaaactaaagagcttctgcacagcaaaagaaactaccatcagagtgaacaggcaacctacaacatgggagaaaattttcgcaacctactcatctgacaaagggctaatatccagaatctacaatgaactcaaacaaatttacaagaaaaaaacaaacaaccccatcaaaaagtgggcgaaggacatgaacagacacttctcaaaagaagacatttatgcagccaaaaaacacatgaagaaatgctcatcatcactggccatcagagaaatgcaaatcaaaaccactatgagatatcatctcacaccagttagaatggcaatcattaaaaagtcaggaaacaacagtctaattgtcggcgccagcatggacacctccctcctctccgggccgattccgtatgatatacaacactttgatcgtttcggaagcgtgacagttcgacgcgggtgcgcgatcgagttttacaacac

SEQ ID NO: 11004 - DNA, 1646 bp, Homo sapiens
  SIMILAR (474)..(1340): 931254mologous to Homo sapiens putative p150,accession number U93563,Smith-Waterman Score=1464.
atggataaatttctcgacacatacactctcccaagactaaaccaggaagaagttgaatctctgaatagaccaataacaggagctgaaattgtggcaataatcaatagcttaccaaccaaaaagagtccaggaccagatggattcacagctgaattctaccagaggctgataagcaacttcagcaaagtctcaggatacaggatcaatgtacaagaatctacaagcattcttatacaccatcaacagacaaacagagagccaaatcatgagtgcactcccactcacaattgcttcaaagagaataaaatacctaggaatccaacttacaagggatgtgaaggacctcttcaaggagaactacaaaccactgctcaacgaaataaaagaggatacaaacaaatggaagaacattccatgctcatgggtaggaagaatcaattatcctgaaaatggccatactgcccaagaattggaaaaaaactactttaaagttcatatggaaccacaaaagagcctgcattgccaagtcaatcctaagccaaaggaacaaagctggaggtatcacgctacctgacttcgaactatactacaaggctacagtaaccaaaacagcatggtactggtaccaaaacagagatatagatcaatggaacagaacagaaccctcagaaataacaccacacatctacaaccatatgatctttgataaacctgacaaaaacaagaaatggggaaacgattccctatttgacaaatggtgctgggaaaactggttagccatatgtagaaagctgaaactggatcccttccttacaccttatacaaaaattaattcaagatggattaaagacttaaatgttagacctaaaaccataaaaaccctagaagaaagcctaggcaataccattcaggacataggcataggcaaggacttcatgtctaaaacatcaaaagccatgacaacaaaagccaaaattgacaaatgggatctaattaaactaaagagcttctgcacagcaaaagaaactaccatcagagtgaacaggcaacctacagaatgggagaacatttttgcaatctactcatctgacaaaggactaatatccagaatctacaaagagctcaaacaaatttacaagaaaaaaacaaacaaccccatcaaaaagtgggcgaaggatatgaacagacacttctcaaaagaagacatttatgcagccaaaaaacacatgaaaaaatgctcatcatcactggccatcagagaaatgcaaatcaaaaccacaatgagataccatctcacaccagttagaatggcgatcattaaaaagtcagggaacaacagaactagagaaaactattttaaaattcatatggaatcaaaaaagagccaaaatagccagggcaatcgtaaggaaaaagaacaaagctggaggcatcatgctaccagacttcaaactatagtacagggctatacagtagccaaaacagcatgctactggtacaaaaacagacctacagaccaatcaaacagaacagagaaccaagaaataagactgcatacctacaaccatctgatcttcgacaaacctgacaaaagcaatggagaaacgactccctattcaataaatggtgctaggataactggctag

SEQ ID NO: 11005 - DNA, 3859 bp, Homo sapiens
  SIMILAR (1)..(1995): 1001254mologous to Homo sapiens putative p150,accession number U93565,Smith-Waterman Score=3451.
atgacaggatcaaattcacacataacaatattaactttaaatataaatggactaaattctgcaattaaaagacacagactggcaagttggataaagagtcaagacccatcagtgtgctgtattcaggaaacccatctcacgtgcagagacacacataggctcaaaataaaaggatggaggaagatctaccaagcaaatggaaaacacaaaaaggcaggggttgcaatcctagtctctgataaaacagactttaaaccaacaaagatcaaaagagacaaagaaggccattacataatggtaaagggatcaattcaacaagaggagctaactatcctaaatacttatgcacccaatacaggagcacccagattcataaagcaagtcctgagtgacctacaaagagacttagactcccacacattaataatgggagactttaacaccccactgtcaacattagacagatcaacgagacagaaagtcaacaaggatacccaggaattgaactcagctctgcaccaagcggacctaataggcatctacagaactctccaccccaaatcaacagaatatacatttttttcagcaccacaccacacctattccaaaattgaccacatagttggaagtaaagctctcctcagcaaatgtaaaagaacagaaattataacaaactatctctcagaccacagtgcaatcaaactagaactcaggattaagaatctcactcaaagccgctcaactacatggaaactgaacaacctgctcctgaatgactactgggtacataacgaaatgaaggcagaaataaagatgttctttgaaaccaacgagaacaaagacaccacataccagaatctctgggacgcattcaaagcagtgtgtagagggaaatttatagcactaaatgcctacaagagaaagcaggaaagatccaaaattgacaccctaacatcacaattaaaagaactagaaaagcaagagcaaacacattcaaaagctagcagaaggcaagaaataactaaaatcagagcagaactgaaggaaatagagacacaaaaaacccttcaaaaaatcaatgaatccaggagctggttttttgaaaggatcaacaaaattgatagaccgctagcaagactaataaagaaaaaaagagagaagaatcaaatagacacaataaaaaatgataaaggggatatcaccaccgatcccacaggaatacaaactaccatcagagaatactacaaacacctctacgcaaataaactagaaaatctagaagaaatggatacattcctcgacacatacactctcccaagactaaaccaggaagaagttgaatctctgaatagaccaataacaggctctgaaattgtggcaataatcaatagtttaccaaccaaaaagagtccaggaccagatggattcacagctgaattctaccagaggtacaaggaggaactggtaccattccttctgaaactattccaatcaatagaaaaagagggaatcctccctaactcattttatgaggccagcatcattctgataccaaagccgggcagagacacaaccaaaaaagagaattttagaccaatatccttgatgaacattgatgcaaaaatcctcaataaaatactggcaaaccgaatccagcagcacatcaaaaagcttatccaccatgatcaagtgggcttcatccctgggatgcaaggctggttcaatatacgcaaatcaataaatgtaatccagcatataaacagagccaaagacaaaaaccacatgattatctcaatagatgcagaaaaagcctttgacaaaattcaacaacccttcatgctaaaaactctcaataaattaggtattgatgggatgtatttcaaaataataagagctatctatgacaaacccacagccaatatcatactgaatgggcaaaaactggaagcattccctttgaaaactggcacaagacagggatgccctctctcccccactcctattcaacatagtgttggaagttctggccagggcaattaggcaggagaaggaaataaagggtattcaattaggaaaagaggaagtcaaattgtccctgtttgcagatgacatgattgtatatctagaaaaccccattgtctcagcccaaaatctccttaagctgataagcaacttcagcaaagtctcaggatacaaaatcaatgtgcaaaaatcacaagcattcctatataccaacaacagacaaacagagagccaaaccatgagtgaactcccattcacaattgcttcaaagagaataaaatacctaggaatccaacttacaagggatgtgaaggacctcttcaaggagaactacaaaccgctgctcaacgaaataaaaagaggacacaaacaaatggaagaacattccatgctcatgggtaggaagaatcaatatcgtgaaaatggcccatactgcccaaggtaaatttatagattcaatgccatccccatcaagctaccaatgactgttttcacagaattggaaaaaaactactttaaagttcatatgggaaccaaaaaagagcctgcatcgccaagtcaatcctaagccaaaagaacaaagctgggaggcatcacactacctgactttcaaactatatatactacaaggctacagtaaaaaaaaaacagcatcggtactggtaccaaagacagagatatagatcaatggaaaagacagaacagagccctcagaaataatgccgcatatctacactattctgatcctttggacaaacctgagaaaaacaagcatgggggaaaggcatccctaatttataaaatggctgctggggaaaactggctagcccatatgtaggaagctgaaactggatcccttccttacaccttatacaaaaatcaattcaagatggattaaagatttaaacgttaaacctaaaaccataaaaaccctagaagaaaacctaggcattaccattcaggacataggcgtgggcaaggacttcatgtccaaaacaccaaaagcaatggcaacaaaagacaaaattgacaaatgggatctaattaaactaaagagcttctgcacagcaaaagaaactacccatcagagtgaacaggcaacctacaacatgggagaaaattttcgcaacctactcatctgacaaagggctaatatccagaatctacaaagaacttaaacagattttacaagaaaaaaacaaaacaactgcatcaaaaagtgggcgaaggacatgaacagacacttctcaaaagaagacatttatgcagccaaaaaacacatgagagcatggctcatcatcactggccatgcagggagatgcaaatcaataccactatgagatatcatctcacaccagttagaatggcaatcattaaaaagtcaggaaacaacaggtgctggagaggatgcggagaaataggaacacttttacactgttggtgggactgtaaactagttcaaccattgtggaagtcagtgtggcgattcctcagggatctagaactagaaataccatttgacccagccatcccattactgggtatatacccaaaggactataaatcatgctgctataaagacacatgcacacgtatgtttattgcggcactattcacaatagcaaagacttggaaccaacccaaatgtccaacaatgatagactggattaagaaaatgtggcacatatacaccatggaatactatgcagccataaaaaatgatgagttcatatcctttgtagggacatggatgaaattggaaaccatcattctcagtaaactatcgcaagaacaaaaaaccaaacaccgcatattctcactcataggtgggaattga

SEQ ID NO: 11006 - DNA, 439 bp, Homo sapiens
  SIMILAR (2)..(277): 911254mologous to Homo sapiens dJ402G11.4 (novel protein similar to C. elegans F38A5.2 (isoform 1)),accession number AL022328,Smith-Waterman Score=450.
gctgcctcgggcctctgacgccgagcccaggaagtgcgtcccctccgtggtcgtgggcgtcgtgggcatgggccacgtgcctggcatcgagaagaactggagcaccgacctcaacatccaggagatcatgacagtgtctcggttggccgtgaaggccgccttcttcggcctgctgggctacagcctgtactggatgggccgccgcaccgcgagcctggtcctgtcgctgcccgccgcgcagtactgcctgcagagggtgaccgaggcccggcacaagtaggagactgctccccgcccgctcgggcccctgaggagccagtgcccccgcggcacttctgggtgccaggtgcatcctagcccgcccgaggcccctgccaccccccatgggggtctgggcccggcctcgcctgccctcctgggccagtcacccctcccccag

SEQ ID NO: 11007 - DNA, 719 bp, Homo sapiens
  SIMILAR (3)..(272): 1001254mologous to Homo sapiens dJ402G11.4 (novel protein similar to C. elegans F38A5.2 (isoform 1)),accession number AL022328,Smith-Waterman Score=467.
  misc_feature (1)...(719): n = a,t,c or g
agtgcgtcccctccgtggtcgtgggcgtcgtgggcatgggccacgtgcctggcatcgagaagaactggagcaccgacctcaacatccaggagatcatgaccgtgcccccgccgtccgtctccggcagagtgtctcggttggccgtgaaggccgccttcttcggcctgctgggctacagcctgtactggatgggccgccgcaccgcgagcctggtcctgtcgctgcccgccgcgcagtactgcctgcagagggtgaccgaggcccggcacaagtaggagactgatccccgcccgatcgggcccctgaggagccagtgcccccgcggcactttctgggtgccaggtgcatcctagcccgcccgaggcccctgccaccccccatgggtncttggggcccggcctcgcctgccctcctgggccagtcacccctcccccagcccacccaaataaaggattatttaactgtctgagctcaggcctcccggcagcccctcccctcccacactgcaggggccgttccccggcttctgggacaagacacccagctccgagggggcaggggcttataggaggggccgaggcgttgcgctgccctctcagccctggttgcaggcgggggacaatgggccaatgttccctaacttcaatgtggctttctgttgtttcgggcaaaagagcgtttggccaagggggggtttctgggggtttcagggtaagttt

SEQ ID NO: 11008 - DNA, 1431 bp, Homo sapiens
  SIMILAR (429)..(1379): 681254mologous to Homo sapiens dJ402G11.4 (novel protein similar to C. elegans F38A5.2 (isoform 2)),accession number AL022328,Smith-Waterman Score=914.
cgcagcctcccgcccggctgcacaggagtttctttaaggagtttccccggtgtgcctcggcagccttgcgctgctctaatggtccggacttccgtgtgtgagtttcccccgtgcgccccggcagtcttgcgctgctcctaagagttggccctcgtttttcagggtgtgtggtccacacagcggccacgggtccctttccagggtacgtggtccgtggagttgccacggagccctggctttctggggtgcatggaccctgacttgaactctcctttccacctgcaggccaacgtggggtgctttctggagacccccagaacctgtgtacgtgtccctcagggtcctggcacgttccccggtgttgggctgttgagcgtcagcggcccaacctgccgcgcactgtgacccagttggtggctgaggacgggagcagggtgtacgtggtggggacagcccacttcagcgacgacagcaagagggacgttgtgaaggtgagcgccgccacccgccacatcccggacacgggttggtgtaagctcctgcctgggagccgtgacggccttgtgcgttttcccacttatcgtgtgtccatgctgaagatggacgagagcacgctgctgcgggaggcccaggagctcagcctggagaagctgcagcaggccgtgaggcaggtgcgcagccgcgggcaagggtcagggtcagggtcggggtcaaagccaccacacatcaccgagcagctgggcatggccccaggtggcgagttcagggaggccttcaaggaggtgggcacagggtgaggtagggggtggccacagggatgtggctcacaggccgtcaccttcaagagggccatcgcagcgctctccttctggcagaaggtcaggctggcttggggcctgtgcttcctgtcagaccccatcaggtagggctgcccccgggaccctggccggcctgcagggtggtctgtgggaatggccgagatgattggcgagttcccagacctgcaccgcaccatcgtctcggagcgcgacgtctacctaacctacatgctgcgccaggccgcgcggcgcctcgagctgcctcgggcctctgacggtgacggccgcccgcaggcgtgggaccccctgtgaggctgaggcccgaggggccacgtgcctggcatcgagaagaactggagcaccgacctcaacatccaggagatcatgacgtgagtgcccgcccctccctgcaagccccaccccacaagcccccaggtggccgccttcttcggcctgctgggctacagcctgtactggatgggccgccgcaccgcgagcctggtcctgtcgctgcccgccgcgcagtactgcctgcagagggtgaccgaggcccggcacaagtaggagactgctccccgcccgctcgggcccctgaggagccagtgcccccgcg

SEQ ID NO: 11009 - DNA, 506 bp, Homo sapiens
  SIMILAR (3)..(107): 571254mologous to Mus sp. fibulin gene homolog,accession number S61006,Smith-Waterman Score=87.
ctaaagactgccaattttgagtaggaccagaacaaaagaaggctctgtataaggtccatgctcccatacaagctgctctacaacttgggccatatgaatgagcagatctgcgggtgcctgtgttctcatggggagctccctataatcaaccaaggaagaacaaaatttggggtctgctttatatgaccaggagaggattgttttggattgttctgtgtcaacttggttaagctgagaaccgtatttcccagaatctttttccctgtaagattgtaagttaaagctgaccaaaagagaacttgtgtaagatttggaaggcacacatgtgaaacagcagcctttactttctggaagtctttggggctagacaaagtgacaaaaccaaggagctcttcttcccaactcttggccctggcaattaggagcagtccaggttcaacaacagatgcttgtctcctggattctttttcaggtaaatcaaggatttcttcttggtttggatccat

SEQ ID NO: 11010 - DNA, 868 bp, Homo sapiens
  SIMILAR (47)..(331): 361254mologous to Paracoccus denitrificans NosC protein,accession number AJ010260,Smith-Waterman Score=104.
  misc_feature (1)...(868): n = a,t,c or g
aattcggcgggagtcgactcacctgcagcaggcactcggcacaactccgcaggaccggctcacctgcaccgggcactcagcacagcctccagcatgcagcgcctccccgctgccacccgggccaccctgatcctcagcctggcctttgcctccctccactcggcttgctcggcagaagcaagcagcagcaacagctcaaccttgaccgctcaccacccagaccctgggaccctggagcagtgcctcaacgtggacttctgcccacaagcagcccggtgctgccgcacaggagtggacgagtacggctggatcgcggcagctgttggctggagcctctggttcctcaccctcatcctgctctgtgtggacaaactgatgaagctgactccagatgagcccaaggacttgcaagcgtgagacccaggctcggtgcacaaaaatggtgatcgccaccaatttgtggctaatggggaaaggggaggaaaggctaacatggtttctattatttaagtcattttcacctttaagcttcagttacttttacaagggaaagaagaaagagcgggagaaccaaataaggcaagccagtgctgcccttgcatgtcactcccaagggcccctgggctgtgcccaggtaactcctctctcaagatagtccctctgtaatgtatcctgttttaacctttcttctaggcaccaagggaggtgcacaagaaactataagacttagtctcatcatcaacattttcagaagcaaagtgctgggattacaggcgtgagccaccgcgcccggcctcacgtgttgtattttcattcatatttcctttgggacttctttntggcccatgcattatttataaatatgttg

SEQ ID NO: 11011 - DNA, 553 bp, Homo sapiens
  SIMILAR (3)..(215): 911254mologous to Takifugu rubripes zinc finger protein,accession number U90880,Smith-Waterman Score=371.
aaaaagcgtccgtgatcgtccactctgacgtgaagcctttcaaatgcaagctttgtgggaaggaattcaaccggatgcacaacctgatgggccacatgcacctgcactcatacagcaaacccttcaagtgcctctattgcccaagcaaattcaccctgaaggggaacctgacacgccacatgaaagtcaagcatggagtcatggagcggggccttcattcccaaggtctgggaagggggagaatcgccctggcacaaacagacggtgtcctgaggagtctggagcaagaggagccctttgacctctctcagaagcgccgggccaaggtgccggtgttccagtcagacggggagagtgcccaaggcagccactgccacgaggaggaagaggaggataactgctacgaggtggagccctacagccctggcctggccccccagagccagcagctctgcacacccgaggatctgtccaccaagtcggagcacgcccccgaggtgctggaagaagcctgcaaggaggagaaggaggatgcatccaagggagaatggga

SEQ ID NO: 11012 - DNA, 1221 bp, Homo sapiens
  SIMILAR (338)..(511): 941254mologous to Takifugu rubripes zinc finger protein,accession number U90880,Smith-Waterman Score=315.
atgggcctggcacaggaattggactggtcatttgcaaaggttgcttcttcctgttggaaaacacaggcttcctggtgcatctcatttttaaagctcacaccaggctggctggggcgaggcggtgtgctgcttctggccccagcccagtggctgcccactgctatcaccctgtctctggccacagccgacttctccatggctgtcagcatggccactggggttcatggcaagtgcctgaggtcaccattttcaaatgaatgtggtgtgcaggtgctctgtctggatgctgagcttggaaccccaccctgtaggccaaattcattcatgctagtaagagagagcaaaactttgtgggaaggaattcaaccggatgcacaacctgatgggccacatgcacctgcactcagacagcaaacccttcaagtgcctctattgcccaagcaaattcaccctgaaggggaacctgacacgccacatgaaagtcaagcatggagtcatggagcggggccttcattcccaagtgtcccgcccatccctggaggcctgactattggctcatcaaaggtcaaagccttaaagacaggatcaaatgaaactgccatgctgaaaagcccatccctacagccctgcaaactgaaggcaaaacatttcctcaggtgcatgaattcttactctgctcttgcaggtctgggaagggggagaatcgccctggcacagacagccggtgtcctgaggagtctggagcaggaggagccctttgacctctctcagaagcgccgggccaaggtgccggtgttccagtcagacggggagagtgcccagggcagccactgccacgaggaggaagaggaggataactgctacgaggtggagccctacagccctggcctggccccccagagccagcagctctgcacacccgaggatctgtccaccaagtcggagcacgcccccgaggtgctggaggaagcctgcaaggaggagaaggaggatgcatccaagggagaatgggagaagaggagcaagggtgaccttggggcagagggcggccaggagagagactgtgccggcagagatgagtgtctcagtctcagggcttttcagagtacccggcggggcccctctttttctgattacttatacttcaagcacagagatgagagtttgaaagaattactggagaggaaaatggaaaaacaagcagtgcttttaggtatctaa

SEQ ID NO: 11013 - DNA, 408 bp, Homo sapiens
  SIMILAR (58)..(387): 351254mologous to Rattus norvegicus CELF,accession number M65149,Smith-Waterman Score=108.
atggcaatcagcatggtcaccacgcggtccacgacgatcagaacgaccgctgctggatgccactatgagaacgacatggcccacaatcacagtgaccgaggtggcctgcctttgaaggtggtgctgactaccccgtttctgaccccaccaggaaaaggaggtggagcagctggagcacttgagagacgaactgaagaaggtgacagagacgctgggggagcagctcaggagggagggctgacccctacctcagtccctccttcctcctgacacaccctgtggcttaggactgttgaccccgaagcctccacctcacctagcaccccacgccacccctacccaaacaggggaggaggcggacgtgccttggaaccacacccaaggaggtgagtctgagctgggccgggg

SEQ ID NO: 11014 - DNA, 1710 bp, Homo sapiens
  SIMILAR (304)..(696): 991254mologous to Leishmania major probable levansucrase precursor,accession number AL160371,Smith-Waterman Score=679.
atgcatagactggggcggggagaggaaaatttagtgagaggaagacgctcacatgaatctccaaagaaatatcgcgactctaagtcaggacaaaatgtgcctcgactttacaaggaagctaaagaagaaacaaaaatgacagctactaaaactgttattaggtccctcgactatagggtcaccgtcgacagcgacacacttgcatcggatgcagcccggttaacgtgccggcacggcctgggtaaccagtcaattcgggaggatcgaaacggcagatcgcaaaaaacagtacatacagaaggagacatgaacatgaacatcaaaaaaattgtaaaacaagccacagttctgacttttacgactgcacttctggcaggaggagcgactcaagccttcgcgaaagaaaataaccaaaaagcatacaaagaaacgtacggcgtctctcatattacacgccatgatatgctgcagatccctaaacagcagcaaaacgaaaaataccaagtgcctcaattcgatcaatcaacgattaaaaatattgagtctgcaaaaggacttgatgtgtgggacagctggccgctgccaaacgctgacggaacagtagctgaatacaacggctatcacgttgtgtttgctcttgcgggaagcccgaaagacgctgatgacacatcaatctacatgttttatcaaaaggtcttgtacagatggaacagacaaagcagcacatctgtcattgaaacaaataaaacatcggtggagctttctttgcctttcgatgaagattatataatagaaattaagccattcagcgacggaggagatggcagcagcagtgaacaaaattcgaattcaaagatatcaagacacaatttgagaaactggttgttttgccaaggctttgactggaaagacgtgcttctctttaaggaatcaagcttgacttgcagagccaataaaagccccttgggagaactggcctcataccttgtctacacagtttcgtgtacaagggttcttaacctgtggaagttgattggtgttagcactagtttaacaggggagatagacattttccatatgaaagatgaatgtgagcagctctacggacagctgtctttacaaaaggtacaagtaggcagacaaggcacaagggcacctgtggttgggcagtttgtacctgctggcggtgcctatgttgctttctggtataggcctggcgttggaggtcttggcctttgggctggggtgacccatgcttctggtggaggcaagggagccgagctggagccatggccatcaattcgggaggatcgaaacggcagatcgcaaaaaacagtacatacagaaggagacatgaacatgaacatcaaaaaaattgtaaaacaagccacagttctgacttttacgactgcacttctggcaggaggagcgactcaagccttcgcgaaagaaaataaccaaaaagcatacaaagaaacgtacggcgtctctcatattacacgccatgatatgctgcagatccctaaacagcagcaaaacgaaaaataccaagtgcctcaattcgatcaatcaacgattaaaaatattgagtctgcaaaaggacttgatgtgtgggacagctggccgctgcaaaacgctgacggaacagtagctgaatacaacggcatatcacgttgtgtttgctcttgcgggaagcccgaaagacgctga

SEQ ID NO: 11015 - DNA, 1410 bp, Homo sapiens
  SIMILAR (7)..(783): 911254mologous to Homo sapiens putative p150,accession number U93570,Smith-Waterman Score=1208.
atgacgggagactttaacaccccactgtcaacatcagacagatcaacgagacagaaagttaacaaggatatccaggaattgaactcagctctgcaccaagcagacctaatagacatctacagaactctccaccccaaatcaacagaatatacattcttctcagcaccacatcgcacttattccataattgacctcataggtggaagtaaagcactcctcagcaaatgtaaaagaatagaaattacaacaaactgtctctcagaccacagtgcgatcaaactagaactcaggattaagaaactcactcaaaaccgctcaactacatggcaactgaacaacccgctcctgaatgactactgggtacataacgaaatgaaggcagaaataaagatgttctttgaaaccaacgagaacaaagacacaacataccagaatctctgggacacattcaaagcagtgtgtagagggaaatttatagcactaaatgcccacaagagaaagcaggaaagatctaaaattgacaccctaacatcacaattaaaagaactagagaagcaagagcaaacacattcaaaagctagcagaaggcaagaaataactaagatcagagcagaactgaaggagatagagacacaaaaaaccattcaaaaaatcagtgaatccaggagctggttttttgaaaagatcaacaaaattgatagactgctagcaagactaataaagaagaaaagagagaagaatcaaatagatgcaataaaaaatgatcaaggggatatcaccacccttgagagagtggtactggaagagccagacaccctacacctcctcaactacaccccaaggaaggtcttgtacagatggaacagacaaagcagcacatctgtcattgaaacaaataaaacatcggtggagctttctttgcctttcgatgaagattatataatagaaattaagccattcagcgacggaggagatggcagcagcagtgaacaaattcgaattccaaagatatcaacactcccccatgctgcacgcagtgaattccaaatgccaaggaaagaaattgggctaaaaatccctattggaacggatatcttggaaaagcatgtttgttctgatcccgtggctgtggaggctctaggagaaaagcttcatggaggaagtgatgatggttacgggttcccaaagaatgactatgagttgcacagggcaagaagggaggaaggagttcccaatccaccaaggaggccaatgggctactttgtgttgctcctgaaacacatataccaagggccagataacggtaccagctcagggaagtgtggcaaggagctccacagagcccagactctcctggagcagcagttctccgagtgtgtcctggagaccagcagcatgagcatcacctga

SEQ ID NO: 11016 - DNA, 1275 bp, Homo sapiens
  SIMILAR (1)..(1176): 851254mologous to Homo sapiens putative p150,accession number U93563,Smith-Waterman Score=1653.
atggtaaagggatcaattcaacaagaagagctaactatcctaaaaatatatgcacccaatacaggagcacccagattcataaagcaagtcctgagtgacctgcaaagagacttagactcccacacaataatgacgggagactttaacaccccactgtcaacatcagacagatcaacgagacagaaagttaacaaggatatccaggaattgaactcagctctgcaccaagcagacctaatagacatctacagaactctccaccccaaatcaacagaatatacattcttctcagcaccacatcgcacttattccataattgacctcataggtggaagtaaagcactcctcagcaaatgtaaaagaatagaaattacaacaaactgtctctcagaccacagtgcgatcaaactagaactcaggattaagaaactcactcaaaaccgctcaactacatggcaactgaacaacctgctcctgaatgactactgggtacataacgaaatgaaggcagaaataaagatgttctttgaaaccaatgagaacaaagacacaacataccagaatctctgggacacattcaaagcagtgtgtagagggaaatttatagcactaaatgcccacaagagaaagcaggaaagatctaaaattgacaccctaacatcacaattaaaagaactagagaagcaagagcaaacacattcaaaagctagcagaaggcaagaaataactaagatcagagcagaactgaaggagatagagacacaaaaaaccattcaaaaaatcagtgaatccaggagctggttttttgaaaagatcaacaaaattgatagactgctagcaagactaataaagaagaaaagagagaagaatcaaatagatgcaataaaaaatgatcaaggggatatcaccacccttgagagagtggtactggaagagccagacaccctacacctcctcaactacaccccaaggaaggtcttgtacagatggaacagacaaagcagcacatctgtcattgaaacaaataaaacatcggtggagctttctttgcctttcgatgaagattatataatagaaattaagccattcagcgacggaggagatggcagcagcagtgaacaaattcgaattccaaagatatcaaaaaaaaaacaaaatagccaaatccgtggagacagaagtgaggctagtgattggcagtggctgatgcctacgcgagaggatctggggcttccacttcgaatgcatgtacgctgtcagccatcagtacaataa

SEQ ID NO: 11017 - DNA, 597 bp, Homo sapiens
  SIMILAR (121)..(426): 861254mologous to Rattus norvegicus neural cell adhesion protein BIG-2 precursor,accession number U35371,Smith-Waterman Score=410.
atgctacatacaaagcagcacctttccatgggcacagaagacatggatgataagcttcatttctcagactgttcagcagcatccctggtctctctatccactacaacaggaggacatgttttgacaaacatgtctgcagacattgccagatacctccctgtcttgtacagatggaacagacaaagcagcacatctgtcattgaaacaaataaaacatcggtggagctttctttgcctttcgatgaagattatataatagaaattaagccattcagcgacggaggagatggcagcagcagtgaacaaattcgaattccaaagatatcaaatgcctaggcgagaggatctggggcttccactccgaatgcatgtgcgctgtcagccatcagtagaataatgatttccctcacagctaggtccagtttatgacaaaagttatctgaaggacttgctgtttataatataagcaacatttagctagttgttttgaagacacccagtactaagtaatattgttgttcaagtacatcttattactggaataaaaatgttttttgcttctttaaaaaaaaaaaaaaaaaaaaaaaaaaaaaaaaa

SEQ ID NO: 11018 - DNA, 1086 bp, Homo sapiens
  SIMILAR (61)..(528): 1001254mologous to Homo sapiens FLJ00044 protein,accession number AK024452,Smith-Waterman Score=846.
atgatcgtaccctggctgaggctccacacactgcccctgcccgcagtggccaccgcggctggtgccccagaccccaccgccggcgcaggaatcgaggacgccaactgctggcacctggacgaggagcagatccaggagcaggtgaagcagctactgtccaatggcggctactacggggccagccagcagctgcgctccatgttcagcaaggtgcgggagatgctgcgaatgcgggactccaacggggcgcgcatgctgattctcatgaccgagcagttcctgcaggacacgcgcctggccctgtggcggcagcagggcgcgggcatgacggacaagtgccggcagctctgggatgagctgggggccctgtgggtttgcgtcgtcctgagcccccactgcaaaccagaggaaagggcaggctggctccagctactcagcaggtgggacaagctcgacgtctgcccactggaagagggcaactactccttcgacggccccagcctgcagcccaccatggcccccgccccaggctcggaggaagaggaagaggtggcagccacaagtccccgccacacggtatttggccgcgccttgctggctggagagctacactggaatgacgcctacctgcagaggatcctggccagtgactcctacgggcccagcctcacaggcagcgtgggtggggacaaaccgactttcgacccccagggccgcccactgtggctgggagaacctttccccactgcctgtgcccgtgtggacaccctgcgtgcccacggatacccccgccaggccctgcggctggcaagtgccatcatcaacacactccggctgcagcagcggcatcagctagagagctacaagcagcagaaaaaagatgcattaagccagccacgattagatattcccaaggccctgatggagacccccaaaattacacgctatacacagacatacagcaccccgattaatacgcagtcgaaagtgatgctgacacacacatacagtccccacaataacactgccacgtgtgtagacacgtcacccacaagggctcggacatccagggatagtgcccattga

SEQ ID NO: 11019 - DNA, 828 bp, Homo sapiens
  SIMILAR (487)..(1923): 821254mologous to Homo sapiens putative p150,accession number U93567,Smith-Waterman Score=1984.
ttaacatgggctcggtagggccctgtatcctcccagctcaggttgctgatctacacgcagggataaacctggactcatgacactcaagcgacccgaggaccaggtttccgcttggtaaaagatgtctgggcccccagcttctcccatggttactgtggtgatctccatggggaccgaacgcgatatccaggagatggtcgccacctcctgtccagagcgatatccaggagatggtcgccacctcctgtccagagcgatatccaggagatggtcgccacctcctgtccagagcgtctgcaggggcagaatgacagaccctcctaggtcccagtgaccactaggggtgctgtggtccctctggaagtccctggtccattctgatgcaggtgctggtgagttatgagaggtcatcacaggtagtacttggccaaacccataacagtgctgcttggttcccaatgtggatgatgaagaagaaggagaagaacaagatgatgatgatgatgaagaagaggaaggattataagatattgatgaagaaggggatgaggatgaaggcgaagaagaggaagatgatgatgacgttgaggaaggagaggaggatgaaggagaagatgactggaaatttgcaaaagaatagagctgactattctccagtcttacccctccaaagcccttgactggggagggatcactgacctttttcagtgtctcttgccttactagtttttccttaggactcttgctgaagctgaatccgataattggaaagacagaccagccaaggtgcccgccatgaaccgttgctagagaagggtccctgagcat

SEQ ID NO: 11020 - DNA, 683 bp, Homo sapiens
  SIMILAR (2)..(205): 1001254mologous to Homo sapiens 11-FEB-1999 Set* splice variant encoding retinoblastoma interacting protein,accession number X87624_cd1,Smith-Waterman Score=375.
tgatatttggccaaacccattacagtactacttggttcccgatatggatgatgaagaaggagaaggagaagaagatgatgatgatgatgaagaggaggaaggattagaagatattgacgaagaaggggatgaggatgaaggtgaagaagatgaagatgatgatgaaggggaggaaggagaggaggatgaaggagaagatgactaaatagaacactgatggattccaaccttcctttttttaaattttctccagtccctgggagcaagttgcagtctttttttttttttttttttttttccctcttgtgctcagtcgccctgtttttgaggttctcttttctctactccatggttctcaatttatttggggggaaataccttgagcagaatacaatgggaaaagagtctctacccctttctgttcgaagttcatttttatcccttcctgtctgaacaaaaactgtatggaatcaacaccaccgagctctgtgggaaaaaagaaaaacctgctcccttcgctctgctggaagctggagggtgctaggcccctgtgtagtagtgcatagaattctagcttttttcctcctttctctgtatattgggctcagagagtacactgtgtctctatgtgaatatggacagttagcatttaccaacatgtatctgtctactttctcttgttt

SEQ ID NO: 11021 - DNA, 1472 bp, Homo sapiens
  SIMILAR (730)..(1857): 941254mologous to Homo sapiens putative p150,accession number U93563,Smith-Waterman Score=1884.
tttcaaaggacacaaagagagatgtggactcaaagtcaccggggatgcctttatttgaagcagaggaaggagttctatcacgaacccagatatttcctaccactattaaagtcattgatccagaatttctggaggagccacctgcacttgcatttttatataaggatctgtatgaagaagcagttggagagaaaaagaaggaagaggagacagcttctgaaggtgacagtgtgaattctgaggcatcatttcccagcagaaattctgacactgatgatggaacaggaatatattttgagaagtacatactcaaagatgacattctccatgacacatctctaactcaaaaggaccagggccaaggtctggaagaaaaacgagttggtaaggatgattcataccaaccgatagctgcagaaggggaaatttggggaaagtttggaactatttgcagggagaagagtctggaagaaccgaaaggtgtttatggggaagggagaatcagtagaccatgtggagaccgttggtaacgtagcgatgcagaagaaagctcccatcacagaggacgtcagagtggctacccagaaaataagttatgcggtttccttttgaagacaccccatcatgttctggagcgtgcagatgaagcaggcagtcacggtaatgaagtcggaaatgcaagtccagaggtcaatctgaatgtcccagtacaagtgtccttcccggaggaagaatttgcatctggtgcaactcatgttcaagaaacatcactagaagaacctaaaatcctggtcccacctgagccaagtgaagagaggctccgtaatagccctgttcaggatgagtatgaatttacagaatccctgcataatgaagtggttcctcaagacatattatcagaagaactgtcttcagaatccacacctgaagatgtcttatctcaaggaaaggaatcctttgagcacatcagtgaaaatgaatttgcgagtgaggcagaacaaagtacacctgctgaacaaaaagagttgggcagcgagaggaaagaagaagaccaattatcatctgaggtagtaactgaaaaggcacaaaaagagctgaaaaagtcccagattgacacatactgttacacctgcaaatgtccaatttctgccactgacaaggtgtttggcacccacaaagaccatgaagtttcaacgcttgacacagctataagtgctgtaaagactgttatcagagactctgataagactaaaagtggtgagggggcgtatgggagggaaatgaagtcccctcacaagtttccagaaggaaaaatccacaacgacaaagaacatgataggatcgtccaagaatttctggcagagactggaccaaaagtcacaaggtttaatgagcagtgtcgtttcaggccacgaatttatgtgtatgaaaataaccagacccagatcatggtggaggagccacaagcctga

SEQ ID NO: 11022 - DNA, 440 bp, Homo sapiens
  SIMILAR (996)..(1106): 701254mologous to Homo sapiens ribosomal protein L37,accession number L11567,Smith-Waterman Score=135.
  misc_feature (1)...(440): n = a,t,c or g
gggggggcgcaccacactntttgagagaaacgagcgncnctggattcgcgggccgttcacacgtagcctgtgccggtttcctcgggtgagtccgtccgcgcgcggtgccgggggacggcctaggctgccgggggtccggggccccaggcattccgggctgcagattgacggggatcccggatgcaccgcgcgcccccgcgccctcaccgacgggtccagacctggtgggaagaaggtgcggggacgggtccctgaggatcccgatgcctacgagccaagatgctcagctttataggtgtgacctacacatgtgacttcacctcagttttgtgatccgtaaaatggacaaattcgaagnnnnnnnnnnnnnnnnnnnnnnnnnnnnnnnnnnnnnnnnnnnnnnnnnnnnnntgcaggagggagcctcggaagcagggccc

SEQ ID NO: 11023 - DNA, 889 bp, Homo sapiens
  SIMILAR (51)..(368): 361254mologous to Plasmodium falciparum merozoite surface protein 2,accession number U72957,Smith-Waterman Score=105.
cctcggcggcctagtacacacgcacctgagtgagtggcaccagaggaccctctccatgtttagggacctcctgggcctcaggagcgtggcgcccgcccctgggcggactccccccatccgcgggcgcgaatggtccgggccgcgtccgcagtgctgctggctgctccctggttgctgggtgcaaagtgctgggttcttgggtttctggattcgcgggccgttcacacgtagcctgtgccggctcctcgggtgagtccgtccgcgcgcggtgccccgggacggcctaggctgccgggggtccggggccccaggcattccaggctgcatattgacagggatcccggatgcaccgcgcgcccccgcgccctaaccgacaggtccagacctggtgggaagaaggtgcggggacgggtccctgaggatcccgatgcctacgagccaagatgctcagctttataggtgtgacctacacatgtgacttcacctcagttttgtgatccgtaaaatggacaaattcgaagctacttcacagtgctgttgagaggattaaatgaaacaatgcttgtaaagctatttgcaggaggtaggcatgggatccacgctggctgtcattgcccccacccccatcagtacacataggaaagtgcctgtctcccctaccaccatagtgtgttttctggttggtgcctaaatagacacaggtgtcatctctccttcaccgccagagtcattctgtaaataattgccagtagcccccctttcaccaccattatgacaactaaaaaaaagccaaagaaatttccaaaatgccccctgaagttgacagctcccctttgagagactgtgtgagagagaactaaacccttgggatgagaacttcacacactac

SEQ ID NO: 11024 - DNA, 387 bp, Homo sapiens
  SIMILAR (3)..(65): 851254mologous to Homo sapiens Human secreted protein, SEQ ID NO: 6297,accession number G02216,Smith-Waterman Score=101.
  misc_feature (1)...(387): n = a,t,c or g
ggaacgtctccggatgccaggagtcgcaaagggccgaccacgatgaggaaaccccaggcggggacgggggaannnnnnnnnnnnnnnnnnnnnnnnnnnnnnnnnnnnnnnnnnnnnnnnnnnnnnnnnnnnnnnnnnnnnnnnnnnnnnnnnnnnnnnnnnnnnnnnnnnnnnnnnnnnnnnnnnnnnnnnnnnnnnnnnnnnnnnnnnnnnnnnnnnnnnnnnnnnnnnnnnnnnnnnnnnnnnnnnctggtggtgtgtgtttcaatgcctctgctgtatgacgcnnnnnnnnnnnnnnnnnnnnnnnnnnnnnnnnnnnnnnnnnnnnnnnnnnnnnnnnnnnnnnnnnnnnnctcccagtctctcttctctcactgtctctca

SEQ ID NO: 11025 - DNA, 1422 bp, Homo sapiens
  SIMILAR (1404)..(2534): 911254mologous to Homo sapiens putative p150,accession number U93563,Smith-Waterman Score=1895.
atggccccaccgcgatgtccccgtccccccgccccgcccccctccccgccacgcctctccctcagcagccagtgccgcactgagccctcgccccacgctaatgcgatatggagagacccggtacagctgttgggagctgcctctcccgccctcaatctccctgtctgtggttccagagggaagaagagtggggaaaaaaggatgaagagaattgtttcagtgctgggggaggtcttaataattactgtagattgtgctgggaatacattatggaaattttgtcgagtgaataaaagtcaattatatacattatgtacaacagtacaagtaggccttgagacctacgggatcattctgtgttgcagcaaggccctgcctgcctcaccagatgtggtgagcctatcctatctcactcggaggggtccaaaatcggatctgaacgggagtctggagaacacagcaggcatcctgaagctccacctccctccgtggaagtcggctcaaggaggtcctgaggacaggactcctaggggtttggccctgggaacggacaagacacccgcggccccctctcccacgccgccccaaactggaccccggatccagccgccgccgtggcggcaggaggaacctcgctgccgccgcgcggcggtggcggtatttaaaggggacgcagccatactgccaggagcggagcgcgagtcggctcagccaatgcgcatgcgcgaggcgggagcggtttctcccgtcacagtggttcccatggttgtcttagaaaccagtccccgaggcttggcaaagcaggagccctctgtggcagtgcttgggtgtcggggctctgaggatccggcctcacctctccacggggtcgacgggaacgtctccggatgccaggagtcgcaaagggccgaccacgatgaggaaacccgacgcagagtccggagaaggcagcatggaatccctccctcaggcctctctggacggtgttggtgggggatcaagatgaacacactgcagacgaggacacgagccccacaggagctctttgtcccgccggagaccagcggacccacgtcagagaagatgcttgtatcttttcacggctcttctctgagaaatgaagccacaccacaatacggtctggaagaggaagccgggaatgggagatggcaacagtctcctgtcactggaatgctggcctttttggacaagccacccttttggaacccccatcccttatgaccctggcagtggaacggtgatttatcctgcctggccgccggggtttgccctgtcctccctcctgctttgcctcacctgtttcccaagtgcctcaatgcctttcgctgacgcccaatgttttcaacaaagatgacttcccagtccgtcagggagacattttttcgaaaaaaaaaaaaaaaa

SEQ ID NO: 11026 - DNA, 479 bp, Homo sapiens
  SIMILAR (66)..(233): 411254mologous to Rattus norvegicus caudal-related homeobox protein,accession number AF104031,Smith-Waterman Score=94.
cttcttgtgcaaagcttcattctcggttcaatatctaacctccctactggggacattttcattcctctgctgcagcctctgcagctttgaaggggaaagacggaggaagcagcaggagcctagtaccaccggcacagtgacactcacacagccccagcaaaacgcactgcgtccacacgccgtcccggtcctgtgcacagggcctcacgcacacactcacacagtcccctccgtcactcaagatcgcgcaatccccatcctttgatgcccgcgcacacgcacgcctaaggatctggcagattccgtctgcgccccgggttcctcctctgagcgcctcgctctcgcccacccgcactgccgggtcggtcaggttcgagtcccagtccacgaagacctcccgcagccaccgatttcttcctaggacgtgaagaccttacccagctaggtcgtcaacccacgaaatcgtcgacccgggaatt

SEQ ID NO: 11027 - DNA, 813 bp, Homo sapiens
  SIMILAR (577)..(101): 331254mologous to Leishmania major L8453.1,accession number AC008054,Smith-Waterman Score=147.
atggatgactttgaggggtccaagacttcagtggaagaagcaattgccgatgtggtagaaatagcgagaaccagaaatctggcaaacatccccaagccagagctggagtacctggagtgggtgggggtaagaagggaagccaaggtcgtcccggaagctggatcagagcactgcttctctcaacattcgattctggagtacgttgagcccagggcgttctccccgccagcgtccttgcccgcgccagtgcccgccggggtgcggcgagacagaacctgggagcgcggcgcgccaggcagcccgaggcaccgctggtggcaggcgctgcgcttcgccgagtctgggcgcctggactggaagaggaggcgagagggagagagcggggaagaggaggaggaggaggagcaggagcaggagcatgggcaggggcagtctgctaaatcatctacgcagcgagcctgggttgaggagggagaggaacggcgggagcagttgacgggtttgcacgctttctctacgcggttccaacggcaaacagaccctctggaggtgcatttcttagccctcctccaggggagattacagtcaacatccacaggatgcctcaaggagagagattacaaggaagggaatggggatgataagtcttgtacgagggtttctcacatgagacagtgcattaaagttcatggcacagtggctggcacacaagctgtacggacttccagtatcatcctgtcattacagaacatcacagaaattgttgtccacatagttgaatacatagacaaaggattagaccgtattacatga

SEQ ID NO: 11028 - DNA, 450 bp, Homo sapiens
  SIMILAR (78)..(314): 351254mologous to Hylobates moloch dopamine receptor D4,accession number AB032918,Smith-Waterman Score=96.
ttaggacaccgagcagtaagggctgtgggagaccccccaggggtatgggagcccaagggtctgctggttgcggacgccgccgatcaccacgcagatctcggcaggcacgtcgctggtcccatccttgctgaccgccttcttctcctccttggcctcgccctgccagatcacctcctggatgtagtcatcgggcagctctgtcttcaccttcacctccgtcatcgttccttgctcggcactcagcgaggcctcggctggcactggctctgggccctccaccttggtgctcttctggctgcgcttcaagcgctccctttgaccttcagcatccagaacagagccaaaaccaagatgctcgtgggtgagcaggaggacagtaggttccctggctttccgggctgctgccaccgttttcatcctgatggacccaatgagcaccagaatagccat

SEQ ID NO: 11029 - DNA, 412 bp, Homo sapiens
  SIMILAR (5)..(199): 981254mologous to Homo sapiens HSPC320,accession number AF161438,Smith-Waterman Score=339.
gaatcagttctgtgtatccaacattaatcagaaggtgaagtttcagcctcttagcaaatatccggctgtgatcaatgatatttcattctggttgccctctgagaattacgcagaaaatgatttctatgacttagtccgaacaattggaggagacctggtggaaaaggttgatctcatagacaagtttgtacatccaaaactcactccttgttccggggactgctggcctgccacttcctgctcacagtcgcagatggggcttcctgagtctgtgcactgtcagtcagagctgagatgctagaggacgcacaagaccagccactgctactcgatcacgtaccgccacatggaacggaccttgcccagagagagggaaggccattcaccagggctttgcggaagctgagcccac

SEQ ID NO: 11030 - DNA, 375 bp, Homo sapiens
  SIMILAR (892)..(2715): 971254mologous to Homo sapiens putative p150,accession number U93563,Smith-Waterman Score=3159.
actgtgcaagagaaggatagggtgcagtaacagaaaatgatttctatgacttagtccgaacaattggaggagacctggtggaaaaggttgatctcatagacaagtttgtacatccaaagtaagtgaaaagctttctgattttacccttgactatctctgtgtgataaatgtcatgtggaagcatccccagcctgcaggtccagatgagggtacgtaataatgttcatactcagatatcccaagtgcatcgccacctacctgctgtcatggatcccagtatcccgcagagccccccagaagtatttctgtaggtcccagggggtgtccacagcaagctaacttccactggacatgacagtgactcccattgggccc

SEQ ID NO: 11031 - DNA, 1534 bp, Homo sapiens
  SIMILAR (13)..(864): 1001254mologous to Homo sapiens phenylalanine-tRNA synthetase,accession number AF097441,Smith-Waterman Score=1528.
ggaatttctacaatggtgggctcagctctcaggagaggtgcccatgcatatgtctacctggtgagtaaggccagtcacatctccagaggccatcagcaccaggcctggggatcgaggcctcctgcagcagagtgtgccacccaaagagctccaggcagtgtggtggagctgctgggcaaatcctaccctcaggacgaccacagcaacctcacccggaaggtcctcaccagagttggcaggaacctgcacaaccagcagcatcaccctctgtggctgatcaaggagagggtgaaggagcacttctacaagcagtatgtgggccgctttgggaccccgttgttctcggtctacgacaacctttctccagtggtcacgacctggcagaactttgacagcctgctcatcccagctgatcaccccagcaggaagaagggggacaactattacctgaatcggactcacatgctgagagcgcacacgtctgcacaccagtgggacttgctgcacgcgggactggatgccttcctggtggtgggtgatgtctacaggcgtgaccagatcgactcccagcactaccctattttccaccagctggaggccgtgcggctcttctccaagcatgagttatttgctggtataaaggatggagaaagcctgcagctctttgaacaaagttctcgctctgcgcataaacaagagacacacaccatggaggccgtgaagcttgtagagtttgatcttaagcaaacgcttaccaggctcatggcacatctttttggagatgagctggagataagatgggtagactgctacttcccttttacacatccttcctttgagatggagatcaactttcatggagaaatggctggaagttcttggctgcggggtgatggaacaacaactggtcaattcagctggtgctcaagaccgaatcggctgggcttttggcctaggattagaaaggctagccatgatcctctacgacatccctgatatccgtctcttctggtgtgaggacgacgcgcttcctgaagcagttctgtgtatccaacattaatcagaaggtgaagtttcagcctcttagcaaatatccggctgtgatcaatgatatttcattctggttgccctctgagaattacgcagaaaaatgatttctagtacttagtccgaacaattggaagtgacctggtggaaagggttgatctcatagacaagtttgtacttccaaagacgcacaagaccagccactcgtaccgcatcatgtaccgcccacatggaaccgactctgtcccagtagagaggtcaggcacatcctatccaggccttgcaggaggctgcagtccagctgttgggtgtggagggcaggttctgatgtcaccacttcactccaggctgcagccctcttggggctccaggatttgctgaaagagaaaaagatatggtttgtgaactggggcatcaatcatcttttgataaatggatcagttttaggactttcagaaaataaaagatcgctcttgaaaagctaaaa

SEQ ID NO: 11032 - DNA, 445 bp, Homo sapiens
  SIMILAR (349)..(441): 451254mologous to Crithidia fasciculata ctyochrome c oxidase subunit I (2034 is 3rd base in codon),accession number X15081,Smith -Waterman Score=60.
tctctagaccagcgcggaggaattcatttcaacctgctccactccattaccatgtcctgccagtcttaattcactcaatcctagatctgtcagcccaccttctttctccacaggctgctgagccctaagggaaagttttacctaacctgacagatggctccatcttctccactgcacacagaggtgtttttcaaaaagcggatttctactttaagtcctttcgtggctcttctctgtcttaaggattaagagaaaaaaaatttttttaatcactttgcatgtgtttatgatatgcagtcttatgtagaaaatctgtttcccctggtcagttcccactttcatcctatgtatatgattctaccaaacctttgcaactctctaaaggccttctgcacccccttgtcctcagaagataacatgtttttacttagtttttattatggat

SEQ ID NO: 11033 - DNA, 582 bp, Homo sapiens
  SIMILAR (532)..(2250): 921254mologous to Homo sapiens putative p150,accession number U93574,Smith-Waterman Score=2691.
tcaggcaggtccttcagggggtattccagaaggcattgctatcacaggagatgacagctccatgcatgccattgcccctgaagaccttccagtgggacaggatgtggaggcggaagacagtgatactggggatcttgacccagtcttgactgtgtttaggagaggtgtggaaagggagtttttttctaactggtacaaaacggcctggagtttttctaagcttgcacaaaaaggcttgctatcatcataaccatcatcgttatcatcatcatcatcatcatcagacaaagccgtaacagcaggaactgaactctttgcttcttcactttcctcctcatcagatccaaggagatcaatttcatcatcatctttactatttgtagctccacttcctgtagtgtcttccaccttagcaggaccatacctgcccacagctttcttcactcctggcaggctggccttttccttttcataagacttgatgtgcttgtgatggcacataccctcgatgtagctcttgtccaccaggtaatcgttgagcacctggaggctagccgggcttttcagatctctgaaacccat

SEQ ID NO: 11034 - DNA, 1172 bp, Homo sapiens
  SIMILAR (2239)..(3768): 941254mologous to Homo sapiens putative p150,accession number U93572,Smith-Waterman Score=2521.
ttaagtatttttccctttaccagatggtacaatattaagtttgccaatagatggcgttggagagacattgcgggatgaaagggttttgctttctgcagctgatggcagctcactaggtttctttagggctcccgtaatgccccgttcctgtagctcaggaggcttccccagccctggctccggcagcgcatggcagcaggttgcatccagcagcctcccccagcaatccccttcacccacccaccttccagcagttttgtagcagagtgcctccagtaagacacctcccagtaacagcttttcccagcaccctgggggtggatttccagcaagttccaccagtacagcatcacagcacctctctggcatctgctgaaccatggccatgcctgtccaataaggtctggatgtcagccctgttggtggaggctctatcgcagcctttggttttgcatttttgtattcttcagtgtctgtgtcctcatcctctgagtaccaattatctcctcttcctccagccaagaggcccctggccgcgcaacagtcctgcagcattcccatagccagtgtatttcagcagactatccactctctctttgcaaaggacaaaaaggaattcagcagcaatttgcttgactccaaggtcaacatgtgtcatgaggcgcaccagcttatttctcacagttgagccaacttcaggtcgatttgtcacatcccttcacggtggtaaaacctttctcagctgttttattactgggcagttcatctatagtcgttgcctcttgggctgtttcttcatgggttaacggacaaatgagaacatccaaacaagagactggaacattgcttaaaaggttgactgcattgtttttggaggagaaaacagacttaataagtaagttatatggaatgtcagaaggtgaatagcactgacagatggctccatcttctccactgcacacagaggtgtttttcaaaaagcggatttctactttaagtcctttcgtggctcttctctgtgcagggtcaagatccccagtatcactgtcttccgcctccacatcctgtcccactggaaggtcttcaggggcaatggcatgcatggagctgtcatctcctgtgatagcaatgccttctggaataccccctgaaggacctgcctgaggctgcat

SEQ ID NO: 11035 - DNA, 873 bp, Homo sapiens
  SIMILAR (4)..(129): 801254mologous to Canis familiaris Ribosomal protein,accession number AJ388528,Smith-Waterman Score=175.
tcaacaatgattgaagctcatgttgatgtcaggactaccgatggttacttctttcttctgttttgtgttggttttactaaaaaacacaacaatctgataccgaagacctcttatgcttagcaccaacagtatatctgccttcctcaccaggatgaccgggtaacccatcaaaacccttctctccctgatggctccatagcaagggttctcagcatttattacctttacattagcagaagagagatgaatagcattatctcccaaggactgcaaaaagttcacatccatattgttattcctggcagcctgatgaaccaagaacttctggatgatctcataactgtatttttcaaagcctgagtcaaaggtaagctggccatttgagccaggcaccaagtagcggaatcttgggtcgatctgatcagaaatgccacggctgatgttagaaagtaaagccaactgttgcatcagctctggcagtaacccttgaagcttctgctgaattttctttgaaggagttgagatatcaattcctacagacaaatccaggttgcatccttgtggatcacagaccttagaaagaatttccttctccaggttctgcagggcctcaaaatttacatcatggtacactttgtcctcatcattagttatctccaaaagctgcgattttttggcttctcccaccccaatggcaaaaataattgtgtttttgtccctgagggctttggctggtatgattacattatcttgggccaccccatcggtgatcacaatcaaatattgttgaacactgggtctccctccttttgaactgtcaaaaaaaggcagagtgaaattcagagctttcccagtgcgggtgccatccctcat

SEQ ID NO: 11036 - DNA, 584 bp, Homo sapiens
  SIMILAR (136)..(483): 791254mologous to Homo sapiens ribosmal protein small subunit,accession number L13802,Smith-Waterman Score=472.
atggtggaacccctggctctactaaaaattgcaaaaattaagccagacgttggtggcaggctttcttacagtaagcttataatgtctcctacagactatgggcaccagatcacagaggcagccagacctgtgatgacccaaggaacccaaattgcatctgatggtctcaagggtcttgtgtttgaaatgagtcttgctgatttgcagaatgatgaagttgcatttagaaaattcaagctgattactgaagatgttcagggcaaaaactgcctgactaacttctatggcatgggtcttacctgtgacaaaatatgttccaaggttgaaaaatgttcaacaatgattgaagctcatgttgatgtcaggactaccgatggttacttctttcttctgttttgtgttggttttactaaaaaacacaacaatctgataccgaagacctcttatgctcagcaccaacagtcccccaaatccagaagaagatgatggaaatcatgacctgagaggtgcggcaaatgacttgaaagaagtggtcaataaaatgattccagacaatattggaaaagaagtagaaaaggcttgcc

SEQ ID NO: 11037 - DNA, 892 bp, Homo sapiens
  SIMILAR (29)..(631): 531254mologous to Aplysia californica KRP-A,accession number X68555,Smith-Waterman Score=411.
  misc_feature (1)...(892): n = a,t,c or g
ggcacgaggctgaccagcaccatggcggttgggcaagaacaagcgccttacgaaaggcggcaaaaagggagcccaaaaaaaagggggtgaatcccttttctaaaaaagaatggtatggatggtgaaagcacctgctatgttcaatataagaaatattggaaagacgctcgtcacccaggacccaaggaaccaaaattgcatctgatggtctcaaagggtccgtgtgtttgaagtgagtcttgctgatttgcagaatgatgaagttgcatttaggaaaattcaagctgattacttgaagatgttcagggtaaaaactgcctgactaaccttccatggcatggatctttaccccgtgacaaaatgtgttccatggtcaaaaaaatggcagacaatgattgaagctcacgttgatgtcaagactaccgatggttacttgcttcgtctgttctgtgttggttttactaaaaaacgcaacaatcagatacggaagacctcttatgcttcagcaccaacaaggtccgccaaatccgggaaggaagatggatgggaaatcatggacccgaggaggtggcaggaccaaatggacttggaagaagttggtcatgaattgattgccggcagcatttggaaaagacatagaaaaggcttgccaatctatttatcctctccatgatgtcttcgttagaaaagtaaaaatgctgaagaagcccaagtttgaattggggaaagctcatggagcttccatgggtggaagggcagtagttctggaaaagccacttggggacgagacaggtgctaaagttgaagcgagctgatgggtatgataccaccgttccaagaatcaaattaaacaacagncttcaaataaggcgaattnggggtgctatttgtg

SEQ ID NO: 11038 - DNA, 694 bp, Homo sapiens
agacagggtctcactttgtcattcaggcttgagtgccctggtgtgatctcagcccactgcagcctcaatcttccaggctcaagcaagcctccagcctcagccccccaagtagctgggactacaggtgtataccaccatgccagctaattttttatatttttcgtagagatggggtttcaccatgttgcccagcctggcttgtgcaatttcgttttttgaaaaaatagctaatggagattctgataattcttattgtttcctggtcaacttctgtgtctttcctaattttcaagctgtcagtagaaatgatgaactgtagcaggccagaagctcagcttcatttggtcactttttcctttcctgtcttcttgcccatccagctttcccctttctgatggtgtcttcttatttctgacaatgcttgggagcgagctgtgtgacacccagattttacgagttgccagcggtggagaggagagagccgggcatgcagattcttcatggaccctactagagaggacagagaaaaagagcactggtgtaggagcccacgggtctggctcttaaccctggcctggtgacttcagctatttgaccttgagcaagtcacttcatttctcctttagcaacatctctaaaatgagggagtgagcaaaaatgttcccttagatttcttctaattcagaaataccag

SEQ ID NO: 11039 - DNA, 465 bp, Homo sapiens
  SIMILAR (5)..(403): 591254mologous to Homo sapiens p40,accession number U93569,Smith-Waterman Score=424.
cctagatgtccaaatacaagaagcacaaagaacacctgggaaattcatcgcaaaaagatattcacctaggcactttgtcatcaggttatccaaacttaagaccaaggaaagaatcttaagagctgtgagacagaagcaccaggttacctataaaggaaagcctatcagattagcagcagatttctcaacagaaaccctacaagcaagaagggaccggggacctatcttcagcctcctcaaacaaaataattatcagccaagaattttgtatccagagaaactaagtatcatatatgaaggaaagatacagtcattttcagacaaacaaatgctgagagaatttgccattaggaaaccaccattacaagaactgctaaaaggatctctaaatcttgaaacaaatcctggaaacacataaaaacagaacttctttaaagcataaatcatagaggacctatgaaacaa

SEQ ID NO: 11040 - DNA, 648 bp, Homo sapiens
  SIMILAR (315)..(539): 761254mologous to Gallus gallus beta B2-crystallin,accession number S52930,Smith-Waterman Score=311.
ggagccccgtcctggggagaaaacagctcacgtctatggccctgactgcttatgcgggagctgcgtgcagctcagcttctccggggcatttttttctacacgctgggtgagctatgaacaggccaactgcaagggcgagcagtttgtgtttgagaagggcgagtacgcccactgggactggtggaccagcagccagaggacagactcagcagcctgaggcccatcaaagtggacagccaagagcacaagatcatcctctatgaaaaccccaacttcaccgggaagaagatggaaatcatagatgacgatggtacccagcttccacgccccatggctaccaggagaaggtgtcatctgtgtggttgcggagcggcacgtgggttggctactagtaccctggctaccgtgggctgcagtacctgctggagaagggagactacaaggacagcagcgactttggggcccgtcaccctcaggtacagtccgtgcgctgcatccacgacatgcaggggcaccaatgtggtgccttccacccctccaagtagtgcccaccccaccatgcctccttcccaggacccaggtttgctgcccaggaaccctccagacctcccagagagtgaataaagtgtgacttgcaacttgaaaaaa

SEQ ID NO: 11041 - DNA, 1123 bp, Homo sapiens
  SIMILAR (2)..(277): 591254mologous to Homo sapiens crystallin beta-B2,accession number L10035,Smith-Waterman Score=217.
ggaaatcatagatgacgatgtacccagcttccacgcccatggctaccaggagaaggtgtcatctgtgtgggtgcggagtggcatgtaagtgcattgccagccctggctcaccctgccccaggaactgagactctggggtcctaggagtggagaaaccttggccttaacctcagccccagtgagcaagacatgcgactttggggcccgtcaccctcaggtacagtccgtgcgctgcatccacgacatgcaggggcaccaatgtggtgccttccaccctttgggaactcaggaggaggaggaggcaggacagaaagagcagatggaacaggtacccttttggttagccagaggggacatttgtgaactaagtgggaagaaaagtgtcatgtgattagaccatgtgcatccggagccctttcctttcttttggtggccacctctccttgaggggccttgtgaccgtgccgagagcaagaactctgcaactgggctgactgggttcagattccaaatccggtaattttcggggctgagcaactgagcaagttgcttaaggacgctgttttttcatccagaaaaatggagataatagcagtacttcctttagaggttgttgtgaagatttaacctatttagtgtctgtgaagcgcttagtactatgaggtgtttaacataattattatgcagctaaaaacttgaaccatggggatgtgcttacttatttgtggggagcttacaaattaaaacaattgaatttatggagaccagtagaaggatggttaccagcggactaggaagggtaagatggcggggtggagttaggggagaaagaggggatagttaatgggtacaaaaaaatagttagaatgaattaagatctagtattttggtagcacaacagggtggctatagtcaacaataatttaattgtacatttaaaaataactaaaataatataattggattgtttgaaacacaaaggataattgcttgaggggatggatacccaatttaccccgatatgattattatgcattgcatgcctctatcaaaatagctcatatgccccataaatgtatacacctaccatgtatccacaaaaaattaaaaatggaaaaacatt

SEQ ID NO: 11042 - DNA, 567 bp, Homo sapiens
  SIMILAR (1388)..(2956): 691254mologous to Homo sapiens putative p150,accession number U93567,Smith-Waterman Score=1711.
atggaggaggaggaactggagttcgtggaggagctggaagccgtgctgcagctcacgcccgaggtgcagctggccatcgagcaggtgtttccaagccaggaccctctagatcgagcagatttcaatgctgttgagtatatcaataccctgttcccaaccgagcaactgccaatgccctcagcccacggaggagtgagttcctgtggcaacgcaggcggcccagtgtcctttgccacgagggagaatgcacgctgtgggatctggggatccgggggtgtctgtgatggggtgtttggggctgtgctgcgggatggggaggagtctgaggaggcggggctctgggttggatgctctcaggacgcaggatcgtcctccgatcagcgatcttcacaagccctgtctccagggcagggagcccagagcgaggctggagctgcgattgctgacgtggctgcagtccccctgctgcctgggccaggagaggctggacattctgtggcttggatggtgttcatgctgtggtctgtgctcagacgtgattatgaagggggttttgatttgtcctga

SEQ ID NO: 11043 - DNA, 300 bp, Homo sapiens
  SIMILAR (182)..(69): 381254mologous to Homo sapiens Human TNF receptor related splice variant 2 (TR2-SV2) protein,accession number W60047,Smith- Waterman Score=63.
tcatctgatgggcgccatctggcatttgaccagggcagtcctggttgagttctcggacacgtagggaagcaaagagctgtagacgtgcagccatctgtggctgtgagagtccgacagcctctgctgctgttgagcaccatcatggggagtgggttgctcggttgggaacagggtattgatatactcaacagcattgaaatctgctcgatctagagggtcctggcttggaaacaccctttcttccagttgatcgaattggctactgaagcttgtgcgctcgtcaggtagttcttgtgccat

SEQ ID NO: 11044 - DNA, 703 bp, Homo sapiens
  SIMILAR (2)..(235): 371254mologous to Lycopersicon esculentum glycine-rich protein,accession number X55695,Smith-Waterman Score=102.
agctgcagaatctccgggacgttccacgcgtacggacggagccgggctcaccaggtcgctgccgcgagggagtcgctgtgctggggcctgggtggcggctggaggcctgagttgggctcgcggcggcggtcggcaggaggccggatggcggaatgatggatgaggaggaactggagctcgtggaggagctggaagccgtgctgcagctcacgcccgaggtgcagctggccatcgagcaagtgtttccaagccaggaccctctagatcgagcagatttcaatgctgttgagtatatcaataccctgttcccaaccgagcaatctctggcgaacatagacgaagtcgcgaacaaaattaggctgaaaataaggagactggatgacaatattcgaactgttgtaagaggtcagactaacgtggggcaggatggacggcaagtaagtaactcattcctccatattacctatgctcccctggtttctcccggcaaccagatgaccaaaacgtcgatgtgccctcttgcagagcactttccgattgatccgtttcatacatggcaggacaagacagggcaggcgcccacagtagccacgtgctgtccctcagtgtcccttggaccaggaccgttaactgtggcaccggtcacccgaggccagatgagaacactggggcttacttgactttctccttcgtgtcgggcatc

SEQ ID NO: 11045 - DNA, 453 bp, Homo sapiens
  SIMILAR (93)..(374): 351254mologous to Homo sapiens Human gene 72-encoded protein fragment, SEQ ID NO:435,accession number Y86520,Smith-Waterman Score=87.
tcatcccttccaccatgagcaagaaacaaatttttcagcaatctctgctatttccacgtctgaatagtcagtagcgacatcacaaaatcctgtcaactccaaggttgcaaagacgagacgagtcctccccagagaggggaggcggttaaggagaggagattgcgtggctcggagcagccagacccggtaagccgactccttcccgtattccgctttaaccaagcttgtttccctggcggccccacaaattccctgagcggagcgtcttcgctggctcgcagccagccagtcagagcccacctctgcgacctcctcctccttcccatcctgagggctcctgcctcggctcccggcttcctcctccgggctatcttttaccccttcggtagatctcttcagacgaaatgcaattttctctattctttccctgttactattgttacgaccaagcat

SEQ ID NO: 11046 - DNA, 476 bp, Homo sapiens
  SIMILAR (146)..(21): 301254mologous to Drosophila melanogaster CG17588 gene product,accession number AE003788,Smith-Waterman Score=65.
taacagctccaccaccatcaccagagccaaaactcaggatgcatgtgcttcatctgctgcttatttccagctgagagccagtggtgccatggttccttagggagccggtcccctgatgccggctcctggccccaaatctctctgatccgggctcttccagaatgtcttgtctccaccatcgcctttgaccaatggtgtccctttgcctggtaatgtcccctttgcctgatgatggccctgtcactcctctctttagcacagaggaggctgtttcatcccttcaagcctgccctcccttcaagtcttagctcaagttcaccttctccgcagagccttctccaatcttcttgactacgtctcctctcagctccagcaacctctgtctctggcactgattccttacttagctaagagaatcacagacacttggggctcaggacaatctgctttctctcgaattccagcacactggaata

SEQ ID NO: 11047 - DNA, 547 bp, Homo sapiens
  SIMILAR (3)..(137): 441254mologous to Homo sapiens DAN15,accession number Y08266,Smith-Waterman Score=102.
tcagctcattcccagcacctgccagagaaggggcgcttgctccatgcaggtgccttgcaggcatctctgtgacccttcagggcaatccttgaggtaggtgtcatcatcatcatcatcatcatcatcatcatcatcataggtgttatgattcccaggagtctgggaagttaccccgacccgggcccaaagctgagcttgaagggccccctgcttggcttctcgttggacctggagctcacccatgaagccaggactcacgatgtggcgatgccacttgcgcatctgtgtctgagaggcttctgggtcttccaagagccaggcaaagggacaccattggtcaaaggcgatggtggagacaagacattctggaagagcccggatcagagagatttggggccaggagccggcatcaggggaccggctccctaaggaaccatggcaccactggctctcagccaggaaggaacttggcttgccagagggtggatattgcaggaactggatacccattatctgctcccctgggagcctgaacttcagggatcca

SEQ ID NO: 11048 - DNA, 729 bp, Homo sapiens
  SIMILAR (4)..(246): 801254mologous to Homo sapiens putative p150,accession number U93563,Smith-Waterman Score=324.
atgggcaaagacttcatgactaaaacaccaaaagcaatggtaacaaatgccaaaattgacaaacgggatctaattaaactaaagagcttctgtgcagcaaaagaaactgtcatcagagtgaacaggcaacctagagaatgtgagaaaatttttgcaatctctccatctgacaaaggactaatacccagaatctacaaggaagttaaacaaatttacaagaaaaaaacaaacaaccccatcaaaagcacctcctcggcctcggcgtctgctctagccatgtttgaggagtccttcagcccaccgctgcgctgtggtagcccctctctgggctggtcaaggctggagccagctccctctgcttgtggggagggcagggcttgggacctggcagcccgccatgcccgagcccccctgcggtgggttcccgcacggcccaagcctcccccacagaaagggtacacttgccagaagttttgccatgacagtacactgaacaaaggagacgacagggtcatttataacctgacgcgtccaccctactgctgtgtccggtttccattggctggaaggagacctcacattctgtgtttgtcccaactggctagcaacttagaactttttaaaagaggcaaaaggagaggagaacaaaggaaggaggaagtaacttgtggaatgctgagaagggtaaaaacacttttaagtaaggaagaggaacaggctatgacctaa

SEQ ID NO: 11049 - DNA, 394 bp, Homo sapiens
  SIMILAR (393)..(52): 461254mologous to Mus musculus MUS MUSCULUS GENOMIC DNA CONTAINING N ALLELE OF FV1 GENE,accession number A67510,Smith- Waterman Score=233.
cctcagctgtggccgatccctccatcaagggtccgtgacttcctgcaaaacaatcaatgccctcactttaacagtagatacttggcgaggctgtgcatggtgaggctgtgcatgcacctttcattgcaggtcagccactaacatgataagagcttatgtctatttttccacaatttcagttctttctctacaggagattagactctcactcagggcaatcttggcagatttgaggctcagtatctgcttctgaagctgggagatagaatccccgagttcatcattttctttcatcactttatccactgaacttaggagcaaccaaccagcttcattatgttccttagttctccacatatggtcaaaggtatgatgtatagggtcactaaactcc

SEQ ID NO: 11050 - DNA, 1044 bp, Homo sapiens
  SIMILAR (169)..(690): 931254mologous to Homo sapiens putative p150,accession number U93563,Smith-Waterman Score=820.
atggcagtgcctggagaggctctgcttttccatgatcctttgaggcagacaggggctatcttggaggaagcagaaaatgcggagtcggagacagaaggggatgacaatgaagcgcggtggaatttggctgtgaatccatctggtcctggactctttttggttggtaaggacacattcaaagcagtgtgtagagggaaatttatagcactaaatgcccacaagagaaagcaggaaagatccaaaattgacaccctaacatcacaattaaaagaacaagaaaagcaagagcaaacacattcaaaagctagcagaaggcaagaaataactaaaatcggagcagaactaaaggaaatagagacacaaaaaacccttcaaaaaattaatgaatccaggagctggtgttttggaaagatcaacaaaattgatagaccgctagcaagactaataaagaagaaaagagagaagaatcaaatagacgcaataaaaaatgataaaggggatatcaccaccgatcccacagaaatacaaactaccatcagagaatactacaaacacctctacgcaaataaactagaaaatctagaagaaatggataaattcctggacacacacaccctcccaagactaaaccaggaagaagttgaatctctgaatagaccaataacaggctctgaaattgtggcaattgtttggttttttaaaaaatatatagtggttggccggaaaaagtacactcgccggcagttttgccacgagagtacactgaacaaaggagacaaagtcatttataacctgacgcatccaccctactgctgtgtccggttttcactggctggaatgggacctcacattctgtatttgtcccaattggctagaaacttagaacttttaaaaagaggcaaaggtagaggagaaaaaaggaaggaggaagtaacttgtggaatgctgagaaagccctgggaccctctggtggctgcaagtcctgattgctgtgccagtcgcagcaggaacaggcccccaaaatgtcacatctccaggaaataa

SEQ ID NO: 11051 - DNA, 642 bp, Homo sapiens; identical to SEQ ID NO: 974
  SIMILAR (1726)..(2229): 941254mologous to Homo sapiens SRcyp protein,accession number X99717,Smith-Waterman Score=818.

SEQ ID NO: 11052 - DNA, 430 bp, Homo sapiens; identical to SEQ ID NO: 3319
  SIMILAR (361)..(194): 361254mologous to Epicrates cenchria cytochrome b,accession number U69777,Smith-Waterman Score=67.

SEQ ID NO: 11053 - DNA, 559 bp, Homo sapiens
  SIMILAR (459)..(313): 341254mologous to Mesocricetus auratus transferrin,accession number M26642,Smith-Waterman Score=66.
ttagatagaccaaattgctataattgcaacccgatttggtccacatccaaactctgggctgctgctgtctctactactgctgctgttcttaaggccagagattcctgaacacccttctttctcagcaagtaacttgtggaaacaagttacttcctccttcctttgttctcctctgcctttgtctcttttgaaaagttctaagttgctagccaatcgggacaaatacagaatgtgtggtcctgttccagccaatggaaaccggacacagcagtagagtaaacatgtcaggttataaatgaccctgtctcctttgttcggtgtactctcgtggcaaaactgctggcgagtgtaccctttgcacattaaagtttgagaaggactggttctcatactttggagtacatcataatctatagtgcttgttaaaacacaaattgttgggccccattcccggagtttctgattcagttggtgtggggtgggactgtgaatttgcatttctaacaagttccctggtgatgctgatgctacagttcccagggccacacgttgagaacct

SEQ ID NO: 11054 - DNA, 768 bp, Homo sapiens; identical to SEQ ID NO: 3320
  SIMILAR (2)..(184): 601254mologous to Homo sapiens reverse transcriptase,accession number L27428,Smith-Waterman Score=221.

SEQ ID NO: 11055 - DNA, 1560 bp, Homo sapiens
  SIMILAR (12)..(3362): 1001254mologous to Homo sapiens desmoglein 2,accession number Z26317,Smith-Waterman Score=5726.
atgatcgacgttgcactggcaatttccctgcacgcgccgaacgacgaaattcgtgacgaaattgtgccgatcaacaaaaagtacaatatcgaaacgttccttgctgcggtgcgccgttatctggagaaatccaacgccaatcagggccgagtcactattgaataccacacctatgaccgggagaaaaagctggtggaaaaatatgatgtcagcaccaccggaacggggggcggcggtggcctaatatccattacaggatggctttggctggaccaatggcgtgacgctgaaaatgctggatttgatctgcccgaaagatcaaccttcgaaattcatgttcaggtttttcggcggaattggatttttgaaccacttatcaaaccatttttccgcttcaccggagttagacctttatatgtctttccacaatacgaacatcgcgttcgggttttcggcaaactccgggcgcagcgccagcacgtttccgtcggcatcaatcggtgcgggcgtcgagccggtactgtcaacgccaatcccgaccacagctgcgcgctgttcgacgctaagctctgcaagcacgtcacgcggatgatgacggaactggttattcggggcatcacaaaattgccctttctgccaacggggataccactctacgctggtggcgatctcttcaccggtagcgcagtccaccgccaaagctcgcacagaatcactgccaaaatcgaggccaattgcaatcgccatcgtttcactccatccaaaaaaacggcagtcaacattcaacacattcttgaggagcagctaagcgccagtcttgggcacagattaaagaacaagaaagaaaatgccgctgtgcttacggtggtcgaccaaaacgtttccctgcgccgcgggctcttactatcccggaatgagtgcgttcaagtaaaaggtctcgttcaaattcagcgactgctgaaattacatgcatccgacatcatgccgcacaccgaatgtgtggcgggtgaagaacaaaagcaattcacggtgcgcgacatctcggaactggttcgtcaggggcaagatctgatggtgcaggtggtgaaagatccgcttggcactaaagctgaaacggagcgactggacgcgctggtcaatgcggcgggaattttacgcatgggcgcgaccgatcagctcagtaaagaggactggcagcagacttttgcggttaacgtcggcggtgcgtttaacctgttccagcaaaccatgaaccagtttcgccgtcagcggggcgaggcgattgtcacttattaccattggcaggtgaagcatgctcccctgcaccagtccaagagaggtaaaaactgtggggttggagaaggtcaaaatggaccagttattctccagcagaaaccaggagcactgcctacacaacgccacctattcctgagggcacaaatggcagatgtcatctctgggctgcccactttggctgacatggctctggcccagctggtgctgctccttggccacggagctgtctccacttcctccacaggccaggactacacgctctaa

SEQ ID NO: 11056 - DNA, 807 bp, Homo sapiens
  SIMILAR (1)..(588): 991254mologous to Escherichia coli Transposon TN2501 resolvase,accession number D90775,Smith-Waterman Score=974.
atgtctcgaatttttgcttactgtcggatatcaacgctggatcagaccaccgaaaatcaacgccgggaaatcgaaagtgcaggttttaaaatcaaacctcagcaaataatcgaagaacacattagcggctcagcagcaaccagtgagcgtcctggttttaaccggttgcttgctcgcctgaaatgtggtgatcaattgattgtgacaaaactggatcgccttggttgtaatgcaatggatatcaggaaaacagtggaacaactgaccgaaacaggtatcagagtgcattgcttagcattgggtggcattgacctgaccagtccaacaggaaaaatgatgatgcaagtaatttcagcagtcgctgaatttgaacgagaccttttacttgaacgcactcattccgggatagtaagagcccgcggcgcagggaaacgttttggtcgaccacctgtgttaaatgaagaacagaaacaggcggtattcgaacgaattaagtcaggtgtaagtataagtgccattgcccgggaattcaaaacctcgcggcaaaccattttaagagccaaagcaaaacttcagacacctgacatataaaaaataatctcggtgtgagatgctttacgtcttccaagcccccttccttgccgtaaatggaaagatacatctaattatagaagttatatgttttaccctacggcagtgctggccattcaatatcctgtgcagttgaggtatcaacacggttcagcaatacccgatactttttccatgcttccagaaacgagatttcttcctccgttgcaatttcca

SEQ ID NO: 11057 - DNA, 936 bp, Homo sapiens
  SIMILAR (1275)..(2429): 971254mologous to Homo sapiens desmoglein 2,accession number Z26317,Smith-Waterman Score=1895.
atgatgatgcaagtaatttcagcagtcgctgaatttgaacgagaccttttacttgaacgcactcattccgggatagtaagagcccgcggcgcagggaaacgttttggtcgacctcctgtgttaaatgaagaacagaaacaggtggctcccgaacgaattaagtcaggtcttgcacgttactcaatcacaattcagcaaaaccggaatgtcggcaaaacacacggcttttgctatgcgcatgtcgcctgcacaaatgacggatatcgttgttgggttgtccactggtcagtcgccattcatggtgttaatgcagcagggcggccattcagctatgcaggagacaagaatcgccagcttacccgtcacagcgatacccgctggcatgaagattccgtgcgtaaccgctggttcagcgtgcatggtggggccgtctgtgcgcgtgaatgaatggttcagcgcgtatggcatggcgggtatggcttacagccgcgtgtcgacctttgtccggggattatctccgcggtacctgacaacaagggaagccccaggctgcgggtcatcagcaggacactgagccgagcttgggacgaggtggtgggctttctgctgatcatcataatcctgctgacaggctatgccattgcctttaacctgctgtttggatgcagcatctctgactaccggacatttttcagctcagcagtgactgttgttggtctcctgatgggaatttctcaccaagaggaggtaaaaataataatttgtttcctcacagaattcaatatattgaacaaggaaaattgggggggtccttatgaaaacagccccctactgtacactgcacactggaaaagggggaaaatttcagtcctttgctctactgctttatggtactgcctatgcatacagcatttacatggctgttgctttcaaaaa

SEQ ID NO: 11058 - DNA, 750 bp, Homo sapiens
  SIMILAR (426)..(4): 971254mologous to Escherichia coli yehT,accession number U00007,Smith-Waterman Score=687.
ttacaggccaatcgcctcttttaagcttttcagataacggcggctgaccggcacggttaagccattacgcaaaatcaactcggcctggccgttatcttccagacgaatctcctgtaaatgcgcgaggttaaccagatactgacgatggcagcgcagtagtggtgtacgactttccagggtacgtaatgtcaattcggtaaagccctctttcccttcgtggctggtaacgtagacaccgctcatccgactgctgacaaatgccacatctttcatttgcagcaaataaatccgactatgccccgtacaagggataaatttcagcgcctgttgattttccggtaacagcgaaacatcctgcttgtgcgctcgcaatcgcgccagcgttttctccagtcgcgcttcatcaattggcttcagcagataatcagactctagagatcccgggtaccgagcactattcaccagccaagtgttgatccacgggatcgggttggagcgcgtctggaacggcagatccaaaccgactgcctgcatacggatattggtgatgtattcaacgtactggcagagaatgtctttattcagaccaatcatcgaaccgtcgcggaacagataatccgcccagtctttctcctgttgagcactgtactgctggtcctttgcggaacagtgcccgtcgcgcgaggtgttgaaacacgtcaccagccgttggggggtgttgattctggtggcgctaccgaaggtactcat

SEQ ID NO: 11059 - DNA, 1195 bp, Homo sapiens
  SIMILAR (1)..(780): 1001254mologous to Escherichia coli xylose isomerase,accession number K01996,Smith-Waterman Score=1361.
atggaagcaacccataaattgggcggtgaaaactatgtcctgtggggcggtcgtgaaggttacgaaacgctgttaaataccgacttgcgtcaggagcgtgaacaactgggccgctttatgcagatggtggttgagcataaacataaaatcggtttccagggcacgttgcttatcgaaccgaaaccgcaagaaccgaccaaacatcaatatgattacgatgccgcgacggtctatggcttcctgaaacagtttggtctggaaaaagagattaaactgaacattgaagctaaccacgcgacgctggcaggtcactctttccatcatgaaatagccaccgccattgcgcttggcctgttcggttctgtcgacgccaaccgtggcgatgcgcaactgggctgggacaccgaccagttcccgaacagtgtggaagagaatgcgctggtgatgtatgaaattctcaaagcaggcggtttcaccaccggtggtctgaacttcgatgccaaagtacgtcgtcaaagtactgataaatatgatctgttttacggtcatatcggcgcgatggatacgatggcactggcgctgaaaattgcagcgcgcatgattgaagatggcgagctggataaacgcatcgcgcagcgttattccggctggaatagcgaattgggccagcaaatcctgaaaggccaaatgtcactggcagatttagccaaatatgctcaggaacatcatttgtctccggtgcatcagagtggtcgccaggaacaactggaaaatctggtgatgccttcagtggtcagcattaacgtagaaggtagcacaaccgttaatacgccgcgtatgccgcgtaatttccagcagttcttcggtgatgattctccgttctgccaggaaggttctccgttccagagctctccgttctgccagggtggccagggcggtaatggtggcggccagcaacagaaattcatggcgctgggttccggcgtcatcattgatgccgataaaggctatgtcgtcaccaacaaccacgttgttgataacgcgacggtcattaaagttcaactgagcgatggccgtaagttcgacgcgaagatggttggcaaagatccgcgctctgatatcgcgctgatccaaatccagaacccgaaaaacctgaccgcaattaagatggcggattctgatgcactgcgcgtgg

SEQ ID NO: 11060 - DNA, 1030 bp, Homo sapiens
  SIMILAR (725)..(1183): 711254mologous to Mus musculus OASIS protein,accession number AB017614,Smith-Waterman Score=526.
ctccgcctggtcattgtgcgagtgggacagtgcaccaccgaaaattgcccgctggcagcgtaaacgtattcagcatcaggattttgagcggcggctacgtgagatggttgccgaacgcagagcccgtctggcgcgggtgaccgatctcgtggaacagcaaacgctgcatcgtgaagtggaagcctatgaagcgcgcctggcacgctgccgccatgcgctggaaaaaatcgaaaacagcaatggagagaatatgtcactggaaaatgcccctgacgatgtcaaactggctgtcgatttgattgtgctgctggaggaaaatcagatccctgccagtaccgtgctgcgcgcgctggatattgtaaagcgtgattatgacaagaaattaacgcgcgatgatgaggcggaaaaccttatcggcgcgatggatacgatggcactggcgctgaaaattgcagcgcgcatgattgaagatggcgagctggataaacgcatcgcgcagcgttattccggctggaatagcgaattgggccagcaaatcctgaaaggccaaatgtcactggcagatttagccaaatatgctcaggaacatcatttgtctccggtgcatcagagtggtcgccaggaacaactggaaaatctggacgttaaagcattgggtattgccggccaaatgcacggagcaaccttgctggatgctcaccaacgggtgttacgcccttataacgaacggaaatggaacccgagacgagaacgagacaggtcaaacgaacgggaacgacatggcaaacggtacggcgaccgcaaaggacaaggaaacgcgcgcatgattgaagatggcgagctggataaacgcatcgagcagccagaggggcggagggatagcgaagaggggcagcaaagccagaaaggccaaaagacaaaggcagaaatagccaaaaatgcgcaggaacaagataggactccggtgcatcagaaaggacggcaggaacagccggagaatccggaaaaccaagatcggggggacaaataa

SEQ ID NO: 11061 - DNA, 1011 bp, Homo sapiens
  SIMILAR (817)..(614): 441254mologous to Arabidopsis thaliana putative protein,accession number AL049482,Smith-Waterman Score=150.
aatatgatggagcaagtgctcgatatcccttccctgtaagttatctcgaaagataacgccaacgttaccatcgacgccgtgtgctttattcaggtgattgacgcgccgcgcgcggcttatgaagtcagcaatctggagctggcgatcatcaacctgaccatgactaacatccgtaccgtgctgggttcaatggaacttgacgaaatgctctctcagcgcgacagcatcaactcacgcctgctgcgtattgtcgatgaagccaccaaccctctggcgctgaaaattgcagcgcgcatgattgaagatggcgagctggataaacgcatcgcgcagcgttattccggctggaatagcgaattgggccagcaaatcctgaaaggccaaatgtcactggcagatttagccaaatatgctcaggaacatcatttgtctccggtgcatcatcaggttgccgagtggatgcgggcgcgaaacggtcagcttttccgtttgcgcagcaaccacctcaccctgctcgttgagcaaaataacttttacgcccgaggtgccaagatctatcccgatatacatatcgatcgttccttaaaaaaatgcccgtcggatttatttgctgcaaatgcaagatgtggcatttgtcagcagtcggatgagcgctgtctacgttaccagccacgaagggaaagagggctttaccgaattgacattacgtaccctggaaagtcgtacaccactactgcgctgccatcgagattcgtctggtttgtaacaggcaaggcccagagcacccaggcgagcgccctatcctatattgattcgctcctctatcatcaccttgatctatatgggcaaagactaggccatcttgatgatggcactgattcttggaatcatgtgcctactctcaacggacaatgtactttggtcttgatacatgagtatgtggatactagaggtccggagatcaagaccatcctggtgatctcctggtggaacatcctggtgtttcactaa

SEQ ID NO: 11062 - DNA, 553 bp, Homo sapiens
  SIMILAR (3)..(329): 981254mologous to Escherichia coli exonuclease III,accession number M22592,Smith-Waterman Score=590.
tggatatcggcattggcgaagaaaaccgtaagcgctggctgcgtaccggtaaatgctctttcctgccgaaagagcgcgaatggatggacaggctgatgagctgggggttggtcgataccttccgccatgcgaatccgcaaacagcagatcgtttctcatggtttgattaccgctcaaaaggttttgacgataaccgtggtttgcgcatcgacctgctgctcgccagccaaccgctggcagaatgttgcgtataaaccggcatcgactatgaaatccgcagcatggaaaaaccgtccgatcacgcccccgtctgggcgacctttcgccgataatttagcagctctcctggctcaaactgggtcaggagaattaaccttgagaaaaatcaacaaactgtcagtaatgatttggtgcctgccgtcctttgttataccgcctctgcgtttttagttgtctgaccacttctctattatcaagtttgatataggaaactccacgatgaacgctgagcgtaaatttctttttgcctgtcttatttttgcgctggtcattt

SEQ ID NO: 11063 - DNA, 195 bp, Homo sapiens
  SIMILAR (41)..(133): 871254mologous to Plasmid F Protein D,accession number M12987,Smith-Waterman Score=128.
ctactgcaagcttgcatgcctgcaggtcgactctagaggatcccaggtttttgcgctggatgtggctgcccggcaccggtagcagtttgcgatgccggagtctgatgcggttgcgatgctgaaacatttatcctgagaataaatgccttggtctatatatggaagtggggaactgagtggatatgctgtttttgt

SEQ ID NO: 11064 - DNA, 720 bp, Homo sapiens
  SIMILAR (178)..(315): 781254mologous to Mus musculus Ky protein,accession number AJ293727,Smith-Waterman Score=170.
atggcgtgtttggcagagtcagcgaaaagcagcgccctgcggctccagcggcgggggagcgccctcttccgcgccctcgccctctcccgtgtggggcagctgcgcgcacggggccatttgcagcgcaagcagcctagcgtgcggccgcggcgcccaggtcggaaaggaggcggcatcatggagctgaagaaggacatcaacgctgtatctatcgacatgctgctgatcgtgcactcggagaagcggcgcgccgcacagggtacgctctcagaccagcaggcgaacccgagctcgctgctgcagcgcggaggaggtaacgcgcgcccgacccgggtccccgggtcccccggcaccttggcctccttgccacaagggcctgcccgccggggggcgcccattgctcccccgaacgaggggccatcagctggtagacatgccagctttagctctactgaagtagacgccaaagctaacaaaactctgctatgggttattgagaattttaataagaatcagacccccagagacctgttagccacagaaatggccatgcagggcatggaagaaaacttggtggagaagcagcaccctcagcagccccaggtcatcacttcctacaacagccaaggccacagcgtgccctacagtttgcagctcctctcatcccaggaccgatccatccagcttggtgactccgggtttgaccctgctgctttctaa

SEQ ID NO: 11065 - DNA, 2511 bp, Homo sapiens
  SIMILAR (1)..(1707): 1001254mologous to Homo sapiens dA22D12.1 (novel protein similar to Drosophila Kelch (Ring Canal protein, KEL) and a heterogenous set of other types of proteins),accession number AL035424,Smith-Waterman Score=3015.
cttacaattcttcatctctggggatcaaatcagtcttaacatggcattttttttctcttctaaaggaggcagggcctggagggatggtgggccatagggctggaggggcttacagggaaagccctggcctggcttttcacggttcctggtgttcgtggacttcagtggtcaccaagattctttcttacacgtctccggaccctgctctgcaaggtccttggagtgctgttcagtgtggctggaggtaagaagggtccaacttgtatccttcaaatactcaaagggcagagacgacaagaagcatgatgtatttcaggatgggctgagagggtgtgggcctctgggcaggcctagtgggaggtctggttacactgggccaaatccagaaattggtttcttttttggaaacaacatgttcatgcgctgcgggtcagactcgacactaccttgttcagtctagaggagggttcgtccttctggaaccaagggctcacgtggaaagtggtgaggaggaccttcagtgaaagcattaaccacaccccccgaattacactgggtgtcccttactcggtacattccttccagctccctggattgctgaactttggcgagtttaaggtatgttttgtcctttccccaaggatttttaatttgacccatgaaaatttcctctcaagtgaaggaccagagattgggggcctcctgggagccacattcaactgtctgaacaagaggcttgcaaagtaccgtatgcgaaacgtgcacccgaaacctaagctcgtcaggtatctgcacagtcgcctcccccccgagcctgctgcggctccctgagcttggtgtgggccgcgccatctctcatgccgacagatgtcctcttcgagtcaaatcggtaatgactcattccagctccaggtaaccccagtgcacctgctacctttatcccataccacgaggaagaatccagaaatgtatgaccttcctctgctcttcttcaacccgcaggagtctgccatcctccagctcttccaccaggatggtgagtgtctgcactgcagcccaatcgtgggtgattggtgtcatctcggacacagccaggcttgcccttcattttctgttccaagtggcctttttgtgccttctctgctgtgtggagctgcttttggacgtttagttgccaatgtcctaaaaaggtactctgtgtgtgtgcgtgtgtgtgcgcatgtgcatgtgtgtgcacgtgtgcgtgtgtatgcatgtgtgtgggtccgcatgaccatcagcctcacggtcatcctgatcgagtccaccaatgagatcacctacgggctccccatcatggtcacactgatggtgagcacactccctccaggcccctgtcaggctcagggccacgtccgccccacaggacctatttttaggtctcttctggaatgggagacagaggtggaaatggacaagtaaggccatgattttgctcatgtcctagtttcagaatgtataagctctgaggcctaaggaatgttgttattctgtggagggccagacaggagtttattttcaactttccgggctgtatggtctctgtcacgactactcgactctgtcattgcagcaggaaagcagtaagcgtgacggacttgatcagtgggctacagtttgctgtgccctgatctaaagggggacccaagtgctgtgagcatcctgcgcaccacggtccaccatgccttcccggtggtcacagagaaccgcggtaacgagaaggagttcatgaagggcaaccagctcatcagcaacaacatcaagttcaaggtaaagaaaacggcatgagaggaaaggcaggtgagagacaagcggtcccgtctcacacggcttagtgctttggagctacggaacatgtgtgatgagcacatcgcctctgaggagccagccgagaaggaggacctcctgcagcagatgctggaaaggaggtgagagcctggcggggcccccactgcccgcagggctacacagcggtggggtgagcctttggctcagatgttccctctgaccttccacggcctgatccttcggtcgcagcttgtcaccctgcttgtccgaggagtttgttactctgaaagccagtcggtaagtctctccgaggcagaaatcagccaggccagacctgacgaagctcgaggggttgggcgctgccggcggctggacctgacgctgctcaacccgcgcatgatcgtggtgagaagggctgccccggcctgtcccatgcggagctgcctcttcatgccgttggcgtctcaggcagtcagtctgttcagaacgatgggcctgcgccacctgcccgtggtgaacgctgtgggagaggtgagcgaggccccggccctgcccccacctttgagagaggatcccctagccaggtgctgtttgtgcacccagaccatctgacagcccagcccaccctctcctggtgctgcctggggaggcaaatcatgctcactccggcgggcacagctggct

SEQ ID NO: 11066 - DNA, 1425 bp, Homo sapiens
  SIMILAR (459)..(31): 931254mologous to Cloning vector pSacBII SacB,accession number U09128,Smith-Waterman Score=715.
tcagaattccaggtaagacccatgttccccttcttgattttgagatgtctcgtagaccaaccatttgccgttcattttgaaaacattcgcgcgctcgatttcatcagttaccgtgtttgaagtgatcagcggcttcattacttttttcaatgtgtaatcattatttaactctatgataccgagggcgccgttcgctaactcagcatcgcgttttttagcgctctgctgaagcttctggctttctttacggaagaagttcgtgccgccgccgtagtacgctttgttaaataaagattcttcgccttggtatccgttttctgttcccgtgttggcttcgaatacaaggtatttatggcctttgtcttcaacgtagtgagggtctctcagcgtatggttgtcgccggatgtataattgccttcatcgataaactgctgaacgttctgatatgtttttccgtctgcgctgttgtcaggctttgtttgccgtaagtttaccggaatagcaagtgtagaataaacggatttttccgtcagatgtaaggttgcgaccttggtgcataaccgcaggtctagttgcccgctttccagtcgggaaacctgtcgtgccagctgcattaatgaatcggccaacgcgcggggagaggcggtttgcgtattgggcgccagggtggtttttcttttcaccagtgagacgggcaacagctgattgcccttcaccgcctggccctgagagagttgcagcaagcggtccacgctggtttgccccagcaggcgaaaatcctgtttgatggtggttccgaaatccgcaaaatcccctgtgatgctccgggggccagctgggaatgccgctgctgcctctttcaggaggccagcccccagcgctgcctccacgggccagtagggcagggacgctgatgagtgcccgttcttgcttctcaagctcagtgagacgggcaacagctgattgcccttcaccgcctggccctgagagagttgcagcaagcggtccacgctggtttgccccagcaggcgaaaatcctgtttgatggtggttccgaaatcggcaaaatccgagatgacggccgacggagggcacacacgagatgacgggggagggagcgtacactcgagttgacagccgacggagcgcacacacgagatgacggccgacggagcgtacactcgagttgacggccgacggagcgcacactcgagttgatggccgacggagcgtacactcgagttcatgaccgacggagcgtacacatgaggtgacggccgacggagcgtacactcgagttgatggccgacggagcgtacactcaagatgatgaccgacggagcgtacactcgagttgatgaccgatggagtgtacactctggaaaacagcagttggtgttttcagtgttctggattttggccat

SEQ ID NO: 11067 - DNA, 1019 bp, Homo sapiens
  SIMILAR (24)..(890): 891254mologous to Rattus norvegicus rsec5,accession number AF032666,Smith-Waterman Score=1316.
gttgaagtgcgagctctcccgaccaggggctcgctcccgccatccagactgtaagacttactcatgaatcgttgacggcccttgaaattcctaatgccctgttacagactatccaggatctcatcttggatctccgagtacgttgcgtaatggccacgttgcagcacacggcggaagaaataaagagattagctgaaaaagaagactggattgttgacaatgaaggactgacttctctaccatgtcagtttgaacagtgcatcgtgtgttctctgcagtcactgaagggggttctggagtgcaagccgggagaggccagtgtcttccaacaacctaaaacacaggaggaggtttgccagctaagcatcaatataacgcaggtttttatatactgtctggaacagttgagcaccaagcctgatgcagatatagatactacacatctctctggtgatgtttcttcccctgacttgtttggaagtatccatgaagacttcagcttgacctcagaacagcgccttttgatagtcctaagtaattgctgctatctagaacgtcacaccttcctaaatatcgcagaacattttgaaaagcacaacttccagggaatagaataaatcacacaggttagcatggcctcattgaaagaactagatcaaagactctttgaaaattacatcgagttgaaagcagatcccatcgttggctccttagaaccttgaatttatgcaggatattttgattgcaaggactgcctgcctccaacaggtgtcagaaactatttaaaagaagcactggtgaatataattgccgtgcatgcagaggtgttcaccatttccaaagaactggtccctcgggtactatccaaggggatagaagcagtttctgagagagctcagtcgactgatgcagtgtgtttcatccttcagcaaaaatggagctttacaggcgagacttgaaatctgtgctttgagggacactgtggctgtttacctgacacccgaaagcaagtcaagttt

SEQ ID NO: 11068 - DNA, 2412 bp, Homo sapiens
  SIMILAR (118)..(663): 651254mologous to Homo sapiens dJ20B11.1 (ortholog of rat RSEC5 (mammalian exocyst complex subunit)),accession number AL031770,Smith-Waterman Score=524.
ccttgtgtaatagctgtatttcaagtggcatctttcaggatgtgggtttaaatggatgaagaagaaagagtatatagagcatgctatatactctgtatatctctcctttcttccccaggtaacccaggcctgcacagtcccatgttggatcttgataatgatacacgtccctcagtgttgggccatctcagtcttttcttgattcagaagtacaatcatagtattttattcttttcccccttagcgtggagatacaaaactccccacagggtggcctttgttgaaaaattgacaaaactcgtcttgagccagctgccttatttttaaattatttctaatatgttttattttgtttttttaatttttaagactgctgagaagtcaaacccgattaatcacatttgaacacggttatgcttgttcctggttttctagaaaatgattcaggaagtaatgcactccctggtgaagcttacccgcggagccctgcttcccctcagcatccgggatggggaagccaagcagtacggaggctgggaggttgctttgcgatcccactctgctcacttctgtttggatgtgtttgttcgcagacttactcatgaatcgttgactgcccttgaaattcctaatgacctgttacagactatccaggatctcatcttcaggccaggcagccaactgtgacctgtttctagaatcttcatcttttcagctgggacttttaggtttaaaaatcatcttcatgatttcacgggttttcacacttgtctcacgggtgcccctcgcggtcctgtgggtggctgtgccagtgacgatggccaggcagcggccgacacatcccagtggctttcttgaatttgagtgctttatttgtaactgttcctacttgcttctatgttcagtctctctgttgatgttttctctctggcaccataaaggtgattttctaaacatttgttttgcttttaggaacagcgccttttgatagtcctaagtaattgctgctatctagaacgtcacaccttcctaaatatctcccatggttcaccttgaatggttaatttaatacccttttcttttctctagagcacctgcgtattcacacctctccttcctctctccctttctgtatgacctcaaggatgcttttgctttgctgctttgtgcatgcacgcgtgcacacacagccgctggctcagaacagctgcaggatgctctgcatcctacctgaaaaatatgtcctccccactctccaatttgaagtacaatagctggtcgtggcacaagctgattaggaactctgagtagttttccagagtgtacactccatcggtcatcaactcgagtgtacgctccgtcggtcatcatcttgagtgtacgctccgtcggccatcaactcgagtgtacgctccgtcggccgtcacctcatgtgtacgctccgtcggtcatgaactcgagtgtacgctccgtcggccatcaactcgagtgtgcgctccgtcggccgtcaactcgagtgtacgctccgtcggccgtcatctcgtgtgtgcgctccgtcggctgtcaactcgagtgtacgctccgtcggccgtcatctcgtgtgtgccctccgtcggccgtcatctcgtgtgtgcgtttccatcaccctcaaataggcaactcatactcttcattatgtgtttataggttagcatggcctcattgaaagaactagatcaaagactctttgaaaattacatcgagttgaaagcagatcccatcgttggctccttagaaccctggcactctgcccactgccccaatgctccacctcacagcccctctccagctggactcaacctctgcctttttgaaaagctcatccttctaaaatataaattggatcctgtcaatcccctgctgaaaaaccttcgaggaggctcaacttttctttgccagccctctctcagacctgctgcctccgttaacaaacagcgaggctaccatcatgaacatcatattcctagtgctgtttgttgggacacttttcagaatctgtttttgtctccgagtgtggacagtgactgtcggcactcagtgcgtggtggttttcatctccgagtgtggacggtgagtgtcggcgctcggtgggtggtggttttcgtctccgagtgtggacggtgcgtgtcggtgctcagtgggtggtggttttcatctccgagtgtggacggtgagtattggcagtcagtgggtggttgttttcatctccgagtgtggacagtgagtgtaggcactcggtgggtggttgttttcatgtccgagtgtggacggcgagtgtcggcgctcggtgggtggtggttttcctctccgagtgtggacggcgagtgtcggcgctcggtgggcggttgttttcatctccgagtgtggacggtg

SEQ ID NO: 11069 - DNA, 426 bp, Homo sapiens; identical to SEQ ID NO: 10884
  SIMILAR (176)..(421): 961254mologous to Homo sapiens dJ34B21.4.2 (nuclear transcription factor Y, alpha (CCAAT-Binding transcription factor subunit B, CBF-B, CAAT-Box DNA binding protein subunit A) (PUTATIVE isoform 2)),accession number AL031778,Smith-Waterman Score=390.

SEQ ID NO: 11070 - DNA, 1023 bp, Homo sapiens
  SIMILAR (77)..(901): 571254mologous to Rattus norvegicus CCAAT binding transcription factor-B subunit (CBF-B),accession number M34238,Smith-Waterman Score=581.
gcagcaggtatggaagcaaaactgctttaaacattacagcaatgaaactgataacagcaccactcaattggttggagtccagaccctccaggtagtggtaccctctctgattctctgtgagcactgcatgaacttctcctctcctcatgtctggtgctgcatggtccaggctgtccctggtggacaaggtcaaaccatcatgcaagtacctgtttctggaacacagggtttgcagcaagtgagtaatatttaaaaatattgagcagtatatcagaggagaggtttcaaagaatagattattacaacgggccagacccagcagatcatcatccagcagccccagacggctgtcactgctggccagactcaggtaattccactagctctgtcacacaggagcaaaactgatttggaagagtcagataactgagtcagatatcaaccagttaatgcagatggcaccattctccagcaaggtaagtgtacccataagcttccctaggactttttggggcaacttttttgtcccttagacaactgacatacaaccagcagtgggcaagggactgtcactgtgacactaccagtggcaggcaatgtggtcaattcaggagggatggtcatggtaagaaaatgtatttttcagctttgtctttgaaattttcttgaacatgcaacttgatgcctcctaaaagaagagcctctctacgtgaatgccaaacaataccaccgtattcttaagaggaggcaagcccgagctaaactagaggcagaagggaaaattccaaaggagagaagggtatgtataacattgggaaggatataggaaaggagaatagcagggttctacttttgaaattatcttttctctccaaaggaaaaggatagtccccatatgcaggtaggaagacatatacattttattcttctctttattaccttgtattgacttgagttgaagccttcagcatggagctgatcaaggtcatgtttctcactgttccaggaaattgatcaactctt

SEQ ID NO: 11071 - DNA, 398 bp, Homo sapiens
  SIMILAR (380)..(72): 911254mologous to Homo sapiens Human normal uterus tissue derived protein 52,accession number Y59889,Smith-Waterman Score= 494.
  misc_feature (1)...(398): n = a,t,c or g
gagggtaatgcaacttcttatttattaatatataataacaacaattatacagctcatatctgcaactgttaggtctttgttatgtcttggtcactttgtctggactggccgtgaccttcagctccagggtctgggctaggaagacgttccagtgaccttcgtgggggccagcgagcagtcggaagtgctgtgcctctttctggaagtcttgcttcctgactttcttgatctgagtcaagtggaagattcctttcaccaagctttccagaggtagantctccaccaagtccgaggcctcgtgttccagggcaaagcgacgcaggttgtctggggctttggggataccgatgtgtggacgaggacccggcccggtgccttggggacacctggtaagaacn

SEQ ID NO: 11072 - DNA, 1551 bp, Homo sapiens
  SIMILAR (1246)..(1479): 341254mologous to Homo sapiens golgin-like protein,accession number AF266285,Smith-Waterman Score=79.
ctgagagaagaaaagttacaagaggaaaaaccctctgaagatcaaatccacaagctgttaccagaggatacagaaacagggaaaaggaaaatggatgaacagaaaaaaagagatgaaccattagtactgaaaacaaatctggaacgttgtcctgcacgtctctcagattcagagaatgaagaaccttctcgaggccagatgacacagacacatcgctcggcatttgtttccaagaacaactcctactccttagctttcctggcagggaagctaaactccaaggtggaaaggagtcagagctgtagtgacacagcccaggaaagagcgaagagcagagtcagagcagttccaggcaacaaagccaaggtcacaactatgactccagcctccaaccccatcattggtgtcctcttgtcaactcaaaacaaccgctgcgtctcggcccctgacttaaccatcgaaaagcgtctacccttcagctccctttcatccttggcttccctgcataagccagagcgttctgtcagccctgagagcaatgacagcatctccgaagaactaaaccatttcaagcccattgtctgctcaccatgtactcctcccaagagactccctgatggccgtgtgctaagtcctctcatcatcaaatcaactccacgcaacctaaacagaagcctgcagaagcagacttcttatgaggccagtccacggatcctcaaaaagtgggaacagatctttcaggagcggcagatcaaaaagaccctttcaaaagccactcttacctctctggctcctgaaatgggggaagagttactaggctctgaaggtatccattctagcaaggagaagccacttgtggctgtaaatacaagattatctggtgggcaggtcctctctgagtatactggacccacctctgctgatcttgatcatttcccctctgttagccaaacaaaagcagaacaggacagtgataataaaagtagcactgagatcccactggaaacctgctgttcctcagaactcaaagggggaggcagtgggacttctttggagagggagcagtttgaggggttagggtcaactccagatgccaagttagacaaaacctgtataagcagagccatgaaaatcaccacagttaattcagtgctaccccaaaacagtgttttgggtggagtcctcaaaacaaagcaacaattgaagacattaaatcattttgatctgactaatggtgttctagttgagagcctaagtgaagagccacttccttctttgcgtcgaggccggaaaagacactgcaagaccaagcacttagaacaaaatggctcccttaaaaaactgcgacaaaccagtggggaggtgggtctggccccaacagacccagtcctgcgagagatggagcagaagcttcagcaagaggaagaagaccgacagttggctctgcagttgcagcgcatgttcgacaatgagaggcggactgtgagccggcgaaaaggaagtgtggatcagtatctcctacggtccagcaacatggccggggccaagtag

SEQ ID NO: 11073 - DNA, 603 bp, Homo sapiens
tagggggcaaccttttaactgtcatcttgtgagaggcaacctcaaactttaagcagcctccctctctccctttctggtgtcttaaatcaagaactagtttgaagccaaggcaaagcaaggtttgttcatcttcctttcctgtcatttaaggtaaaacaggcaatgaactcgctcttcaaataccatagttcaagagtagctgtgggccccggttcccagattaataatagccagcaggcagattgccccttccttggggccaccaccctcccaaagctgtgcccaccaatgagagcattgggttcaagtttgcatcaaacatggtattaccaacgctgagcctccagcagagcacttaaaagtcctagtgagagaatagatactatgcaagggaaaaaaatttaaatgccaacgaatagtttttttttttttgaacctgatatactgtttgtttactctcaactctttgtacaaatattattgtcctaagggccttttcccctcctgcctagaaaataggttgtgtattggttttattcaacctgctgtctgctttaggattggagaaggtacctggatccttgtggactccactactggctg

SEQ ID NO: 11074 - DNA, 622 bp, Homo sapiens
  SIMILAR (622)..(383): 961254mologous to Homo sapiens Human PRO1557 (UNQ765) amino acid sequence SEQ ID NO:142,accession number Y99382,Smith-Waterman Score=445.
ctttttttttttttttttgagggtaatgcaacttcttatttattaatatataataacaacaattatacagctcatatctgcaactgttaggtctttgttatgtcttggtcactttgtctggactggccgtgaccttcagctccagggtctgggctaggaagacgttccagtgaccttcgtgggggccagcgagcagtcggaagtgctgtgcctctttctgggaagtcttgcttcctgactttcttgatctgagtcaagtggaagattctggctgtgtggccttgggccaggtacttcacctctcctgagcctcaagtttcctcatcttttaccagcttccagaggtagatctccaccaagtccgaggcctcgtgttcccaggggcaaagcgacgcaggttgtctgggcttggggataccgatgtgtggacgaggacccggcccggtgccttgggacacctggtagaactgatctcactgtggccagggtctgctttgtcctctgggcaaatcttgcagcacttcccagccactatctcagggtgacggcaggggtacttcgtgggacaggtcacacgcttgcagtcctggcggccatcctcacaggtgcataggatgcatgg

SEQ ID NO: 11075 - DNA, 1311 bp, Homo sapiens
  SIMILAR (60)..(371): 341254mologous to Homo sapiens Synthetic human type III collagen SYN-C3,accession number W54966,Smith-Waterman Score=81.
atggcggctgcaggtccgagtactcgggcctcttccgcggcggcagcagccgctctgagtcggcggggccggcggggccgctgtgacgagacggcggcagctaagactggggccccaggcccggcttctggaccttcgctgttggtgttgtcgccgccgttgctgcagccgccgctgccgccgcggccggaggaatcgggctgcgccgggtgcctggagccccccggagaagcagcggccctgccgtgcggccactcgctttgccgaggctgcgcccaacgcgccgccgacgcggcgggcccgggttgccctcgctgccgcgcccgcggcccaggctgggcccgccgtcgggcccgcgacgacggccaggccgactcagaggtgctgggcgagtgcgcccgccgcagccaacccgagcgctgccgcccgcgccgggacgggggcgcggctgccgcggggcccaggccagagcaggagccgcgtgccgcgcctgcggagccagggcttttaagtgttctgctggaggctccagcgttggttaataccatgtttgatgccaatcttgaacccaatgctctcattggtggccagcttgggagtgcctggataatggccatcagtgtctggcatacatatatttttgagtgtgaacaagacctgtgctttgcttctgaccgctggaacacggcaaagtgtcctgcacgtctctcagattcagagaatgaagaaccttctcgaggccagatgacacagacacatcgctcggcatttgtttccaagaacaactcctactccttagctttcctggcaggcggccccgccggccccgccgactcagagcggctgctgccgccgcggaagaggcccgagtactcggacctgcagccgccatcttgtttcccgtttgaagggagagtcggttgcgagggagaagagtggagggcggggcagtacgcgcggatgatagcggtgtcactaggaatgaacgcttattgggcgcttactgtattccagggcctggaccgaggcttctcccacttggttttatgtcatcctcccggctctattaatatccccattttacagatgaggcccagggaggttgaacaccttgcccaaggtctcacgggtttaaaggaaagagcaaggcctaaagtccagcagagggagagcagggttcggggcagctgggtcacaggagcccaagctcctaccttcgtgggggccagcgagcagtcggaagtgctgtgcctctttctggaagtcttgcttcctgactttcttgatctgagtcaagtggaagattcctga

SEQ ID NO: 11076 - DNA, 1286 bp, Homo sapiens
  SIMILAR (1285)..(875): 971254mologous to Escherichia coli valyl tRNA synthetase,accession number J03497,Smith-Waterman Score=701.
  misc_feature (1)...(1286): n = a,t,c or g
ggtgtggtagaatggcgttcgtaagtagtaagtcgtcaatcttgcgagtcaatctcaggactgcgatgttcgggcgtggggcggccggtactcgagccgacgtggtgtggtaggaggtgtgcgagttattaggcatggggagagagcttggggtgctattcgaaggtggtgggattctgaggcggcagggtagtcgaccggcagggcgcgacgtgatgtgtgcaagggggagggcgttatattcgcgaggtgttaaacggggggaatcgggtgattcgcctggagaggcggtggaaatcctgcggcagattgggttctatatggtgcacatgcggcaaccggtggcgccagaccatggaaggtgtcgagccgcataaccgccctggttcgtgcccatcagttgcccgatgcgatgacgcatctccgccgccgctttgttggtaaacgtcnccgccataatcgagtatggcgagcagttttccacgctcatcaaccaggcgatacgatgcaccagtacgcgcgtcttaccactgcccgcgcccgccagcaccagaaggttgctgcgtggcgcggccaccgcttcgcgctgtttgtcattaaggctgtcgagcaggtaagaaacgtccattggcaccgccgcgtaaaaataggttgggcggagaagcgcaacgccctccgccaaaaagctgggtatatatacagatttgctgattatatcagcgaggtcagagatgccaaccgggaaatttccagatgcggcagtaaacggctgtcccaggtttgcatcagatcgccattttccggtctgatccaacaagcctgcattccgctgcgaattgccccacccacgtcagtgggactagccggacctccgcggtttgcccggcgcgatgtcatttctcgcacggatgttacgtaccgcaacgatcgcctgtttcagccattcggtgtcggccagtgcggcttcatcaacctgagatgcatcgtactgcgggaacggctgcagcatgatggtgtcggcagtgataccgcaaagtactttcacacgctgccagatggtttcggtgatgaacggaatgatcggatgcgcgaggcgcagcagaccttccagtacagtcaccagcgtatggcgagtaccgcgcagttctgcttcggtgccaccgttcattaccggcttggtcagctcgagataccagtcacagaactggttccaggtgaactcatacagaatgcctgcggcgatatcgaagcggaagctgtccagcgcttcgcggtacgctttgatg

SEQ ID NO: 11077 - DNA, 787 bp, Homo sapiens
  SIMILAR (2)..(253): 781254mologous to Homo sapiens ribosomal protein L5,accession number U14966,Smith-Waterman Score=335.
tggcctgccactggcccacgggcttctcggtaggtttggcatggacaggatctatgaaggccaagtggagatgactggagattaatgtgatgtggaaagcattgatggtcagcctggtgccttcacctgctatttggatgtaggccttgccagaaccatcactggcaataaagtttttggggccttgaagggagctgttgataaaggctgttctgtccctcacagtaccagatgattccctgcttgtgattctgcagagtttgcactggggattccttactttgtccagcccaacatctaactcttcatgttgtaacggagcccacatttctcctgtgtattcacccttctcccattgtgagtcccaggtggtttgagcacgccaactctctcttgattccttggaagggcccatggtaaaggcctgctcgacagccttaatgacaaacagcgcgaagcggtggccgcgccacgcagcaaccttctggtgctggcgggcgcgggcagtggtaacacgcgcgtactggtgcatcgtatcgccttcagactcgaactggtatgggccttcgttaattttcacgctctgaccgtgcatataagaaacaccaacgtcgactgaagcatctttattaaatgcgtaagtcgtacctgcactcagccagaaacggtcttccggtaaagtcgttgagttaaagtcacgttttatgcaggtaactttatccagatcagtgtgttctaagaacgcgtagtaaaagttagtaccgttcagccagcttttaccttgagt

SEQ ID NO: 11078 - DNA, 974 bp, Homo sapiens
  SIMILAR (1)..(894): 811254mologous to Homo sapiens REC8,accession number AF132734,Smith-Waterman Score=1179.
  misc_feature (1)...(974): n = a,t,c or g
gtcactaaaacatctgaccctttgaagattctgggcaacgcagaggccatgaaggtgctgggagtgcagcggcctctcctacagagcacaatcattgtggagaagacagttcaagacctcctgaacctgatgcatgacttgagtgcatattcagatcaattcctcaacatggtgtgcgtaaagctccaggagtacaaggacacctgcactgcagcttacaggggtattgtccagtcagaagaaaaacttgtcatcagtgcatcctgggcaaaagatgatgatatcagcagactcttgaaatctctaccaaactggatgaatatggctcaacccaaacagctgaggccaaaaagagaggaggaagaagatttcataagggcagcttttggcaaggagtctgaagttcttattgtgaacctgggtgataaattaatccctccacaagacatccttcgtgacgtcagtgacctcaaagccttggccaacatgcatgaaagcctggaatggttggcaagtcgaacaaagtcagctttctccaatctttctacatcccagatgctttctcctgctcaagacagccacacgaacacggatctccccccagtgtcagagcagatcatgcagactctcagtgaacttgccaaatcgttccagggatatgggctgaccgctgcttgcttgtcttacatctgggaagtgagggttcactgtttccactatcttatccctcttggcaaaggaggggaactatggccattgtgggttaatgtgggaaagtatggattatgaccccctggtggtcaagctcaacaaagatatcagcgccatttgaagaggccatgagcgccagccttcagcaggcacaagttccagtatatcttcgaagggcctggggccacctgatctcctgcatcctcattaatggtgcncagtacttcangcgcatcagtgagtctggcatcaagaaaatgtgt

SEQ ID NO: 11079 - DNA, 1077 bp, Homo sapiens
  SIMILAR (22)..(222): 891254mologous to Homo sapiens REC8,accession number AF132734,Smith-Waterman Score=295.
atgcctgtgatcaagcctggggcagcttttggcaaggagtctgaagttcttattgggaacctgggtgataaattaatccctccacaagacatccttcgtgacgtcagtgacctcaaagccttggccaacatgcatgaaagcctggaatggttggcaagtcgaacaaagtcagctttctccaatctttctacatcccagaagccaaggcaaggccatgagacagaaaacatggtttcagagtccaccctgctggatgctgtggatccttctctgagaaaggagactggatatgccaccccaaaactatccatgttggtggatccagggttaaagcacagcccagaacgtaacttagaatattacgaaacaggtgtccaagagttttccagaccagcatctgttccagaaatgggcacagtcctgcagccaggaggcagagctagtgccaggcctgcagcacgcagggcaactggcctagggaccacggaaaaggcaaatgaagccagaggcagacggtccctggaatggaatcctttcctgcatctcctctccgcaggtagtcctggattccagctttgtgtcctccttggcaagctcccctgtcctgaaactgcagaggggccacatgacctccacagtctgaactgctattccctgtccctctgtggtcctttgccaggagaagcccccaccacgaggtcaggggagaccctgagcagaggagtctccccccaccaggccaagcaaggaaagagctcagctggaaggggctggattcattcgcgcctctctccagccactcctgcagctcctggcttcctcgcaagcctctccatcagcgccctcacagggcttggacacttcacagctgctgggagaaagaatggaatggacccaaggacatccaggcaggcccaggccctacctgctggcgactcgggcaagtcactttctctctccgagtctcgttgtcccattcatcataaaggaacaggcattactgctatagggttgctgaggataagatgcaccttgtacagcatagtaatgaacggcggcagaaaacaggtcttttag

SEQ ID NO: 11080 - DNA, 363 bp, Homo sapiens
  SIMILAR (1)..(360): 981254mologous to Homo sapiens FGFR signalling adaptor SNT- 1,accession number AF036717,Smith-Waterman Score=619.
atgcataactatgtaaatacagagaatgtaacagtgccagcaagtgctcacaaaatagaatattcaaggcgtcgggcctgtacaccaacagtctttaactttgatatcagacgcccaagtttagaacacaggcagcttaattacatacaggttgacttggaaggtggcagtgactctgacaaccctcagacaaaaaaaacgcctacaactccccttccacaaacccctaccaggcgcacagagctgtatgccgtgatagacatcgagagaactgctgctatgtcaaatttgcagaaagcactgccacgagatgatggtacatctaggaaaactagacacaatagtactgatctgcccatgtga

SEQ ID NO: 11081 - DNA, 1158 bp, Homo sapiens
  SIMILAR (1)..(321): 861254mologous to Cloning vector pBACe3.6 levansucrase,accession number U80929,Smith-Waterman Score=471.
atgacgttcgatggtattacctctcacgatatttacatgcttggtgatgtatcaaactcttcaaccggccctgccaagccgatgaacaatacagggcttgtgctgcagatgggtcgtgatgcgaacgatgtgacattcacttactctcgcttcgcagtgccgcaagccaaaggcaacaatgtggttatcacaagctacatgacaaacagaggcttcttcgaggataaaaaggcaacatttgcgccaagcttcttaatgaacatcaaaggcaataaaccatccgttgtcagacacagcatcctggagcaaggacagctgacatggctgccaatagcgcagcgagcagggctggccgcaggccaaagcggtcggacagtgctccgagaacgcgtgcgcatagaaactgcatcaacgcatatagcgctagcagcacgccatagtgacaggcgctgctgtcggaatggacgagatcccgcaagaggctccggcagtaccggcataaccgagggggatcctctacagaagactggctatgtcagcacaagtagactgggtgtcagcacagaagggcgggcaacagaacaatctgctggcttagctttgcccaagtgggcagctggacgaggacgctcagagccagctctcgagagttcaagtatccgacagttccccactgctcccaggagcggttacccgggcactctgtgcccctcattcctgtaccacagtaagccagtgctgtgtgctccgaattccagggcatcccccagctcagccactacactcagcacaaggactctgtggggcccaggagcaggtagtcacccctttgggctcctcaacacccggctgtccccagacttgtgtccagggaagatagtgttgagggccctcaaggagagcagggcagggatgcctgagcaggacaaggaccccagagtccaagaaaatcctgatgatcacagaacggtccccgaggtcaccggggatgcacggtctgcattttggcccctgcgggacaatggaggcctctctccctttgtgcccaggcccgggcctctgcagacagacctccatgcccagaggggatcctctagagtagactgggatgcagccagaaggctcacccagcaggagccatttatcgtcctgtcctga

SEQ ID NO: 11082 - DNA, 528 bp, Homo sapiens
  SIMILAR (129)..(278): 961254mologous to Homo sapiens hypothetical protein,accession number AL390156,Smith-Waterman Score=266.
  misc_feature (1)...(528): n = a,t,c or g
aaggcgtcgtttcgctgcccaaagacagactgaaancgctggccgancgtcaggtggacagagtccttgcaatnccaggcctttgtgtatgcagcttctgggttctcacagtttcatggcttgtctgtcagaaatttccagaattgaaattcaaatatgtggaagaggagcagcccgaggagttttttatcccctatgtctggtctcttgtctacaactcagcagtcggcctgtactggaatccacaggacatccagctgttcnccatggattccgactgagggcaggatgctctcccacccggacccctccagccaagcagcccttcaagttcttttatttctgggtaacagaagtagacagacaggttacttggtgtatcttctgttaaagaggattgcacgagtgtgttttcctcacacactttgatttggagaattggtgctagttggcaatagataactcagcgtagatagtattgcaaaaagggnaggaaatacacaacaataataaatgtaaaaacntnct

SEQ ID NO: 11083 - DNA, 428 bp, Homo sapiens
  SIMILAR (2)..(97): 401254mologous to Homo sapiens Human secreted protein encoded by 5' EST SEQ ID NO: 81,accession number Y13067,Smith-Waterman Score=63.
tttaccatcttcctgtaagatcgtgcagccacgttcaaacaacatcccagcatggcagctaactccctggagccacacggggctgcgggggctgtggttgaccaggaatgaagccttctgcttgaagttcacagacagcccagtaggaagctcagtggaaatgactctgactagagctgccatgtaccaggcacttcctgcttcactaatgaccaccctataaaaaacaaaagtggcctctctcggctcactggcttattgccttcacaacactcagtgcaattggtgcttctcttatttgttgacttgtgcaccatttgtttccccaactagaacaaacatcggttctaagaaggcagggaccttatgagcatctggcatgtcactgacatcttaaggcacgtttgctgaatgaggaattaaataaa

SEQ ID NO: 11084 - DNA, 552 bp, Homo sapiens
  SIMILAR (394)..(549): 961254mologous to Homo sapiens hypothetical protein,accession number AL390156,Smith-Waterman Score=272.
atgactcccagctcccttgccctggctctttctggccccatcgtgccacaggcctgcctgggaaacactgtgcatgctcgtctgtggccctgcctgagccagcccctgagcagtgtccacgagagacctgggctcaaggagcagcagtctgcagaggtgaagtccttcctctctgcggtctctttgtctgattgggtggtcattagtgaagcaggaagtgcctggtacatggcagctctagtcagagtcatttccactgagcttcctactgggctgtctgtgaacttcaagcagaaggcttcattcctggtcaaccacagcccccgcagccccgtgtggctcagggagttagctgccatgctggatgttgttgaacgtgctgcacgatcttacaggaagatgaaatttccagaattgaaattcaaatatgtggaagaggagcagcccgaggagttttttatcccctatgtctggtctcttgtctacaactcagcagtcggcctgtactggaatccacaggacatccagctgttcaccatggattccgactga

SEQ ID NO: 11085 - DNA, 820 bp, Homo sapiens
  SIMILAR (19)..(138): 1001254mologous to Homo sapiens Polypeptide fragment encoded by gene 128,accession number W88957,Smith-Waterman Score=205.
ccaagaattcggcacgaggtcattgaagaagtgattcgaatgatgttagagatcatcaactcctgcctgacaaattcccttcaccacaacccaaacttggtatacgccctgctttacaaacgcgatctctttgaacaaattccgaactcatccttcatttcaggatataatgcaaaatattgatctggtgatctccttctttagctcaaggttgctgcaagctggagctgagctgtcagtggaacgggtcctggaaatcattaagccaaggcgtcgttgcgctgccccaaagacagactgaaagaaatttcccagaaattgaaattcaaatatgtggaagaggagcagccccgaggagttttttaatccccctatgtctggtctcttgtcctacaacttcagcagtcggccctgtactgggaattccacaggacattccagctgtttcacccatgggattcccgactgaggggcagggatgcttcttccccacccgggaccccctccagccaaggcaggccctttcaaagttcttttatttctggggtaacagaagtaggacagacaggttacttggtgtatcttctgttaaaagaggattgcacgagtgtgttttcctcacacactttgatttggagaattgggtgctagttggcaatagataacctcagccgtagatagtattgcaaaaagggggaggaaaatacacaaccaataaataaaatgtaaaaacctgctattccaaaaataaaagagaagagagataaaagaattagcacgggcgggatttatgtggtctatgtcaccccgggattccgga

SEQ ID NO: 11086 - DNA, 1965 bp, Homo sapiens; identical to SEQ ID NO: 7403
  SIMILAR (1431)..(919): 561254mologous to Homo sapiens Fragment of human secreted protein encoded by gene 5,accession number Y36400,Smith-Waterman Score=389.

SEQ ID NO: 11087 - DNA, 417 bp, Homo sapiens
  SIMILAR (1)..(300): 961254mologous to Escherichia coli g13 protein,accession number J01611,Smith-Waterman Score=515.
gcgtcgacggcgggggtgtcttactatgttgctcaggctggtctcaagttactgggcctaagcctctcaaagtgccgggactacaggtgtgagccaccatgcccagagtagatgagtttatacaaagttatggcaatggcaaggaaagctatgagtctgtaacatctacttctttttggatgagttcatgtactttgcagggacatggatgaagctggaaaccatcattctcagcaaactatcacaaggacagaaaaccaaacaccgcatgttctcactcgtaggtggaaattgaacaatgagatcacttggacacagggttggggaacatcactcaccggggcctgccacggggtgggggactgggagagggatagcattaggagaaatacctaatgtaaatgagttgatggggtc

SEQ ID NO: 11088 - DNA, 366 bp, Homo sapiens
  SIMILAR (1)..(111): 911254mologous to Homo sapiens PRO1546,accession number AF116638,Smith-Waterman Score=176.
atggaatactatgcagccataaaaaatgatgagttcatgtcctttgtagggacatggatgaaactagaaaccatcattctcagcaaactgtcacaaggacaaaaaaccaaacaccgcatgttctcactcataggcaaactccgcttcgttctgcaggttggaggcctgctggagtgccagtgcctgtcggaagccacatccataggaaaagggggagagtactacatcaagggaacatcccgtgggacaaaagaatctgaacaacagccttcaaccccagaccttccctctgatagggcctacccaaatgagaaggaaccagaaaatcaaccctgcacacagcatgatgctcttttccacaaataa

SEQ ID NO: 11089 - DNA, 375 bp, Homo sapiens
  SIMILAR (10)..(246): 931254mologous to Plasmid F Protein D,accession number M12987,Smith-Waterman Score=370.
atggaatactatgcagccataaaaaaggatgagttcatgtccttagcagggacatggatgaagctggaaaccatcattgtcagcaaactatcacaaggacagaaaaccaaacaccacatgttctcactcataggagtccacctgtcccgagttggaagtctgaactcatgttcctggattcctcccatgcatcttggtgctggtgtggggcctgaactcagccaatccgcaacacctccaggagtcttcctcttagatgctgaggccacggagaaggaagcagcacaaagaatgaaccctggagaggataagatcaatcagattcgtgttttgcaactacttcttggcaagacgtacgggactgaccgcagttga

SEQ ID NO: 11090 - DNA, 197 bp, Homo sapiens; identical to SEQ ID NO: 6986
  SIMILAR (1)..(129): 831254mologous to Homo sapiens Human secreted protein, SEQ ID NO: 6834,accession number G02753,Smith-Waterman Score=198.

SEQ ID NO: 11091 - DNA, 270 bp, Homo sapiens
  SIMILAR (1)..(111): 831254mologous to Homo sapiens PRO1546,accession number AF116638,Smith-Waterman Score=158.
atggaacactatgcagccataaaaattgatgagttcatgtcctttgtagggacatggatgaagctggaaaccatcattctcagcaaactgtcacaaggacgaaaaaccaaacaccgcatgttctcactcataggaaaggatcctccccatctctgcagaagcctgaccatccccctagagggcctgggaggaagtgggttttgcatacagtccctgttgactctagtgccccctgctggccccagacgcgagttccggcgaggcttcagg

SEQ ID NO: 11092 - DNA, 146 bp, Homo sapiens
  SIMILAR (1)..(93): 931254mologous to Homo sapiens Human secreted protein, SEQ ID NO: 6720,accession number G02639,Smith-Waterman Score=148.
atggaatactatgcagccataaaaaaggataagttcatgtcctttgtagggacatggatgaagctggaaaccatcattctcagcaaactatcgccggcgtgctgtgcaatttatccagtggccactagaggacagcagcgactcag

SEQ ID NO: 11093 - DNA, 268 bp, Homo sapiens
  SIMILAR (1)..(174): 621254mologous to Homo sapiens PRO1546,accession number AF116638,Smith-Waterman Score=188.
atggaatactatgcagccataaagaaggatgagttcgtgtcctttgcagagacatggatgaagctggaaaccatcattctcagcaaactatcgcaaggacagaaaaccaaaccgaatgttctcactcatagagagactatctggaagataacatgtgagccatccccagtcataagcatctgtctgcagtcggagctcttcatggtcaaagtggacgccaagagcttagagcattcaggctctaaagagcaatctaaaagtatcttag

SEQ ID NO: 11094 - DNA, 301 bp, Homo sapiens
  SIMILAR (1)..(150): 861254mologous to Homo sapiens PRO1546,accession number AF116638,Smith-Waterman Score=225.
atgatagactggattaagaaaatgtgtcacatatacatcacggaatactatgcagccacaaaaaatgatgagttcatgtcctttgtagggacatggatgaagctggaaaccatcattctcagcaaactatcgcaaggacaaaaaaccaaacaccacatgttctcactcatagccttaatacagatattggcagctgctgcagctgagcgagatgtggtttatttcacctttggggactcagaattgatgagagacatttacagcatgcacattttccttactgaaaggaaactcactgttg

SEQ ID NO: 11095 - DNA, 289 bp, Homo sapiens
  SIMILAR (135)..(548): 981254mologous to Homo sapiens p48,accession number U28918,Smith-Waterman Score=709.
atggaatactatgcagccataaaaaaggatgagttcatgtcctttgtagagacatggatgaagctggaaaccatcatgctcagcaaactatcacaaggacagaaaaccaaacaccgcatgttctcacacaacagcccacaaaacaaaccgcctgcagctcctgttataaatgagtatgccgatgcccagctacacaacctggtgaaaagaatgcgtcaaagaacagccctctacaagaaaaagttggtagagggagatctctcctcacccgaagccagcccacaaactg

SEQ ID NO: 11096 - DNA, 301 bp, Homo sapiens
  SIMILAR (1)..(132): 781254mologous to Homo sapiens PRO1546,accession number AF116638,Smith-Waterman Score=182.
atggaatactatgcagccatgaaaaatgatgagttcatgtcctttgtagggacatggatgaagctggaaaccatcattctcagcaaactatcccaaggacaaaaaccaaacaccgcatgttctcactcgtggatggatccacagcgaagggggaagcggcagtcactatctatcagtgaggcaggagccaaccagttcccgaagagtgttttccgcttctttgggctgggagacagcaaggttggtagtaaatggtctgcgacatgtgcttgtgagcctatccacacgagtgagtactgtg

SEQ ID NO: 11097 - DNA, 253 bp, Homo sapiens
  SIMILAR (71)..(253): 951254mologous to Homo sapiens Human secreted protein sequence encoded by gene 23 SEQ ID NO:111,accession number B08954,Smith-Waterman Score=291.
atggatgatgctggaaaccatcattctcagcaaactatcccaaggacagaaaaccaaacactgcatgttctcactcaaaggcctcagtatggtggcttattctgtccaggttctagccgtatttatcagctgtgcaatattaacccttgcaatgaaaatagcttggattttcgggctcaacagtgtgcagaatataacagcaaacctttccgtggatggttctaccagtggaaaccctatacaaaagtggaag

SEQ ID NO: 11098 - DNA, 978 bp, Homo sapiens
  SIMILAR (592)..(801): 971254mologous to Homo sapiens p48,accession number U28918,Smith-Waterman Score=352.
atggatgaagctggaaaccatcattctgagcaaaccatcacaaggacagaaaaccaaacactgcatgttgtcactcataggtgggaactgaacaataagacttggacacaggggtttctgggaaagcaaaacagtgagactgatatttgtgtgcaagaaatgtattgggggtgcttttgggatgaacacatcttgggtaatgaaggaacaaggaggactgggcagaggaggaagtggaaagctttcacgctctcacaagacctcagcagtcacaccgacccaccccagcaggctctgtctaactggaaaggcactagagcattgcctaatgaaaacaaaagggatggcctttatccccgctgttgtttggcatcctatgtgtgctgccccaaaaaggaggcatggtcttggggcaaagtggctgtctttagcaaagggaagttgcagagagggtctcagctgagagctgcctgtgatcaaccttctgggcaattgggctatgagcactttgtcctccagggggcgctatggtcctgtcagctttgggaagaagtgggctattctccaggagcacacctaatgctttgtcgggtagaggcctctgcagccacgacctccagcttgaaggcagtcccagctttcaccagggaagaatgggctgcttctgcaagccctgagggctgcaggaaagaggaaacaggacatcagcagggagctcaccaccagcaactggtgaccatcggcaagcagttaaaggctgagggcaagagctcacagagagactcttatttctggcacacagtcaagaagcaaaactggaatctctacgttaaatcccagcgacacccccagcttcttgaaggagagacgttattgaaggagatttccttcctggatcatgaaaagctgtcctttggaccctcctctgcgggtctggggactctggctgcctcatactcaccccgttcagtgtcctga

SEQ ID NO: 11099 - DNA, 371 bp, Homo sapiens
  SIMILAR (279)..(148): 931254mologous to Homo sapiens Human secreted protein, SEQ ID NO: 7217,accession number G03136,Smith-Waterman Score=213.
atgataggatcaaaaatcaatgaaattgaacataaaaaacaacagagaaaaatcaaagaagcgaagacccggttctttgtaaagatcaataacaaatctctagcaagacaaagaaaaaacagagaagacaatataagaactgaaataagggacatggatgaagctggaaaccatcattctcagcaaactaacacaggaacagaaaaccaaacactgcatgttctcactcataagtgggagttgaacaatgagaacccatggacacagggaagggaacatcacacactggggcctgtgaggggggggagagatgcaggtgaagcagggagaattctgacagtgacagcctgggaactggcgagaacgatcgg

SEQ ID NO: 11100 - DNA, 1395 bp, Homo sapiens
  SIMILAR (94)..(675): 1001254mologous to Homo sapiens p48,accession number U28918,Smith-Waterman Score=995.
atggggagaaaccagagaagaaatgctgaaaattccaaaaaccagaatgcctcttttcctccaaaggaacacaactccttgccagcaagtgaacaaaactgggtggagaatgagtttgacaagttgacagaagtagccttcagaaggtcggtaataacaaacttctccgagctaaagaagcatgttctaaaccattgcaaggaagctaaaaaccttgaaaaaagggacatggatgaagctggaaaccatcattctgagcaaactatcacaaggacagaaaaccaaacaccgcatgttctcactcataagtgggaattgaacaaggagaacacatggacacagggaggggaacgtcacacaccagggcctgttgaggggtggggctctgtgggaggagtagcattagaagaaatatgtaatgtaaatgatgaggatgacgtcaccaaagatcgcattaatggcatgtggaagaagacacacaagaagtttgttcatgacttcaaaggatttgtcaaggatgatgaggttgcaaaaagaaataaggctatgattgagatggcagacaaatttaacttgggtgtggaagcattcctgcaagctcccttcatggctgaactcctaataatcaagaactgcccatgggtgaaggcaagagaagatgaatgttccagcttaaggagagacaatgaatttgctgcaggacaggcaagccccaaaatgacagctaagcccagaagagttcttggtttaacccaggaaagaattcaagggcaagccagtggtattaaaaagcaacttttattgaagcagcagtgtactgaagcagcagcagaagcactgctccttgtggagcagggataccccgaagaatcagataggcacaatcagggtactggaagtcctgattactcagagacgttaatcgcatactatgtgaaccccaatcatgtcctaatttgccctccaaaagaaggaacagggaaagagacaacagggatgcacttatacagggaaaaggctacaggaggacatgaaaatgcagccctcttcaagccaaggagaaaggcctcaggaggaatcaactgtgttggcaccttgatcatggacttccagcctccagaaatgtttatggaaaggctaaaaggtaatttgttgtacgattatggttgctgcaatgacacaactgccacaggccacaggtcacacatgtcacgggtttttctaaagttgaaattggaatccaacttaagaaattgccatcaaacgccaaatggtaatgcaaccagagcctctgatgatagcctcttctgctgggaacccttagaaaggcctctgagggagctccgattgccattttcctcaaaacagcgccctctgtcagcaggaggcagttaa

SEQ ID NO: 11101 - DNA, 912 bp, Homo sapiens
  SIMILAR (1)..(516): 921254mologous to Cloning vector pZC320 SopB,accession number U26464,Smith-Waterman Score=827.
atggaatcaaaaagagcccgcattgccaagacaatcctaagccaaaagaacaaagctggaggcatcacactacctgacttcaaactatactacaaggctacagtaaccaaaacagcatgctactggtaccaaaacagagatatagatcaatggaacagaacagagccctcagaaataataccacacatctacaaccatctgatctttgacaaacctgacaaaaacaagaaatggggaaaggattccctatttaataaatggtgctgggaaaactggctagccatatgtagaaagctgaaactggatcccttccttacaccttatgcaaaaatcaattcaagatggattaaagacttacatgttagacctaaaaccataaaaaccctagaagaaaacctaggtaataccattcaggacataggcatgggcaaagacttcatgacgaaaacacctaaagcagtggcaacaaaagccaaaactgacaaatggcatctaattaaactaaagagcttctgcacagcaaaagaaactaccatcagagtgaactggcaacctacagaatgggagaaaatttttgcaatctacccatctgacaaagggctaataaccagaatctacaaagaactcaaacaaattcacaagaaaaaatcaaacaaccccatcaaaacggacatggatgaagctggaaaccataattctcagcaaactatcgcaaggacaaaaatccaaacaccgcatgttctcactcataagtggaaattgaacaatgagaacacatggacacaggaaggggaacatcacacactggggcctgttgtggggtgttggtatctatggctgacagacctgaagacaaatcacatcacaggactctttgtggacactcccaaggacctgcctggagcccagtag

SEQ ID NO: 11102 - DNA, 680 bp, Homo sapiens
  SIMILAR (739)..(671): 471254mologous to Mus musculus mszf62,accession number AB010369,Smith-Waterman Score=71.
ttttgttgtaaaactgtaaaataagcaaggccaaatatttattgtttggcaacacatagagatatatagagttttacatgtaaaattacctataaatgtcaacagcacattgacatggtaaatacgaagttcaaaatgggatatccctggcatggaatagagagctgggatggcggagggccacacgggaagctgcaatagaatttttgatgtttgcttcattctctaggtgatgtgttcactggtgttcatcttatcatgtttttaaattgacaagcatgttacatatacaccacagaatactatgcagccataaaaaatgatgagttcatgtcctttgtagggacatggatgaagctggaaaccatcattctcagcaaactgtcacaaggacaaaaaaccaaacaccgcatgttctcactcataggtgggagttgaacaatgagaacacatggacacaggaaggggaacatcacacaccgggacctgttgtggggtgtgaggaaccttcaccaccccattttgtggtacaaccatcatttactgatcaaaacagaaaactgatcgtggtcattgtttcttctctctccctgaaacgctatttcccatacaacccaaaaagtctcggtgagggttacgtggtgagggaagttcacacagcagccgcatggtatcggtga

SEQ ID NO: 11103 - DNA, 630 bp, Homo sapiens
  SIMILAR (40)..(573): 1001254mologous to Cloning vector pBACe3.6 levansucrase,accession number U80929,Smith-Waterman Score=940.
atggagcagctctcaccgatggccagctcctaccactctgaccacgctgctgtctccctggccatcttctttgactacaaaggaataaaactaggtatcaagctggcggctgttcccagtgccttgcccacccctgccgggccgtcggactcggcggggcccctgtggcatccctgtccagtccctgtcaccacccagtttttccctctggacccaggaattcaaagtaagcaaggaggtccgctgctccagttggctgcaaataattacaaccttaagcccaagcagcactttgggtcctggtttgggaccatgaagcggctcgggacatggatgaagctggaaaccatcattcttagcaaactatcacaaggacaaaaaaccaaacaccgcatgttctcactcatagatgggaattgaacaatgagaacacttggacacaggaaggggaacatcacacactggggcctgtcattggggggacaaagaagcaaggagaagaggaacatgctgtcctcctggggggtggggggcacaaagaagcctggagaagtggaacagttttcggcagcaagagtgacagctggggaatatttatccaggagcaaatgtgggtcttatgtgaatgca

SEQ ID NO: 11104 - DNA, 922 bp, Homo sapiens
  SIMILAR (1053)..(517): 981254mologous to Cloning vector pSacBII SacB,accession number U09128,Smith-Waterman Score=938.
atggcagaaggcaaaggaggagcaaggcacgttttacatggtggcaggcaagagagcatgtgcaggggaactgccctttataaaaccatcagatcttgcctcaagttttgccctccattaagaagggacaccctctttacggattggttacaggatctaattcgcctacaatcaacccttgagtcagaaaaagggattgaagcatcagtaagctctgggaaggcttatatccttggtcaacttcagactgctgtgctggcaggagagctctggatggcatcaggccagtgcccctctgagacgaagtttccagaggaaggagcaggcagcaatctttgctgttctgtatcctccactggtgataaccaggcgaacaaggtcgggggagtggaactccagcaaactgctgcagaactgcagaagaggggcctgaccgttagaagaaaatctaacaaacagaaagcaacaacatcaacatcaacaaaaaggactcccacacaaacctccgtccaatcatcatcagcctcaaagattaaagaaggaaaccttgctcagtggacttggaaagaacgtcatttctttgtgttcaatgtcaaatacccagggcttggtaaaatgttagccatatgggacatggatgaagctggaaaccatcattctcagcaaactaacacaggaacagaaaaccaaacactgcatgttcttactcataagtgggagttgaacaatgagaacacatggacacaaggagggggaacatcacacactggagcctctaggaggattttttaaaaatcagcatattcagtcacacaaaagactatttcaagaaattaagggtctcccatacagattctctcaatgtgaccatagggcccctaggaagcttaaggacgttgtgcttcagccccatcagcagcag

SEQ ID NO: 11105 - DNA, 1058 bp, Homo sapiens
  SIMILAR (1)..(594): 1001254mologous to Leishmania major probable levansucrase precursor,accession number AL160371,Smith-Waterman Score=1045.
gaatatacctaaccaaggagttgaaagacctctacaaagaaaagtgcaaaacactactgaaagaaatcacagatgacacaaacaaatggaaacacatcccaagctcatggatgggtagaatcaacattgtgaaaatgaccacactgccaaaagcaatctacaaattcaatgcaatccccttcagaataccaccatcattcttcacagcattagaagacacaattctaaaattcatatggaaccagaaaagagcccacatagccaatgcaagattaagcaaaaagaacaaatctggaggcatcatactacctgatttcaagctatactataaggccatagtcaccaaaacagcatgggacatggatgaagctggaaaacatcattctcagcaaactattgcaaggacagaaaaccaaacactgcatgttctcacttataggtgggaactgaacaatgagaacacttggacacagggtggggagcatcacataccggggcctgtcgtggagtgggggaaggggggaaggatagcattaggagaaatacctgatgtaaattatgagttgatgggttgctccaggagcatgcgtacagctacctgccacgaggattggggtggggaatgggtagctgctattgagtatatgctggaatttgctgaaattaaccacaatttatcatccaagccttcccctggaagttgcaagccttcaacatacttcagagttacaaaagagttgtatcagacagattctacctgtgcaattgttgtccagggttctctgctgtctgaaaatttccaaggcacgttgtcatataagagccctgttgaggatagaaggcagcagaaactgaagcaaggagaacaaccaggagatgtagcattcctggtgaaagctgatgctggcttgtgccagagtttcactggtggagaggaggagaaatggtcagcttctgaatatattttgaagagctcagaaacttttgatgagtgtatcatggtcactatttgcagtacaattcgcaattcttgccgtcctggaactactaaaagatag

SEQ ID NO: 11106 - DNA, 444 bp, Homo sapiens
  SIMILAR (1)..(519): 831254mologous to Cloning vector pZC320 SopA,accession number U26464,Smith-Waterman Score=711.
atggaatactatgcagccataaaaaaggatgagttcatgtcctttggagggacatggatgaagctggaaaccatcattctcagcaaactatcgcaaggacaaaaaaccaaacaccgcatgttctcactcacaggagatcccacaggtgatgaccgcctgtgcctcctgtccctcccaggagatcccacaggtgatgaccgcctgtgcctcctgtccctcccaggagatcccacaggtgatgaccgcctgtgcctcctgtccctcccaggagatcccacaggagatcccacaggtgatgaccgcctgtgcctcctgtccctcccaggagatcccacaggtgatgaccgcctgtgcctcctgtccctcccaggagatcccacaggtgatgaccgcctgtgcctcctgtccctcccaggagatcccacagaccttcgtgtgggatga

SEQ ID NO: 11107 - DNA, 597 bp, Homo sapiens
  SIMILAR (1)..(489): 921254mologous to Cloning vector pZC320 SopB,accession number U26464,Smith-Waterman Score=753.
atggaatactatgcagccgtaaaaaatgatgagttcatgtcctttgcagagacatggatgaagctggaaaccatcattctcagcaaactatcacaaggacagaaaaccaaacactgcatgttctcactcaaagatggaagacgttgccagcaggatcaaaaaaccctggattcatgtggcagatgcagggctggacccagtctaaatactacactgaaaccaaagagagtgaaaactgtatctgggaacaggataaaaagcaaccagaccaataaactgcagaagaaaggaatggcagcagtgggccaggcatgtgagcaggttcccaagcccctgtgcagtgggtgtggtgtgggtgatgccagtagcagcaacggacatccctctgggacccaagtggtccacattggtgttggcagtgcctgtgacagtccacagccacagcagctgtgggcagtggaatttgcccttggggcatgtaagaatgcacagctgcccctctgcatggggccagggcagaaaagtaaactgcagctaaaagaatctaaaatacttcccaaagccactgagtcagtcagcaccatgaccagaacttga

SEQ ID NO: 11108 - DNA, 1464 bp, Homo sapiens
  SIMILAR (1)..(597): 991254mologous to Leishmania major probable levansucrase precursor,accession number AL160371,Smith-Waterman Score=1046.
  misc_feature (1)...(1464): n = a,t,c or g
atgacccttacaagctccgggagaaagtcccctctccgactccctcccggtgcattggtggaggccctattcggggtctgtgagatctccgcggcggtttcccactcagatcctagacttgtggggatcagaaagcgtgggtcgccggactcgttcagcgagcggaacagggacatggatgaagctggaaaccatcattctcagcaaactaacacaagaacagaaaaccaaacactgcatgttctcactcatatgtgggagttgaataatgagaacacatggacacaggggtggcggcatcacacaccgggacctataggaagnagatcccctactttacttatgcatgtgcactacatcaaagttatatcctggagagaactcttgttgatttggctccgagctgccaatgcatctatcaaccccggagttgagcagtcaccctccggggatccaaagacagtcacgggcttccctttcctgcggctggaggccgcagactgggtggaagaggcatctgtccccaagggcgtgcacattgccctctccagccaagagcagcgtgctggggaccctcgtgatttggaagcaccttctaacttagttatttctgagcgaacccatcgttcttttagagtgagctggacaccaccttctgacagtgtggatcgatataaggtggaatactatccagtttctggagggaaacgtcaagaagtcgtgcgaacacctggggtcccggatctccgcttgcctgccatcatcccccaggctgcttggctgctggctcatctgcccgcaccgtccgccccgccgactgagctccccacaaagcacacagaggcgcagagccagcgctgttggagtcttttattgtgttctgtcaccgaggtcgcagccccgagccaggtagtaaaagaagctccaccttctttccacacgggaacagaaaacggataccaaggcgaagaatctttatttaacaaagcgtactacggcggcggcacgaacttcttccgtaaagaaagccagaagcttcagcagagcgctaaaaaacgcgatgctgagttagcgaacggcgccctcggtatcatagagttaaataatgattacacattgaaaaaagtaatgaagccgctgatcacttcaaacacggtaactgatgaaatcgagcgcgcgaatgttttcaaaatgaacggcaaatggtacttgttcactgattcacgcggttcaaaaatgacgatcgatggtattaactcaaacgatatttacatgcttggttatgtatcaaactctttaaccggcccttacaagccgctgaacaaaacagggcttgtgctgcaaatgggtcttgatccaaacgatgtgacattcacttactctcacttcgcagtgccgcaagccaaaggcaacaatggtggttatcacaagctacatgacaaacagaggcttcttcgaggataa

SEQ ID NO: 11109 - DNA, 481 bp, Homo sapiens
  SIMILAR (849)..(163): 991254mologous to Cloning vector pSacBII SacB,accession number U09128,Smith-Waterman Score=1224.
cgagtatatatccaaacacatgcacacgtatgtttattgtggcactactcacaatagcaaagacttggaaccaagccatatgtccaacaatgatagactggattaagaaaatgtggcacatatacagcatggaatactatgcagccataaaaaatgatgagttcatgtcctttgtagggacatggatgaagctggaaaccatcattttcagcaaactatcgcaaggacagaaaaaccaaacaccgcatgttctcactcataggtggggaactggaacaatgagaacacatgggacacaggaaggggaacatcacacattggggcctgttgtggtcaggggggagtggggagggatagcattaggagatatacttaatgttaaatgacgagttgatgggctcagcacaccaacatggcacatgtatacatatgtaactaacctgcacattgtgcacatgtaccctagaacttaaagtataat

SEQ ID NO: 11110 - DNA, 970 bp, Homo sapiens
  SIMILAR (87)..(356): 671254mologous to Plasmid F Protein D,accession number M12987,Smith-Waterman Score=240.
atgggcaaagacttcatgactaaaacaccaacaccaatggcaacaaaagccaaaattgacaaatgggatctaaataaactaaagagcttctgtacagcaaaagatactatcgtcagagtgaacaggcaacctatagaatgggagaaaatttttgcaatctatccatctgacaaacggctaatagccacaatctacaaggaacttaaacaaacttacaagaaaaaaataaacaacctcatcaaaaagcaaacagggtgtggagcagacctccagcaaactccagcagacctgcagcagacgggactgagtgttagaaagaaaactgataaacagaaaggaatagcatcaacatcaacaaaaaggacgtccacacagaaaccccatccaaagatcaccaacatgaagaccaaagaaatacaaactaccataaaagaatactatgaacacctctatacaaataaactagaaaacctagaaaaactagaaatggacaaattcttggaaacatgcaacctcccaagattgacccaggaagaaattgaatccctgaacagatcaataacaagttctgaaactgaatcagtaataaaaagcctaccaaccagaaaaggcccaggaccaggtggattcacagccaaattctaccagagggacatggatgaagctggaaaccatcattctcagcaaactaacacaagaacagaaaaaccaaacactgcatattctcactcataagtgggagttgaataatgagaacacatggacacagggaggggaatatcatactccagggcctgttagagtttgggggaatagaggagggatagcattaggagaaatacctaatgaatgcagctcctcaccagcaacagaccaaagctggatggagaatgactttgacgagttgaaagaagaaggcttcagacgattggtaataacaaacttctccgagctaaaggaggatgtttga

SEQ ID NO: 11111 - DNA, 1169 bp, Homo sapiens
  SIMILAR (2)..(358): 1001254mologous to Cloning vector pZC320 SopB,accession number U26464,Smith-Waterman Score=594.
ttttctactataaagacacatgcacacatatgtttattgtggcactgttcacaatagcaaagacttggaaccaacccaaatgcccatcagtgatagactggaaatgaagaacatgtggcacatatacaccatggaatactatgcagccataaaaaatgatgagttcatgtccttttcagggacatggatgaagctggaaaccatcattctcagcaaactaacacaggaaccagaaaaccaaacactgcatgttctcactcataagtgggagttgaacaatgagaacacatggacacagggaggggaatatcacacatcggggcctgctcgggggctggggagaaagcaataaaatcaacaaaaaggatgcccacgcaaaaaccccatccaaaggtcatcagcatcaaagatcaaaggtagataaatccataaatatgaggaaaaaccagcgcaaaaatactgaaaattccaaaaaccagaatgcttcttctcctccaaaggatcatgactcctcaccagcaagagaacaaaactggacagagaatgagtttgacgaactgatagaagtagacttcagaaggggggtaataatgaagtgctctgagctaaaggagcatgttttaacccaatggaaggaagctaagaaccttaaaaaaagaattggaaaaaactactttaaagttcatatggaaccaaaaagagcccacattgccaagaccatcctaagcaaaaagaacaaagctggaggcatcacactacctgacttcaaactatactacaagcctacagtaaccaaaacaacatgggacatggatgaagctggaaaccatcattctcagcaaactaacacaggaacagaaaaccaaacactgcatgttctcactcttaagtgggagttgaacaatgagaacacatggacacagggaggggaaggaacatcacacaccgaggccctgtccctgcaatcattcaaagaacagactccctcaactgtgcaatacaaacgaaagagaagtgacaggcactcagaggtcttggccaccaacatacgttcttgtgggacagtgccacaaaccttcaacccttacagccacaaggaactgtttgctgcctttggatttttcaggtccccaaatatgtctaaggtaaaagttggcactgaattctaa

SEQ ID NO: 11112 - DNA, 3368 bp, Homo sapiens
  SIMILAR (388)..(657): 961254mologous to unidentified cloning vector 29kD protein essential for the replication of mini F plasmid,accession number AB015619,Smith-Waterman Score=459.
atggagtgggtactgcttggatctccttctagaaaacctgttggagaagcatggttgactgcagatccaccatatttgtaccgaggccatctttctaccagtctagttacagccagcttccattgcaacttctacagaaagttcaggaaaataacgactttcaacattatagaatttcaagttagaagtgatcattttcaactgatgaatctcattgaggaagatgaggcatcaagaggtagaagactaactcagcaggtgactatggaaatggtgtcagacaaaaagcaaattcgagtgattttcttattcaatttaaaaatgggtcataaagcagcagagacaactcgcaatatcaacaacgcatttggccaaggaactgctaacaaatgtacagtgctcaagaagttttgcagaggagacgagagccttgaagatgaggagcatagtgaccagccatcagaagttaacaactgccaactgagagcaattattgaagctgatcctcttacaaccacacaagaagttgccaaagagcttgacgtcgaccattccagggtcgcttggcatttgaagcaaattggaaaggtgaaaaagctcaataactttctgaatcctggtgaaaccattatatctgaggactatgctcagcaaatctatgagatgcaccaaaaactgccacacctgcaactggcattggtcaatagaaagggcccaattcttctccatgacaacgcccaaccacacgtcgcacaaccaatgcttcaaaagttcaatgcattgggctaccaagttttggctcatccttcatattcacctgacctctcatcaacagactaccacttcttcaagcatctccacaactttttgcagagaataaaatacctaggaatccaacttacaatggatgtgaaggacctcttcaagaagaactacaaaccactgctcaatgaaataaaaggggacacaaacaaacggaagaacattccatgctcatggataggaataatcaatatcatgaaaatggccatactgccagaggtaatttatagattcaatgccatccccatcaagctaccaatgactttcttcacagaattggaaaaaactactttaaagttcatatggaaccaaaaaagagctcgcattgctgagtcaatcctaagccaaaagaacaaagctggaggcatcacactacctgacttcaaactatactacaagactacagtaaccaaaacagcatggtactggtaccaaaacagagatatcgaccaatggaacagaacagagccctcagaaataataccacacatctacaactatctgatctttgacaaacctgacaaaaacaagaaatggggaaaggataccctatttaacaaatggtgctgggaaaactggctagccatatgtagaaagctgaaactggatcccttccttacaccttatacaaaaattaattcaagatggattaaagacttaaatatgagacctaaaaccataaaaaccccagaagaagacctaggcattaccattcaggacataggcatgggcaaggacttcatgtctaaaacaccaaaagcaatggcaacaaaagccaaaattgacaaatgggatctaattaaactaaagagcttctgcacagcaaagggaactaccatcagagtgaacaggcaacctacagaatgggagaaaatttttgcagtctactcatctgataaagtgctaatatccagaatctacaaagaactcatacaaatttacaagaaaaaaacaaacaaccccagtaaaaagtgggtgaaggatatgaacagacacttctcaaaagaagacatttatgcagccaacagacacaggaaaaaatgctcaccatcactggccatcagagaaatgcaaatcaaaaccacaatgagatatcatctcacaccagttagaatagcgaccattaaaaagtcaggaaacaacagagacatggatgaagctggaaaccatcattctcagcaaactatcgcaaagacagaaaaccaaacaccgcatgttctcactcataggtgggaattgaacaatgagaacacttggacacaggaaggggaacatcacacaccagggcctgtcatgggaattagaaaaagctattttgaaattcatatggatccaaaaaagagcccaaatagccaatataatcctatgcaaaatgagcaaaactggaggaatcatgctacccaacttcaaactatgccacagggctacagtaaccaaaacagcatggtagtggtacaagaacagacacatagaccagtggaacagaacagagtacccaggattaagcccacacacatacaaccatctgatcatctaaaaacctgagaaaaacaagcaatggggaaaggattccctatttaataaatggtgctgggaaaactggctagccatatgtagaaagctgaaactggatcccttccttacatcttatacaaaaattaattcaagatggattaaagacttaaacgttagacctaaaaccataaaagccctagaagaaaacctaggcattaccattcaggacataggcatgggcaaggacttcatgtctaaaacacaaaaagcaatggtaacaaaagccaaaattgacaaatgggatctaattaaactaaagagcttctgcacagcgaaaaaaactaccgtcagagtgaacaggcaacctacaaaatgggagaaaattttcgcaacttactcatctgacaaagggctaatatccagaatctacaatgaactcaaacaaatttacaagaaaaaaacaaacaaccccatcaaaaagtgggcaaaggatatgagcggacacttctcaaaagaagacatttatgcagccaaaagacacatgaaaaaatgctcatcatcactggccatcagagaaatgcgaatcaaaaccacaatgagataccatctcacaccagttagaatggcaatcactaaaaagtcaggaaacaacagggacatggttgaagctggaaaccatcattctctgcaaactgtcacaaggacagaaaaccaaacaccgcatgttctcactcatagatgggaactgaacaatgagaacacttggacacagggcagggaacatcacacaccagggcctgttggggggtggtggactgggggagagatagcattaggagaaatacctaatgtaaatgatgagttgatggatgcagcaaaccaacagggcacatctatacctattctctctccgctgcagccccctgtgccattctccaggccccacgtacctctgcctgggcccagtaagacctggtcagatggcccccggctgcaaagccttcctgggccccatcagagaggacgcccag

SEQ ID NO: 11113 - DNA, 754 bp, Homo sapiens
  SIMILAR (171)..(752): 971254mologous to Mus musculus Tera,accession number U64033,Smith-Waterman Score=1022.
gaatctacaccttcccggccagcggtagcaactgcagaactggaggagactatctttctagacaaggcagttgaggaggagggagcgcttgagggggactggcctggcgtgcactccgcacctcggggacattattgcgcgtggaacggctgcttttggaagactattgcccagaagaaaagatgtttggttttcacaagccaaagatgtaccgaagtatagagggctgctgtatttgcagagctaagtcctccagttctcgattcactgacagtaaacgctatgaaaaggacttccagagctgttttggattgcatgagactcgttcaggagacatctgcaatgcctgtgtcctgcttgtgaaaagatggaagaagttgccagcaggatcaaaaaaaaactggaatcatgtggtagatgcaagggctggacccagtctaaagactacattgaaaccaaagaaagtgaaaactctatctgggaacaggataaaaagcaaccagatcagtaaactgcagaaggaatttaaacgtcataattctgatgctcacagtaccacctcaagtgcctccccagctcaatctccttgttacagtaaccagtcagatgacggctcaaatacagagatggcttctggttctaacagaacaccagttttttcctttttagatctcacttactggaaaagacagaagatatgttgtgggatcatctataaaggccgttttggggaagtcctcattgacacacatct

SEQ ID NO: 11114 - DNA, 1248 bp, Homo sapiens
  SIMILAR (1267)..(1611): 971254mologous to Plasmid F Protein D,accession number M12987,Smith-Waterman Score=560.
atggaatactatgcagccataaaaaaggatgagttcatgtcctttgcagggacatggatgaagctggaaaccatcattctcagcaaactatcacaaggacagaaaaccaaacatcgcatgttctcactcatagcccctggcagccatcattctgcattctgcctttatgaatttgactcctctagggatttcctggattttgccgatttcggaaccaccatcaaacaggattttcgcctgctggggcaaaccagcgtggaccgcttgctgcaactctctcagggccaggcggtgaagggcaatcagctgttgcccgtctcactggtgaaaagaaaaaccaccctggcgcccaatacgcaaaccgcctctccccgcgcgttggccgattcattaatgcagctggcacgacaggtttcccgactggaaagcgggcaggattttgccgatttcggaaccaccatcaaacaggattttcgcctgctggggcaaaccagcgtggaccgcttgctgcaactctctcagggccaggcggtgaagggcaatcagctgttgcccgtctcactgcagcaaaacgaaaaataccaagtgcctcaattcgatcaatcaacgattaaaaatattgagtctgcaaaaggacttgatgtgtgggacagctggccgctgcaaaacgctgacggaacagtagctgaatacaacggctatcacgttgtgtttgctcttgcgggaagcccgaaagacgctgatgacacatcaatctacatgttttatcaaaaggtcggcgacaactcaatcgacagctggaaaaacgcgggccgtgtctttaaagacagcgataagttcgacgccaacgatccgatcctgaaagatcagacgcaagaatggtccggttctgcaacctttacatctgacggaaaaatccgtttattctacactgactattccgggaaacattacggcaaacaaagcctgacaacagcgcaggtaaatgtgtcaaaatctgatgacacactcaaaatcaacggagtggaagatcacaaaacgatttttgacggagacggaaaaacatatcagaacgttcagcagtttatcgatgaaggcaattatacatccggcgacaaccatacgctgagagaccctcactacgttgaagacaaaggccataaataccttgtattcgaagccaacacgggaacagaaaacggataccaaggcgaagaatctttatttaacaaagcgggggtcctttag

SEQ ID NO: 11115 - DNA, 8445 bp, Homo sapiens
  SIMILAR (8)..(739): 1001254mologous to Cloning vector pSacBII SacB,accession number U09128,Smith-Waterman Score=1296.
atggaatactatgcagccataaaaaatgatgacttcatgtcctttgtagggacatggatgaagctggaaaccatcattctcagcaaactatcgtcttcgctgaaacatgggcactcgtgggaagtgctttctgttccccaggctcagttattttcatatcttcagctgctgctattacattcccatctcttggaaggagccagagccagagaaatacagggttcctctgtggccaagggaaaaatgcctgccaagaatgctgaacttctggtgaagaaccagatgatttcttggattggccagattaattccaggcccaaggagcaaaagaatcctaaaacagagacagaggctgtgagaagcgaaaggcgctgtggatgttgctgccctagcgtttggaagcccgaacattcacatgacttgcttcaatctcatagagagccagcagctgagctgtgggtccaagtgtcaggacacctcgcccatatctctgtgtgcgaaaggatgtgcatgatgtggtcccaatcctcaggcccagtgctacttctctattcatgccgagagcagcaggccagggaggccagaaagcaggtgggacagagaaatcttcaggcccatgaaaagatgatgtgtagagattacagccaccaaatggcttcagaattattcactgagtgcaatagacctgtcgaaaagggtgtccacatttgtcaaaaaggaacactttccagttccaaaattagaggtgaaacctgttgtacccagctctgccgaacattccacactcctcagtggaggaaggagttggctccatctaggcgaggtctgaggatctggaaggtgctcagctcccatagctattggcacgtttatttacatgcagatctaacacctacagaggacttaagttcacagaggcatgaggtggagagtaacaaagcatctgctattcaacaagaagagctaactatcctaaatatatatgcacccaatacaggaggacccagattcataaagcaagtcctgagtgacctacaaggagacgtagactcccacacaataataatgggagactttaacaccccactgtcaacattagacagatcaacaagacagaaagttaacaaggatacccaggaattgaactcagctctgcaccaagcagacctaatagacatctacagaactctccaccccaaatcaaaagaatttacatttttttcagcaccacaccacacctattccaaaattgaccacatacttggaagtaaagctctcctcagcaaatgtaaaagaacagaaattataacaaactgtctctcagaccacagtgcaatcaaactagaactcaggattaagaaactcactcaaaactgctcaactacatggaaactgaacaacctgctcctgaatgactactgggtacataacgaaatgaaagcagaaataaagatgttctttgaaaccaacgagaacaaagacacaacataccagaatctctgggacacattcaaagcagtgtgtagagggaaatttatagcactaaatgcccacaagagaaagcaggaaagatccaaaattgacaccctaacatcacaattaaaagaactagaaaagcaagagcaaacacattcaaaagctagcagaaggcaagaaataactaaaatcagagcagaactgaaggaaataaagacaaaaaaaaaaaccctccaaaaaattaatgaatccaggagctggttttttgaaaggatcaacaaaattgatagaccgctagcaagactaataaacaagaaaagagagaagcatcaaatagacgcaataaaaaatgataaaggggatatcaccaccgatcccacagaaatacaaactaccatcagagaatactacaaacacctctacgccaataaactagaaaatctaggagaaatggataaattcctcgacacatacaccctcccaagactaaaccaggaagaagttgaatctctgaatagaccaataacaggctctgaaattgtggcaataatcaatagtttaccaacaaaaaagagtccaggaccagatggattcacagccgaattctaccagaggtacaaagaggagctggtaccattccttctgaaactattccagtcaatagaaaaagagggaatcctccctaactcattttatgaggccagcatcatcctgataccaaagcctggcagaggcacaacaaaaaaagagaattttagaccaatatccctgatgaacatcgatgcaaaaatcctcaataaaatactggcaaaccgaatccagcagcacatcaaaaagcttatccaccaagatcaagttggcttcatctctgcgatgcaaggctggttcaacatacacaaatcaataaacatagtccagcatataaacagaaccaatgacaaaaaccacatgattatctcaatagatgcagaaaaggcctttgacaaaattcaacaacgcttcatgctaaaaactctcaataaattaggtattgatgggacgtatctcaaaataataagagctatctatgacaaatccacagccaatattgtactgaatgggcaaaaactggaagcattccctttgaaaactggcacaagacagggatgccctctctcaccacttctattcaacatagtgttggaagttctggccagggcaatcaggcaggagaaggaaataaagggtattcaattacgaaaagaggaaatcaaattgtccctgtttgcagatgacatgattgtacatctagaaaaccccattgtctcagcccaaaatctccttaagctgatagacaatttcagcaaagtctcaggatacaaaatcaatgtgcaaaaatcacaagcattcttatacaccaataacagacaaacagagagccaaatcatgagtgaactcccattcacaattgcttcagagagaataaaatacctaggaatacaacttacaagggacgtgaaggacctcttcaaggagaactacaaaccactgctcaatgacataaaagaggatacaaacaaatggaagaacactccacgctcatgggtaggaagaatcaatatcatgaaaatggccatactgcccaaggtaatttatagattcaatgccatccccatcaagctaccaatgactttcttcacagaattggaaaaaactactttaaagttcatatggaaccaaaaaggagcccgcattgccaagtcaatcctaatttatagattcaatgcccaagaattggaaaaaactactttaaagttcatatggaaccaaaaaggagcccgcattgccaagtcaatcctaagccaaaagaacaaagctggaggcatcacgctacctgacttcaaactatactacaaggctacagtaatcaaaacagcatggtactggtaccaaaacagagatatagaccaatggaacagaacagagccctcagaaataatgccacatatctacaaccatctgatctttgacaaacctgacaaaaacaagaaatggggaaatgattccctatttaataaatggtgctgggaaaactggctagccatatgtagaaagctgaaactggatcccttccttataccttatacaaaaattaattcaagatggattaaagacttaaatgttagacctaaaaccataaaaaccctagaagaaaacctaggcaataccattcaggacatagccatgggcaaggactttatgtctaaaacaccaaaagcaatggcaacaaaagccaaaattgacaaatgggatctaattaatctaaagagcttctgcacagcaaaagaaaccaccatcagagtgaacaggcaacctatagaatgggagaaaatttttgcaatctactcatctgacaaagggcgaatatccagaatctacaatgaactcaaacaaatttacaagaaaaaaacaaacaaccccatcaaaaagtgggcaaaggatatgaacagacacttctcaaaagaagacatttatgcagccaaaagacacatgaaaaaatgctcatcatcactggccattagagaaatgcatatcaaaaccacaatgagacaccatctcacatcagttagaatggcgatcattaaaaagttaggaaacgactggtgctggaggggatgtggagaaaacaggaacacttttacactgttggtgggactgtaaactagttcaaccattgtggaagtcagtgtggtgattcctcagggatctagaactagaaataccatttgacccagccatcccattactgggtatatacccaaaggatttataaatcattctactataaagacatatgcaccaagtatgtgtacctgcggcactattcacacaatagcaaagacttggagccaacccaaatgtcccatccaatggatagactggattaagaaaaaaatgtagaacatatacaccatggaatactatgcagccataaaaaaaggatgagttcatgtcctttgcagggacatggatgaagctggaaaaccatcattctcagcaaactatcacaaggacaaaaaaccaaacaccgcatgcttctcactcataggtggggaattgaacaatggggaacacttggacacagggaaggggaacatcacacaatcacacactggggcctgttgggaggttgggggcaaggggagggacatggatgaaaccggaagccatcatcctcagcaaactaacacagcaaaagaaaaccaaacaccacatgttctcactcataagtgggagttaaacaatgagaacacgtggacacaaggaggggaacatcacaaactggggcctgtcgtggggtgggaggacgtgggagggatagcattaggagaaacacctaagggcactggcagagttctacttggtgctggccacactgagttccaatgcaaagtcccagaatggctgagctctccttcccccaagcatacagattctctctccgcaccatgtggccactgcctggagatgagggaagggtggtgttggcatttcaagactgtctttgctatcctcttcagtgcctctgtcagcgatatgaagttaaaaccagttgttgaaagtgatacactaacaattgagtctggaccacttgctagtgaagataaaccactttcgtgtggtacaaactctggaaaagaacaagaaataaatgagactctgcctatcacaactgtagctcagagttcagttctacttcatcctcaagaagcagcagccaggattagaatgtcagcaaggcagaaacagataatggaaatagaagagcagaagcaaaagcaattggaattacttgaacaaattgaacagcagaaattaagattagaaactgactgcttcagggctcagctggaagaagaaaaaagaaaaaaaactcaaccgactggggtaggatgcagaaaatctcatcactacataaatcatttgcattcttttagttctctgcctgttaaagttgagtcaggaaaaattcaagaacccttttcagccatgagcaaaagtacagtttccacaagccattctataatcagccaaatgcatgataggcctttgctgccgtcagagaatatcacagcccagcaaggtaatatgaaggccctccaagaacagttagacctacagaagaaagttcttcaggcaactcaggaagctcaggaacagttgcttttgtgcaaacagaaagaagtggaacagcaaacgggcctctcggtattccttcccttggtaactccagattcatctgctttattgccttctgccaaagcagatttggggagaatccaggaatcttcaccaaccaagaataatattgcagtttcctcagaccatcatgtgatctcacaacttcaggataagcgtttgagtctttcacagcctatcctatcacagcaaaataattttaaatttctccaagagcagttgaatattcagaaggatagccttcaggctaggcgagaagcccaggaagtattgtatgtacataaacagagtgaattggatagaagagtatgttccgaacaggctgagccctctttcccatttcaggtagctcagcatacatttacttcactaccatctgctgatacaaaatctggaaaaatacaggagcaacattcatctaagagcgagaaaggacttgtttcatgccaatctgacatccccatatctcaggatgggtctttgagtttcctacagcagttcctacctctacatgatagtttgaagttgctccaagaacagttgactaaacagagggatactcttcaggctaggcatgaagctcaggtggaattacttttacatagacaaagagatttgggggacagtaagtctgggctggtgagctcttcatcctcaccagtggttgttcagcattcagttgcttcacaagcttctgctaaagctgagcctaggagaattcaggagctttatttatctgagaaggagaatgtggatgaatctgagagattccaggaatgtatatcaatcaagagtgacagtaccattcccttaagccatcctaagatcccaagatgtcaggaaagacttttgagagtttcacaacatatgctacctctacaagataatttggaggaacaccaagcatggctagacactgagaaagaagcctttcatttcagccagaaaacccaagaaaatacatcttctgaacaaactggttcatcttcattcataccccagttggtacagctttcatttacttcgttagcttcagctgagtctggcacaatcctggaacctctttttacagagagtgaaagtaaaattttttcaagccaccttcagatcccacaattgcaggataggcttttgaggatatcgcaacttatccagcctcaacaagataatttgaaggcacttcaagaacagttagctacacagagagaagccatcattctagctagacaagaagctcgggaagaattacttttacatcagagtgaatgggagggaagaatatctcccgagcaggttgacacctcttccttacccctagtaccacagcattcattcgcctcattacctcttaatgaatctgaaagaaaccaagaaccatgttcaattaacagtgataatatagtatcctcaggtcactcagagataccaacattgcctgatgggctgttgggtttatcacatcttgttttacctcaacaagataatttgattgcacttgaagaacacttgcatgcacagacagatttccttccttctattgagaaaacccagaaagaattggttttgtcaaaaccatgtaaatttgaggaaaaggtatcttctgagcattttatccagtctcaccatggtgatttgcaggcacttcaacagcagttagatacacagaagaaagccattcgatctatacaggaagtccaagaagaattgcttttgcaaagattaagtgaattggagaaaagggtatcatctgaacaagtttgctcctcttcatttgtatcccagcaagataacttgggacttcagaaacagttggatctacaaagagaagttctgcattatagccagaaagcccaggaaaaattgcttgtacagagacaaacagcattgcagcagcagatacagaaacatgaagagactttgaaggatttctttaaagacagtcagataagtaagcccacagttgaaaatgatttaaaaacccagaagatggggcagctcagagactggtttcctaatacacaagacctagcaggaaatgatcaagaaaatattaggcatgcagataggaacaactctgatgataatcatttggcttcagaagatactagtgccaagcaaagtgggagacatgagacatcaatcaacacatgtacgataagcattggtttggttcggaaaagtttcctctttgtggcaaagctgaactctggacttagcaggcttccctatggtcagtgtgcatttagagtctgccgaagatcatgtactctccactatgtcaaaactgcccatattttgtacaagttaattgcagaggttacaaggggatttggccacctccttaactttttcccacagcacatggcaagcacaaccccccagctggattcagggcacaaaggaaaagattgggagggaagcagagggagatgtgacactgacaaaaaagaaggcaaggtggccacagaggcagagactagagtcacgcagctgcaagtcaaggaatgccagcagccaccagggctgaagcggcaaggaacgggttctcccctggagcctctggagggaggctggccctgccaacaccttgatctgcaacttctttccagcttccagaactgtgagagaagaagttctgttgttctaagccatcaacttgtggtaatttggtatagcagccataggaaaccctatgcaaacagtgaactaaataatgagcggtatttgtag

SEQ ID NO: 11116 - DNA, 440 bp, Homo sapiens
  SIMILAR (1)..(111): 861254mologous to Homo sapiens PRO1546,accession number AF116638,Smith-Waterman Score=156.
tttcgttgatccatgaaaaacagacagctgtgtcagtagaaaacttcattgcagaattgctgcctgacaaatggtttgacattggttgtttggtggttgaagatcctgtccatggcattcatctagaaacatttacacatttactgggatgtcccgtcggcagatgatctacagtgcagccagagcgatagcgggcatgtataaacagcgcctgccacccaggacagtgtgagaggagacctacctgggagactgagactttcccccacttttagcttgatgttaaagaagtggctgtaccttcctaaatcgaatagtctaaatgaatccagtagtttttatcattttcctgtagcctgcaatttttctttctctagaaaggcatcatgtcattccaggagacaaaaagaaacaaatcctttttatagtcataccatttc

SEQ ID NO: 11117 - DNA, 1896 bp, Homo sapiens
  SIMILAR (1)..(105): 911254mologous to Homo sapiens PRO1546,accession number AF116638,Smith-Waterman Score=161.
atggcgggcgcccctcccccagcctcgctgccgccttgcagtttgatctcagactgctgtgctagtaatcagcgagactctgtgggcgtaggaccctccgagccaggtgcgggatataatctcgtggtgtgccgttttttaagccggtccgaaaagcgcaatatttgggtgggagtgacccgattttccagggcctttgaagatgtcaaggtcttttggcgagtcacacttaacaaaacagtcgtcgtgctccagaaggatggggtaaacctgatggaggaacttcagtctgtgtcagggaccacaacctgtacaatgggtcaaacaaaatgctttatcagcattgaactcaaaccagaaaaggtaccacaggttgaagtgtatttttttgtggaactatatgaagctactgctggagcagcaataaacaacagtgccagattcgcacagattaaaatcttagaaagtgatgaatctcaaagccttgtgtatttttctgtgggttctcggctggcagtggctcacaagaaggccactttaatcagtctgcaggtggccagagattctgggacaggactaatgatgtctgttaactttagtacccaggtcttcctatcactgggctctaatttcactttgcaactggtgactgtgatgcttgtcggtggacgtttctatggaatgccaacaattcttcaggaagcaaaatctgctgtccttccagtctctgagaaagctgccaattctcaggtcggatttgaatccactgcttttcaactcatgaacatcactgctggcacaagccacgttatgatttctaggagaggcacatatggagctctctcggttgcctggaccactggatatgctcctgggttagaaattcctgaattcattgttgttggcaacatgaccccaacactggggagcctttcattttcccacggtgaacaaaggaaaggagttttcctgtggacgtttcctagccctggttggccagaggcctttgttcttcacctatcaggagtgcagagcagtgctcctggcggagctcaactccgtggatttttcaccattgctgatggagagagtgaagctagctttgatgttcatttgctaccagatgaggtacctgagatagaggaagattatgtgatccagcttgtttctgtagagggaggagccgaactggatctggagaagagtatcacatggttctctgtttatgcaaatgatgacccacatggagtatttgccctgtattcggatcgccagtcaatacttattgggcagaaccttattagatccatccaaattaacataacccggcttgctggaacatttggagatgtggctgttgggcttcgaatatcatcggatcataaagaacagccgattgttaccgaaaatgcagagaggcagctggtggtcaaagatggtgccacatataaagtggacgtggtgccaataaagaatcaggctgacagacaactcatacaggagagctctggctggcatctggcaggtgccccgctgggtcgaagcttccagaggaaagaacaggcagcaatctttgctgttctgcagcctctgctggtgatatccaggcaaacagggtctggagtggacctccagcaaactccagcagacctgcagcagagggacctgactgttagaaggaaaactaacagaaaggagcagcacatccactcagagacctcatccaaaggtcaccaacatcaaagaccaaaggtaggtaaatccacaaagagggggagaaaccagagcaaaaatgctgaaaattccaaaaaccagaacgctgcttctcctccaatggatcacaacttcttgctagcaagggaacaaaactggacagagaatgagtttgatgattga

SEQ ID NO: 11118 - DNA, 627 bp, Homo sapiens; identical to SEQ ID NO: 7588
  SIMILAR (1)..(87): 961254mologous to Homo sapiens Human secreted protein sequence encoded by gene 2 SEQ ID NO:250,accession number Y91577,Smith-Waterman Score=155.

SEQ ID NO: 11119 - DNA, 360 bp, Homo sapiens
  SIMILAR (1)..(87): 961254mologous to Homo sapiens Human secreted protein sequence encoded by gene 2 SEQ ID NO:250,accession number Y91577,Smith-Waterman Score=155.
atggcgggcgcccctcccccagcctcgctgccgccttgcagtttgatctcagactgctgtgctagcaatcagcgagattccgtgggcgtaggaccctctgagccaggtgtgggatatagtctcgtggtgcgccgtttcttaagccggtctgaaaagcgcaatattcgggtgggagtgacccgattttccagaaaacccaactctctcaccataaaagggtgtcgagagccacagggcattatcacagatgtcggtcaaccaacgcgattagagacagcgattggaagatgtgtgctgcagagccctgaagataaggcgatgggtcccagcgagccccaggaagtagtggccagcgtgtga

SEQ ID NO: 11120 - DNA, 1336 bp, Homo sapiens
  SIMILAR (843)..(16): 921254mologous to Homo sapiens putative p150,accession number U93563,Smith-Waterman Score=1385.
atggcgggcgcccctcccccagcctcgctgccaccttgcagtttgatctcagactgctgtgctagcaatcagcgagactccgtgggcgtaggaccctccgagccaggtgcgggatatagtctcctggtgtgccgttttttaagcccgtcggaaaagcgcagtattggggtggtagtgacccgattttccaggtgccgtctgtcacccctttctttgactaggaaagggaactccctgaccccttgcacttccccagtgaggcaatgccctcgccctgcttcggcttgcacacggcgttacccgtgacaaaaccactaaaggcggtgcttccggtaaagctggtcagccaccaaaaccaggtgctactaatactggtgcgggtgcttctgctgcaaaatctctgttcgaaataatgcagatacctgtgcttggagttgaccccagttttcgtaactggggactagcacggggaatgctcgacttagagacgggaatactctctggattagacctgaagctggtagaaaccaaacctgatggaaccaagcaagtaaggcagaacagcaaagatatgcaagctgctgaggacattactactggtgtcatcgactggttcaaagaagcaaaggtcatctttgtagaggttcccgttggctcacaaagtgccaatggaatgaaatcctatggtgtttgtgtaggcatcttaggagcactcagggcactaggacatgagattattgaagttactcctatcgagaacaaagtagctctgtccggtattaagactgcttctaaagatgtgatgattagagcagctacaggattttatccagaggccaactggctcaaggataccaaagaatttaatgagaattttatcaaaggtataacaatgcaagtaattctgactcaacctgaaatcgaagctgctctgactggttatgtaaacgacctgatgtctgtacgtgaaggcatggaaattaaagtaaccttcaaagctactcgtggtgatgatggtgctactgcaatcgtagatattgtccctgctggttcccaatctgttgaagtggttgaggaaccaaagaaagagtcaaaggaacgcaagcatcgtccagtaacccagaccaatactgctgctgtcagtgctctggcttctgctactggtaagaaaaaagaagaagtagttgaagtagaaactactactgaaactgttgatgaaactgttgaagtagctgaagaagctgctgctcaggaagaagaaaaagaagtacaggaagaagaggctaaagaaccagtacaagccaaaccttctctgtttgcaggtctgaaacgttaa

SEQ ID NO: 11121 - DNA, 871 bp, Homo sapiens
  SIMILAR (24)..(458): 861254mologous to Homo sapiens MIR-10,accession number AF004231,Smith-Waterman Score=636.
tgcttttataaacattcaaccaacatgttctttaataatctcttctttaaagaacaaaataatcaagtacatggcattaagttaaatgtctctgcacatgaatttccaccttataaatctggtatattaaattgtgctgtaaatagatttgtatattttcttttttgagtactatgataggtgaaatggtatgactataaaaaggatttgtttctttttgtctcctggaatgacatgatgcctttctagagaaagaaaaattgcaaggctaacaggaaaatgaataaaaactaactgggattcaatttaagactattcggattttaggaaggtacaaccacttctttaacatcaagctaaaagtgggggaaagtctcagtctccccaggtaggtctcctctcacactgtcctggggtggcaggcgctgtttatgcgtgcccgctatcggctgtgagggcgctgtaggatcatctgccgacgggacatcccaggtaaatgcccatgtgcccaatcagtccggctgacattcagtaaacttcttttccaaggacttcacccactggtcaccaaaagggccttgaccacctccagattataagtcctgggggaagttagacttttgagcctggctgtacaaatttccaaagggcaccggtgtggcttgtgtaaatgtttctagatgaatgccatgggacaggatcttcaaccaccaaacaaccaatgtcaaaccattttgtcaggcagcaattctgcaatgaagttttctactgacacagctgtctgtttttcatggatcaccccagttcgacgcaagctatctatccgttcctgagcaccttttaatccagctgcatagccactggttgtggg

SEQ ID NO: 11122 - DNA, 2129 bp, Homo sapiens
  SIMILAR (67)..(1713): 1001254mologous to Homo sapiens leucocyte immunoglobulin-like receptor-8; LIR-8,accession number AF025534,Smith-Waterman Score= 2919.
gagctttgggaagagcccagatcactgatggaattggacagtgcgtggaaatggttcagcaggacgaggaccgttacctggtacgctggctgctacctccctcactcttgtcagagtcggagctacaggcagtgccttcagctctgagctcaggcatcccggtccctgtttttgcggttaaggactctaaagtgttgtgtcgtgttcatcaactttttctcaacttccctggctctacctcttctgccacaaacgtcagcatggtggtatctgccgaccctttgtccagcgagagggcagagatgaacatcctagaaatcaaccaggaattgcgctcgcagctggcagagagcaatcagcagttccgagacctcaaagagaaattccttataactcaagctactgcctactccctggccaaccagctgaagaaatacaagtgtgaagagtacaaagacatcatagactctgtgctgagggatgaactgcagtccatggagaagctggcagagaagctcaggcaagctgaggagctcaggcagtataaagccctggttcactctcaggcaaaagagctgacccagttacgggagaagttacgggaagggagagatgcctcccgctggctgaacaagcatctgaaaaccctcctcactcctgatgaccctgacaagtcccagggtcaggacctccgagagcagctggctgaggggcacaggctggcagagcaccttgttcacaagctgagcccagtgggtgaaatgggaaatatttcaatggacacatctgtatttgcagaaaatgatgaagatgaagatgaggatgaagacgacaaagacgaggaggttgagaaagtacaggaatcacctgcccccagagaggtgcagaagactgaagaaaaggaagtccctcaggactcactggaggaatgtgctgtcacttgttcaaatagtcacaacccttctaactccaaccagcctcacaggagcaccaaaatcacatttaaggaacacgaagtcgactctgctctggttgtagagagtgaacaccctcatgatgaagaggaggaagctctaaacattcccccagaaaatcaaaatgaccatgaggaggaggaggggaaagcgccagtgccccccagacaccatgacaagtccaactcttaccggcatcgtgaagtctctttcttggcattggatgaacagaaagtttgctccgctcaggatgttgccagggattactccaatcccaaatgggatgaaacctcacttggcttcctcgaaaagcaaagtgatcttgaagaggtgaaaggacaagaaacagttgctcccaggctcagccaggagctgccagaggtgaaggagcaggaagtcccagaggactctgtgaatgaagtttacttgactccctcagttcaccatgacgtgtctgactgccaccagccttatagcagcaccttgtcctcattggaggatcagcttgcctgctctgctctggatgtagcctcccccaccgaggcggcctgtccccaagggacttggagtggagacttgagccaccaccagtcagaggtgcaagtttcacaggcacagctggaaccaagcaccctggtgcccagttgtctgcgactacagctggatcaagggttccactgtgggaacggcttggcccagcggggcctttcctccaccacctgcagcttctcagccaatgctgattctgggaaccaatggcccttccaagagctggttttagagccctctctggggatgaagaaccctccccagctggaagatgatgcacttgaaggctcagcaagcaacacacaagggcgtcaagtcactggccggattcgtgcctcccttgtcctgatactgaagaccatcagaagaagactcccgttcagcaagtggagactggcattcagattcgctggcccgcatgctgagagcgcagagggagaccaatgcccagatggacaaatagcattgaccggcgttagccctgtttctcaattcccatcgtgtagagaacaggagtccgcagctgctggcaggagacagcatgtcagccgggactctgccagggcagagtatgagcaatgccatgttcttgctgaaaacgcttag

SEQ ID NO: 11123 - DNA, 678 bp, Homo sapiens
  SIMILAR (247)..(483): 941254mologous to Homo sapiens dJ470L14.3 (A novel protein similar to the Arp2/3 protein complex subunit p21-Arc (ARC21)n),accession number AL133174,Smith-Waterman Score=418.
  misc_feature (1)...(678): n = a,t,c or g
tgaaatcataggaagtacattatcttattagtcactctcacaaacgattcttggcaacaaggatgacatgcagaaaatcttttgaacaaaaacaaatatagttataaaactatctggactgtcatttctattttgtatcctgttcaaatgtataaaaatgtattaccacagtgagcatccagagctgcaaccagtacatttgggatgtatttgcaaatacagttttttttaaattgttctgttttagaagtgatgagagcctatttacaacagctaaggcaagagactggactgagactttgtgagaaagttttcgaccctcagaatgataaacccagcaagtggtggacttgctttgtgaagagacagttcatgaacaagagtctttcaggacctggacagtgaagggagcccgggcagccaccgtctccagagccctgggcagcattttccagcaagatgtacacaatcttttgcctttatttcgtaaagttttatacagaagagagaagagcatgtctttacttgaaaaactcttgatcaagaatttgggtgggagaaaagaaagtgggttatcaagggtgatttgaaattttctgcagcattaaagctggcgcttaataagaataagtaataataagantttctacatcaaaaanaaaaaaaaaagnggcgcag

SEQ ID NO: 11124 - DNA, 931 bp, Homo sapiens
  SIMILAR (64)..(735): 431254mologous to Homo sapiens dJ470L14.3 (A novel protein similar to the Arp2/3 protein complex subunit p21-Arc (ARC21)n),accession number AL133174,Smith-Waterman Score=300.
accggaagcgctccgctgtacctggatcctgctcctctggggtgaaacccgggcgccgtcaagatgccggcttaccactcttctatcatggatcctgataccaaactcatcggaaacatgggcacctgttgcctatcagaagtcaattcaaaggacctgcccccagagagacacaaggataccagatattgtggatgaggccatctttttaccttcagggcccaatgtcttctttcaaaaactatgaaattaagaatgaaagctgataggaccttgatatatataactctctacatttctgaatgtctgaagaaactgcaaaaagtgccaattcccaaaagcccaaggtggaggaaaggaaatgttttacgctggggaatccactaatttttcccatttcctgggagagcctggtttttcccactttaaccgccattttatgcccaaaccctgcaaacaaaccaggaagatgaaagtgatgagagccctatttaccaaccagcctaagggcaagagactgggactgagactttgtgagaaaagtttttcggaccctccagaatggataaaccccagcaaagtgggtggaccttgcctttgtgaagagacagtttcatgaacaagagtctttcaggaccctggacagttgaagggagcccggggcagcccaccgtctccagaggccctggggcagcatttttccagcaagatgttacacaatctttttgcctttatctcgtaaagttttatagagacgagagaagagcatgtctttacttgaaaaactcttgatcaagaatttgggtgggagaacacagaaactgggttatcaagggtgatttgaaattttgtgcgagcattaaaactggcgcctccataagaataagtaataataaagaaatttctaacattccaaaaaaaaaaaaaaaaa

SEQ ID NO: 11125 - DNA, 831 bp, Homo sapiens
  SIMILAR (1)..(339): 761254mologous to Homo sapiens ribosomal protein L30,accession number X79238,Smith-Waterman Score=445.
atggtgcttgcaaagaagattaaaaagtcagtggaatggatcaactctaggcttctacttgttataaaaagtggaaagtacatactggcgtacaagcagactccaaagatgatcacgcaaggcaaagcaaaattggctatccacactgaaaactgtccagctttgaggaaatccaaaatagagtactataccatgttgaccaaaactggtgtccatcactacagtgacaataattttgaattgggcatagcatgtggtaaatactgcagagtatgcatgttgtctatcattgatccagacgattctgatatcgttagaagcgtgccagaacagacaggccaccaccttgaccattcaggcttctcagccagtccagcctgtgggccttggagagcccaaactgatcaggggctgaaaggttctccaacacagcacagctgctctaccaaaaagcagccagactgcttctttaagtgggtctgtgatcccgttcctcctaactggactttcgacgaaacaattcgaaagcccatcagtttgggttgtggccatactgtctgcaagatgtgcctgaataaactccaccgcaaggcttgcccatttgaccagaccactatcaatacagacattgagctcctccctgtgaactcagcattgctgcagctcgtgggtgctcaagctctaaaaatcacaaagatactgacggaccttcacaaacacaacatgcctaaatttggctcctcaatcctgcatcataaattatcagtaacagaaaagcaaaaggatacattttcaaagcacaacatgggcaatgaacccctcttgacttaa

SEQ ID NO: 11126 - DNA, 528 bp, Homo sapiens
  SIMILAR (67)..(1500): 991254mologous to Homo sapiens leucocyte immunoglobulin-like receptor-3; LIR-3,accession number AF025533,Smith-Waterman Score= 2564.
tcccccttccgcactcttcgaaattggacagattcaaaagtgggtgaggaggagcaaggtgtcatatatgtaactttggggtcaggggccactggggtctttaccaattcatgctggctctggaacaagctcttcgaggccagcattgaaacaggggaccgtgtctggaggatgcctctcttcaaacattggacaagacaggttgtagattgccagctggctgatgttaacaacattggaaaatatagatctgcgggagcatgtacatctgcggcattcctgaaagaattcgtgactcatcctaagtgggcacatttagacatatcaagtgtgatgaccaacaaagatgagagccatgaggacatctttctcaaatcttcaccttgggagcaaggtgtggttactggaggaagaccccacaaaaatgtgcacccccttgtgaggcaggttcacattcactttgtagtggttgccaacttgtctgagtgtggtgagactgaacacactcacatgcaacaagttacttga

SEQ ID NO: 11127 - DNA, 2142 bp, Homo sapiens
  SIMILAR (1273)..(1617): 821254mologous to Homo sapiens ribosomal protein L29,accession number U10248,Smith-Waterman Score=471.
ggctcttttaaatgaccccaggcgtcgtgtattgaatcctagactcacgtccgtctcgccggcgcccgagccagtccgcgcgcaccgcgtctgcgtccccgaaagccccgcccgcaagggctgccctgcctacctggtctccgacgtgctcgtctggagggcggtgcgaggggccgagccgacgagatgttcttgctgcctcttccggctgcggggcgagtagtcgtccgacgtctggccgtagtacgttctgggagccggagtctctccaccgcagacatgacgaagggccttgttttaggaatctattccaaagaaaaagaagatgatgtgccaccagttcacmagtgcaggagagaattttgataaatygttagctggaaagctgagagagactttgaacatwtctggaccacctctgaaggcagggaagactcgaaccttttatggtctgcatcaggacttccccagcgtggtgctagttggcctcggcaaaaaggcagctggaatcgacgaacaggaaaactggcatgaaggcaaagaaaacatcagagctgctgttgcagcggggtgcaggcagattcaagacctggagctctcgtctgtggaggtggatccctgtggagacgctcaggctgctgcggagggagcggtgcttggtctctatgaatacgatgacctaaagcaaaaaaagaagatggctgtgtcggcaaagctctatggaagtggggatcaggaggcctggcagaaaggagtcctgtttgcttctgggcagaacttggcacgccaattgatggagacgccagccaatgagatgacgccaaccagatttgccgaaattattgagaagaatctcaaaagtgctagtagtaaaaccgaggtccatatcagacccaagtcttggattgaggaacaggcaatgggatcattcctcagtgtggccaaaggatctgacgagcccccagtcttcttggaaattcactacaaaggcagccccaatgcaaacgaaccacccctggtgtttgttgggaaaggaattacctttgacagtggtggtatctccatcaaggcttctgcaaatatggacctcatgagggctgacatgggaggagctgcaactatatgctcagccatcgtgtctgctgcaaagttaaatttgcccattaatattataggtctggcccctctttgtgaaaatatgcccagcggcaaggccaacaagccgggggatgttgttagagccaaaaacgggaagaccatccaggttgataacactgatgcctgaggggaggctcatactggctgatgcgctctgttacgcacacacgtttaacccgaaggtcatcctcaatgccgccaccttaacaggtgccatggatgtagctttgggatcaggtgccactggggtctttaccaattcatcctggctctggaacaaactcttcgaggccagcattgaaacaggggaccgtgtctggaggatgcctctcttcgaacattatacaagacaggttgtagattgccagcttgctgatcgttaacaacattggaaaatacagatctgcaggagcatgtacagctgcagcattcctgaaagaattcgtaactcatcctaagtgggcacatttagacatagcaggcgtgatgaccaacaaagatgaagttccccaatctacgggaaaggcatgactggggaggcccacaaggactctcattggagttcttgacttcgtttcagtcaagacaattgcttagttcagatactcaaaaatgtctttcactctgtcttaaattggacagttgaacttaaaaaggtttttgaataaatggatgaaaatcttttaacggagacaaaggatggtatttaaaaatgtagaacacaatgaaatttgtatgccttgattttttttttcatttcacacaaagatttataaaggtaaagttaatatcttacctggataagggatttttaaagatactctataaatgattaaaatttttagaacttcctaatcacttttcagagtatatggttttccattgagaagcaaaattgtaactcagatttgtgatgctaggaacatgagcaaactgaaaattactatgcacttgtcagaaacaataaatgcaacttgttgtgca

SEQ ID NO: 11128 - DNA, 276 bp, Homo sapiens
  SIMILAR (169)..(273): 1001254mologous to Homo sapiens pregnancy-associated plasma protein-A preproform,accession number U28727,Smith-Waterman Score= 201.
atggaagctgtctgtgattcaccctacatgaaaaacacagacaccagctgttccccacatccgccttatggggtgacctgggcccggctggcagacaagagcaagacggtgcaggaaactctgtctgacaggggtgtccaatttcccacccagacacctgcctgcagtgtcaccccattccctatgtcctgtgatctacaaggtgactgtgcttgtcgggacccccaggcccaagaacacagccggaaagacctccggggatacagccatggctaa

SEQ ID NO: 11129 - DNA, 8581 bp, Homo sapiens
  SIMILAR (96)..(542): 531254mologous to Sus scrofa ribosomal protein L29/cell surface heparin binding protein HIP,accession number AB016798,Smith -Waterman Score=371.
ctgtccaggttgagtgagggtgtccaggatgaggaatgagggtgtccagggtgaggagtgagggagtccagggtgaggagtgagggagtccagggtgaggattgagggtgtcagggtgagtgagagtgtccagggtgaggagtgagggtatccagggtgagtgagggtgtccagggtgaggagtgagggtatccagggtgagtgagggtgtccagggtgagtgagggtgtcagggtgagtgaacgtgtccagggtgtgtgagggtgtccagggtgcagagtgaggtgtccagggtgaggagtgacggtgtctggggtgagtgagggtgtccagggtgaggagtgagggtgtcagggtgagtgagggtgtccagggttgagtgcacatgtgtggtgaggaggtgtttgcagtgcttcaggcgcagcaactctttcatctagtttaaaattgtgctctgaggttagattttagtagaacaaaggccttacaaagaatgtgaaaacattgtgcttccctgcttacaggcaattaaaaaggagaatcaagctgagggtgcctggtgtggggtggggtggagaagaccacagagactattgtgtgttttattcaacagtgtcctgggctgctttctccagaaatgtccctgacacatggatgtaagtgtggctagtttactgggagatgatcccagtgatgcaggacacgcgagccctaagattgaagcatagcccgggagggttcttagctttgcccaggaaggaactcaaggcaagccagtggtgttagcaacttttattgaagcggccggctgtgcacagcagcagcagaggcgctgctccttgcaaagcagggctgccctacaggctgtgcgcccacagtagcagctcagaggcagttctgcagtggtatttgtatccacttttaattatatgcaaatgaaggggcagtttatgcagacatttccagggtgagggtggtaacttctgggtgctgccagagccatcgtgaactgacttgacacaggtcggtgtgtcctatggaaactagcatctgccctggacctattttagctagtgctcagtttggtctgagtgcctgagccccacttccagagttgagtcccacctcctacctcattcccccttcagagattagatactcctccttaatcttaagggggcctcgagaagggcggagtcctgcttttccgtaactacttcctgctgagtttatggcacgtaggccctgcctggcactggaggacgtaaaaatttctggatacctgatctaaggagcccagaggcaggacgatttcattctccgtgtcagtggacaggatgggctggaagccttgtgccagcattgtctctggaactgtggtaatctagaatacacaaactttactaagaggttaaagaagcaaggaccaaacatttgtaacaagacagttgtcaaaggtcctagaagaggtgaaaaacaggtgagacttgggaaggcacttttgatggttgaccagatatagttggggcagtgccctggttatatctatgtaactaggtagcttgctcatagatcttttgaatgttaacctcaacctgtccagagttaatatatgtgcagcaggttttattaataactgcacaagaccccaccttgttcagctagtaaataatccaatgctagtctgttatcaacaactacattttccagagtctggggaactcttgaattctctttaatgcctgatctccgttggtggctaaggattctaggatttgagccaagttctttagcgttaactcatggtaggcaaagcaccccagggtgctgctagtcctattgccaccctgattcctgccagaaataagtaagcaagcaacaggacaatgaactccatgttgcccagatcccactgagagtgaacgtgcagtcatgcccataaccgacacacatcccagtccatgtgggtcagtccttcatcaccctccctgccttctgacaacagcagactccagccattccattatcattcacagcccaacccaagcagtcagtggctgaagaaagagaatcaggtatactctatgtccacatataccttcctgccacagggcttcaccaactggcaggattccccccagcccccaactcctcctcatcccttgttcccaggcgggtcaattggagagtgagcagagatagatggcttgcagaagggtatgcaagatggggagactccaccagaccttagggagagaatggcatctttctccaccttttaagagagacagagcctccctgaggtctcaaagatttttcagggcaacacaagaaacgtttccaagcctcagctgcaggtgttcacctttccactctggggtgtgaggagatggtaagctgaggacaagtgtgttccagatgcaggccaactctgttctccaacagtttgaaccaacttggccttggggttccaagggtaggatgaagggtgtcacggcaggacggggcctggcgtgaggcaacagcaagcagagcgaggacacaacagtggcagcagtgtacagacacaggacgtcagcttcaaacgatgcaacagcagggatatcttgggcacggctctgattcgagccactcccaactctcttgcctccaggatggaggcactgtacatgcaacagtccagagaaagattctagccagtccaagcccaggcacatccagagaaggtgggagctcttcgggttgactccaccgaggaaaacaggcatttgggtatttcagattcccgctccacaataaggcaacttttaaaaaaatattatttccaaaaacaaaacaaaaattccagggggagggaattcagcggatcagtcttaagaggagcttttttttggagcgagaaatcatataaaataaaatgaaataaaacaaggaggaaggcaaccagctgttagggggaaaataaggcagataaaggagcggggagagaaattaattgccaaccaggaggagttgggctgtatttttcaaaggtggggagagtggagcacacaccttgaggaggaaagcgagaaagaaaagaaaaaagcaagtgaaggggggctcgcccaagaagggtgaagaagcgaagaaagtcgaggcgccgaggctcccaaagctggcagctccgggtggcggtgcaggggcgaaggggggggcggggggaacgtcggacatgcggctctggagttgggtgctgcacctggggctgctgagcgccgcgctgggctgcgggctggccgagcgtccccgccgggcccggagagacccgcgggccggccgacccccgcgccccgccgccggcccggccacctgcgccacccgcggcccgcggccgccgcgcctcgccgccgccgccgccgccgccgggcgtgcctgggaagccgtgcgcgtcccccggcggcggcagcagcgggaggcgaggggcgccaccgaggagccgagcccgccgagccgggcgctctatttcagcgggcgaggcgagcagctgcgagtcctccgggccgacctcgagctgccccgggacgcgttcacgctgcaagtgtggctgcgagcggaggggggccagaggtctccggcagtgatcacagggctgtatgacaaatgttcttatatctcacgtgaccgaggatgggtcgtgggcattcacaccatcagtgaccaagacaacaaagacccacgctactttttctccttgaagacagaccgagcccggcaagtgaccaccatcaatgcccaccgcagctacctcccaggccagtgggtatacctagctgccacctatgatgggcagttcatgaagctctatgtgaatggtgcccaggtggccacctctggggaacaagtgggtggcatattcagcccactgacccagaagtgcaaagtgctcatgttagggggcagtgccctgaatcacaactaccggggctacatcgagcacttcagtctgtggaaggtggccaggactcagcgggagatactgtctgacatggaaacccatggcgcccacactgctctacctcagctcctcctccaggagaactgggacaatgtgaagcatgcctggtcccccatgaaggatggcagcagccccaaagtggaattcagcaatgcccacggctttctgctggacacgagtctggagcctcctctgtgcggacagacattgtgtgacaacacagaggtcattgccagctacaatcagctctcaagtttccgccagcccaaggtggtgcgctaccgcgtggtcaacctctatgaagatgatcataagaacccgacggtgacgcgcgagcaggtggacttccagcaccatcagctggctgaggccttcaagcaatacaacatctcctgggagctggacgtgctggaggtgagcaactcctcccttcgccgccgcctcatcctggccaactgtgacatcagcaagattggggatgagaactgtgaccccgagtgcaaccacacgctgacgggccacgacggcggggattgccgccacctgcgccaccctgccttcgtgaagaagcagcacaacggggtgtgtgacatggactgcaactatgaacggttcaactttgatggtggagagtgctgtgaccctgaaatcaccaatgtcactcagacttgctttgaccccgactctccacacagagcctacttggatgttaatgagctgaagaacattcttaaattggatggatcaacacatctcaatattttctttgcaaaatcctcagaggaggagttggcaggagtagcaacttggccatgggacaaggaggccctgatgcacttaggtggcattgtcttgaacccatctttctatggcatgcctgggcacacccacaccatgatccatgagattggtcacagcctgggcctctatcacgtcttccgaggcatctcagaaatccagtcctgcagtgacccctgcatggagacagagccctccttcgagactggagacctctgcaatgataccaacccagcccctaaacacaagtcctgtggtgacccagggccaggaaatgacacctgtggctttcatagcttcttcaacactccttacaacaacttcatgagctatgcagatgacgactgtacggactccttcacgcccaatcaagtcgccagaatgcactgttacctggacctggtctaccagggctggcagccctccaggaaaccagcgcctgttgccctcgccccccaagttctgggccacacaacggactctgtgacactggagtggttcccacctatagatggccatttctttgaaagagaattgggatcagcatgtcatctttgcctggaagggagaatcctggtgcagtatgcttccaacgcttcctccccaatgccctgcagcccatcaggacactggagccctcgtgaagcagaaggtcatcctgatgttgaacagccctgtaagtccagtgtccgcacctggagcccaaattcagctgtcaacccacacacggttcctccagcctgccctgagcctcaaggctgctacctcgagctggagttcctctaccccttggtccctgagtctctgaccatttgggtgacctttgtctccactgactgggactctagtggagctgtcaatgacatcaaactgttggctgtcagtgggaagaacatctccctgggtcctcagaatgtcttctgtgatgtcccactgaccatcagactctgggacgtgggcgaggaggtgtatggcatccaaatctacacgctggatgagcacctggagatcgatgctgccatgttgacctccactgcagacaccccactctgtctacagtgtaagcccctgaagtataaggtggtccgggaccctcctctccagatggatgtggcctccatcctacatctcaataggaaattcgtagacatggatctaaatcttggcagtgtgtaccagtattgggtcataactatttcaggaactgaagagagtgagccatcacctgctgtcacatacatccatggacgtgggtactgtggcgatggcattatacaaaaagaccaaggtgaacaatgcgacgacatgaataagatcaatggtgatggctgctcccttttctgccgacaagaagtctccttcaattgtattgatgaacccagccggtgctatttccatgatggtgatggggtatgtgaggagtttgaacaaaaaaccagcattaaggactgtggtgtctacacgccccagggattcctggatcagtgggcatccaatgcttcagtatctcatcaagaccagcaatgcccaggctgggtcatcatcggacagccagcagcatcccaggtgtgtcgaaccaaggtgatagatctcagtgaaggcatttcccagcatgcctggtacccttgcaccatcagctacccatattcccagctggctcagaccactttttggctccgggcgtatttttctcaaccaatggttgccgcagctgtcattgtccacctggtgacggatgggacatattatggggaccaaaagcaggagaccatcagcgtgcagctgcttgataccaaagatcagagccacgatctaggcctccatgtcctgagctgcaggaacaatcccctgattatccctgtggtccatgacctcagccagcccttctaccacagccaggcggtacgtgtgagcttcagttcgcccctggtcgccatctcgggggtggccctccgttccttcgacaactttgaccccgtcaccctgagcagctgccagagaggggagacctacagccctgccgagcagagctgcgtgcacttcgcatgtgagaaaactgactgtccagagctggctgtggagaatgcttctctcaattgctccagcagcgaccgctaccacggtgcccagtgtactgtgagctgccggacaggctacgtgctccagatacggcgggatgatgagctgatcaagagccagacgggacccagcgtcacagtgacctgtacagagggcaagtggaataagcaggtggcctgtgagccagtcgactgcagcatcccagatcaccatcaagtctatgctgcctccttctcctgccctgagggcaccacctttggcagtcaatgttccttccagtgccgtcaccctgcacaattgaaaggcaacaacagcctcctgacctgcatggaggatgggctgtggtccttcccagaggccctgtgtgagctcatgtgcctcgctccaccccctgtgcccaatgcagacctccagaccgcccggtgccgagagaataagcacaaggtgggctccttctgcaaatacaaatgcaagcctggataccatgtgcctggatcctctcggaagtcaaagaaacgggccttcaagactcagtgtacccaggatggcagctggcaggagggagcttgtgttcctgtgacctgtgacccacctccaccaaaattccatgggctctaccagtgtactaatggcttccagttcaacagtgagtgtaggatcaagtgtgaagacagtgatgcctcccagggacttgggagcaatgtcattcattgccggaaagatggcacctggaacggctccttccatgtctgccaggagatgcaaggccagtgctcggttccaaacgagctcaacagcaacctcaaactgcagtgccctgatggctatgccatagggtcggagtgtgccacctcgtgcctggaccacaacagcgagtccatcatcctgccaatgaacgtgaccgtgcgtgacatcccccactggctgaaccccacacgggtagagagagttgtctgcactgctggtctcaagtggtatcctcaccctgctctgattcactgtgtcaaaggctgtgagcccttcatgggagacaattattgtgatgccatcaacaaccgagccttttgcaactatgacggtggggattgctgcacctccacagtgaagaccaaaaaggtcaccccattccctatgtcctgtgacctacaaggtgactgtgcttgtcgggacccccagggcccaaggaacacagccgggaaagacctccgggggatacagccatgggttaagggaagggacaaggaagttgttcaaaggaatttccccaacgccaggggccccacattcccttttggtatttgatttcacagtcagctgctcaacggaatggcctctccacaccaggggatcctttaggcacccaaccggtcttgccttttaatttttacccaggggaagggacttcacatttgggggcgaatggaaccaagttttcgccattgttgggattgattgaattgggtttcccattccccaaagtctgagatggatttgcatatacagtgttgccagttcccagagcctcctaaaatttttaggcctttgttcacaaaaccacaggcaagaaacgtgttctatatctagagtgtgcccatctgtgtttagtacacatgcatgcatacacacccatacaaacatctgtgtgagggcagttctggagatgagcagagagagaccggcataaactcaatcttttctttcccaaaa

SEQ ID NO: 11130 - DNA, 528 bp, Homo sapiens; identical to SEQ ID NO: 11082
  SIMILAR (1)..(1398): 1001254mologous to Homo sapiens cardiac potassium channel subunit (Kv6.2),accession number AJ011021,Smith-Waterman Score= 2399.
  misc_feature (1)...(528): n = a,t,c or g

SEQ ID NO: 11131 - DNA, 363 bp, Homo sapiens
  SIMILAR (211)..(360): 1001254mologous to Homo sapiens hypothetical protein,accession number AL390156,Smith-Waterman Score=275.
atgaggtgcccgggtaaggcggctggccctcgcctgcaggacagaccagctgtgacagtcatcttcctggggctgaaaaccgccagtctagggagagaaaacccaggtgtagggctctgtgagcgctttagatcggagcaaagcagcagcactgaagcaacagagcccaggaagaggctgaactcagatgggcagggccggctgcacagcaagaaatttccagaattgaaattcaaatatgtggaagaggagcagcccgaggagttttttatcccctatgtctggtctcttgtctacaactcagcagtcggcctgtactggaatccacaggacatccagctgttcaccatggattccgactga

SEQ ID NO: 11132 - DNA, 820 bp, Homo sapiens; identical to SEQ ID NO: 11085
  SIMILAR (19)..(138): 1001254mologous to Homo sapiens Polypeptide fragment encoded by gene 128,accession number W88957,Smith-Waterman Score=205.

SEQ ID NO: 11133 - DNA, 210 bp, Homo sapiens
  SIMILAR (117)..(176): 801254mologous to Arabidopsis thaliana putative RING zinc finger protein,accession number AC011708,Smith-Waterman Score=126.
tcaagggtgctctccatggtcatcacgttttattaaaggcttgtggttccatcctgttagcatttccaagtctacgcgtaaaccgggaagccatatacttagagtagcttttagtttatcattatcatcatcatcatcatcatcatcatcatcatcatcatcatctccttcatcatgaaaggaagaagctaccaatgttgctttattcat

SEQ ID NO: 11134 - DNA, 612 bp, Homo sapiens
  SIMILAR (226)..(507): 801254mologous to Homo sapiens PRO2266,accession number AF119870,Smith-Waterman Score=362.
atggcgtgcggagccactctgaaaaggactctggatttcgacccgctgttgagcccggcgtccccgaagcgcaggcgatgtgcgccattgtcggcgcccacctcggccgctgcctccccgttgtcggcggccgcggccaccgccgcctccttctccgctgcggccgcctcgccgcagaagtatctccgaatggagccatcccccttcggcgacgtctcctcccgcctcaccacagtcgctggagccccagcggaaatgatcagagaggacgatattattcgtaaatttaggcgaaagggtcacatttcaccccaatctggatgtgtgcttgccgtaatcgattggttgcagctattaactctgggactgggtggtttgaggcgaggctacagcccctccttcagttcagacacggctgattttagtatagtgggggtggggggccagcttggcgactacagcccagaacttaggggacattggcttctagggcagaatcgtggtctccaagattacgacttcaggcgccctcttactaccaccttcagatccttgtctttcttagaacaggaggggttaaatgagtcacctaagcctgcagctattacgtga

SEQ ID NO: 11135 - DNA, 2682 bp, Homo sapiens
  SIMILAR (2230)..(2607): 451254mologous to Drosophila melanogaster CG14683 gene product,accession number AE003688,Smith-Waterman Score=300.
gactgcaatgtccagtgcagacccgtgcatttagatgtttccaaaatagcagttgtttccgcggcattatgttctgctggcctagaggtcttagttccagagggaggaatgctgccaccaagagacacaacaatgattccattaaactggaagttaagattgccacctggccactttgggctcttcttacttttaagccaacttgctaagaagggagttacagtgtttgacccagactatcaagatgaaatcagtctactactccacaatggcggtgaggcagttccagctcactgctgcatcctgtcagcttgtagccccttcttcacagagcgcctggagcgggagaggccagctcagggtgggaaggtggtgctagagctgggtggcctgaagatcagcacacttaggaagctggtggacttcttgtatacctcagaaatggaagtatctcaagaagaagcccaggatgtgctatctgctgcccgtcagctccgtgtgtctgagctggaatcccttcagcttgagggtggaaagttggtgaaggccccacagggccgaaggctgaaccgagagtgcttacaaccaacaagtgctgcaccaatctctgccagagtggtgacacccagccaccaccctcacaccccactgcccactaatcaaactccttgtcctcttggggcaataagattgaagtccttggggaaggaagaggggccccaggaaaacaaccgacagaatgcagacaatttgtctggcactcttctgctcaagaggaaggccagagcctgcccaactccacaagaaaaaaactcttcaccatcaagccatagtcaagagcctagagagaacaagaatgacactgcccttgatcctacagtgctctccccacccagcttgtacccctctgtggacaaacacctgttgcccagaaagatcaggctcagtcgctcaaagccatctcctggtatctgtacatcaaagccttccagcattttaagtggatctagctcagtgcctgcaacccctggccggcgtctttggcggcagaggagtgtaaataaagaaacaccagaggacaagccaaaaccaggcagagctagtcctctgcagagcaccccaaacccatctggtctgggaaagacaggtgggagcaggaagcggagccctgaagtcagggcacctaactcagactctgcagaggaggggcaggttgggagagttaaacttaggaagattgtcaatgggacttgctgggaagtggtacaagagactcctctcaaaaacactcaagatagcccccagatcccagatcccggaggagacttccaagagccttcaggaactcagccattctccagtaatgagcaggaaatgtcacctactagaacagaactgtgtcaggactcccccatgtgcactaagctacaagacattctggtctctgctagccactccccagaccacccagtggtgaagtcagagtttgagtccagtccagaactggtagagaaggaacctatgttggctattgactgcagagaaccctatgcatttgacacagctctgctggagcagccctgtgaggctgaggagtaccgaatcacaagtgctgctgccaccagtgagctggaggagatcctggacttcatgctctgtggctcagacattgaaccacctatagggtctctggagagtccaggggctgagggctgcagaacgcctacctaccatctgacagaaacaggaaagaactggattgaaggggaagaatggtgtctaccagacatggaactctggcccagggagctcacagaattggaaaaggaacctgctggtgagaacagagggccaactgagctccttagcccccttgtcatgccctctgaggtgagtgaagtgctttcagtaggaggccgttggacaccagaccttgaaattaccagctcccagccactggatggtcaggaagacaaacttctccatgtcagctcccttgatactccccagaggtcttatggggacctctcacctccctgctcaaactgggtggagactgggctggaagtctccttgactacagatgagttattatacccttctcccaaggcaggcaaggaggtatctggtcactctgaactactaggctcacttcctgccagctctgaagaggaagagattgatgtggtggactggacagcagaggggaggctggtacccactactgttccctccgtgtggcctgacccttcctcagagtcagaaacagagggaagaaaccatggcttcaggatcatgactgaagtttggccatgttccatcattaatgttccaacatcaccagggacacaaagctgcaaaaatgagaagggaaataaggcccctcaccaatgctcgataacaacggtcgcctcctccattccctccccgccgttcgccagcttctctcgcttctcggctacggcgaccaccgcggcctcagccttacgcttcctcccgcggggagccatggcgcctagagcccggccgagaatgcagcgggactggtgtccaggactaagcctgtatgtgtcacctgcagtgcccatctacaatgcaattatgtttctctttgtgttggccaacttcagcatggccaccttcatggacccagggattttccctcgaggtatagcatcctga

SEQ ID NO: 11136 - DNA, 678 bp, Homo sapiens
  SIMILAR (577)..(428): 401254mologous to Homo sapiens Human secreted protein encoded by gene No. 3,accession number Y38432,Smith-Waterman Score=67.
atggggcgtgcgatccaggtgctacgtgcggtgacggtgctgtttcggcgttacctggtcttccgcgggtccgtgacggggccagggtccataggttcgagccggcaaccggtgcgagcagtcgggcggtcgatcggcggtccctcaggccggccgcccatgcgcccctcatcagcagcagcattagattctaatagaagcactaaccctattgtcagctgtgcatgtgagggatctacgttgtgtgcttcttatgagaatctaatgcctgatgaactgtcactgtctcccatgacccccagatgggaccatctagttgcagaaaaacaagctcagtgttccactgattctacactatgcttcttcacccgcttctatctgatagcctttttctcccgagtgtttggtagcaaagttgcttttcctaaggggcgagaacgggagctggtggttagcaagcagacgcagttttacgcgcccctgctacgggcaggagcgagtggccctgccttctctgccagcgcgggttccctgggggtgaggaaagtgtccgagttaccggcagtgaatccgtaccggcctgcagcaacctcaattcttgcctcctcagaagaaagaattcgactgaggggcataaggcagaaaaagagactgaggcaagttttacagcagcagtga

SEQ ID NO: 11137 - DNA, 1077 bp, Homo sapiens
  SIMILAR (657)..(370): 721254mologous to Homo sapiens SUMO-1 activating enzyme subunit 1,accession number AF110956,Smith-Waterman Score=303.
ttaagtctgagaagaggctttgaaacgtgggtgaataatcagagaggcgtccttgcaatgattaaacaccaagggaaggctgccttcccagtccgtgaccggcgccagagttttgggtccacagataaaacgtgtctcctttgtctcggatttgaaattggtgagttgtttcttgggctggtctgtctgaggacctgaggtcgtaggtggatctttctcacagagcaaagagcaggaggatgggggattgatctcccaagggaggtcggtcccccgatccgagtcacggcaccaaatttcatgcgcgtccgtgtgaagagaccaccaaacaggctttgtgtgagcaacatggctgtttatttcacctggagcatcgaattgagtgaaaaatgactctggtttcttctctatatcctcagtgtccaccttcacatccaccatggggttgagattctgagctcgctccaaagaggcttcagccctatttcggccaacagacccagtacgaatcaagaactgagctccgggatcttctggagttaccttctcctccaagaaaatgagctggcccacttcccattctaggctaaccctgtatccttgacccattccatcctgcttcttcagggatctcattatgtgctgagaagctggcagccactcccagagcccctggaactctggcccaaggctctccgactgactccttctcggcttggcggctgaagactgacgctgcccgatcacctcgaaagccccgtagaccatcacagacgccgagcttcgagtaacttgggcaagtgacaccttagggtgagtctccttgtctgtaaaaggggctgtggacagtgcctccttcattcggtgacaccgtttctgggcctccagtccccacaggcggatctgccggtcatactgtgccgcctcctcctcgctaatgccgccgccagcctcctccttctccaccatggcgccggctcttcctgcctcagctccggtcccgctcaagccaaccgcccgccggacccgcgcgccacctaccgccgccggcagcacgcccggagtgcttctgcgcat

SEQ ID NO: 11138 - DNA, 684 bp, Homo sapiens
  SIMILAR (3070)..(3660): 951254mologous to Pichia pastoris kanR,accession number Z46232,Smith-Waterman Score=1027.
atggaatctgctcctggtgaagatgctgtgaacattgttaaaaccacaacaagggatttagaatattctgtaaacttaattgatatagcattggcagggttggagaggatggactccaattttgaaagaagttttactgaaggtacacagtatgtgtatatatttatgggatacatgagttattttggtacagacatgcaatatgtaatcacatcatggaaaatcggacatccatcccctcaagcatttatcctttgtgttacaaacaatccaattatacacttatggcagagttgcagagatccaacaaaaagtaaaaagcagaaatcccagaaacgttggaaagcacaggagctaatgttagcaggagagaacatatccaagtcatacagcaccgaagtggccacaaatctgtatgggcctgcagcaacctcaattcttccctcctcagaagaaagaattcaactgaggggcataaggcagaagtgtacatgcaggagcacacttgcccagctcctgagatcttatggggaaactgcttgtcatgcctgtctgtgtgaagagaccaccaaacaggctttgtgtgagcaacaaggctgtttatttcacctggatgcaggccatctggatgtatacgtgcaggcttgggctcagaggcctgacattcgtgtcttcttatattaa

SEQ ID NO: 11139 - DNA, 1940 bp, Homo sapiens
  SIMILAR (1)..(426): 951254mologous to Homo sapiens NAG13,accession number AF194537,Smith-Waterman Score=696.
atgtatcccattttcttttttatctgtatctctctaatccacctggcattcactcgatttccccatatttccttctttcctgttcctcaccctgatcatacttggtttattgatggcagttccaccaggcctaatcaccattcaccagcaaaggcaggctatgctatagtatcttccacacctatcattgaggctaccactctgcccccctccactacctctcagcaagttgaactcattgccctaactcgagccctcactcttgcaaaaggactacccatcaatatttatactgactctaaatatgccttccatatcctgcaccaccatactgttatatgggcagaaagaggtttcctcgctacacaagggtcctctatcattaatgcctctttaataaaaactcttctaaaggtcgctttacttccaaaggaaactggagtcattcactgcaagggccatcaaaaggcatcagatcccattgctcagggcagcacttatactgataaggtagctaaaaaagcagctagcattccaacttctatccctcatggcagtttttctccttctcatcagacactcccacctactcccccactgaaacttccacctatcagtcttcccacacaaggcaaatggttcttggaccaaggaaaatatctccttccagcctcacaggcccattctattctgttgtcatttcataacctcttccttgtagtgttggacgttctggccagggcaatcaggcaggagaaggaaataaagggtattcaattaggaaaagaggaagtcaaattgtccctgtttgcagacgacatgattgtttatctagaaaaccccatcgtctcagcccaaaatctccttaagctgataagcaacttcagcaaagtctcaggatacaaaatcaatgtacaaaaatcacaagcattcttatacaccaacaacagacaaacagagagccaaatcatgagtgaactcccattcacaattgcttcaaagagaagaaaatacctaggaatccaacttacaagggatgtgaaggacctcttcaaggagaactacaaaccactgctcaatgaaataaaagaggacacaaacaaatggaagaacattccatgctcatgggtaggaagaatcaatatcgtgaaaatggccatactgcccaagggcttaaaaaagcagcttacaaggctgttaattatgacaagcttaaagaaactacccaaggtgaagacgaaaacccagcccaggtcatggcccgcttagcagcaacccttagacgctttaccaccctagacacagaggggccagaaggccgccttattcttaatatgcattttaccacccaatccactcctgacattaggaaaaaacttcaaaaattagaatctggccctcaaaccccacaacagaacttaattaacctcaccttcaagcggctaaagtctgacaccacccaatcgcctcggaagcctacaggaccatcacagatgctctgggtaactctcacagtggaggcccgcctgcacccaggtgaaataaacagccatgttgctcacacaaagcctgtttggtggtctcttcacacggacacgcatgaaatttggtgctgtgattcggatcgggggacctcctttgggagatcaatcccctgtcctcctgttctttgctccatgagaaagatccacctacgacctcaggtcctcagaccgaccagcccaagaaacatctcaccaatttcaaatccagctgctcctcgccaggctgagctaggtcccaattcttcctcagcctctgctcctccaccctataatccttttatcacctcccctcctcacacctggtccggcttacagtttcattccgtgactagccctcccccacctgcccagcaatttactcttaaaagggtggctgaagctaaaggcatagtcaag

SEQ ID NO: 11140 - DNA, 548 bp, Homo sapiens
  SIMILAR (126)..(404): 431254mologous to Homo sapiens SLP-76 associated protein,accession number U93049,Smith-Waterman Score=157.
aacttaagtctcaggaagttattatttatgatgatgtagacctgagtgaaaaagagtcaaaagatgaagataaactgaaaatgtggaagcccaagtttctgacaccaaaggaaaaaaaagagaaaaacggtgctgaagaatcagaaagaaatttcttcaaaaccaagaagcaaaacttagaaaagaacagaatgaaaagagaagaaaaactatttagagaaaggtttaaggtacgttctcttctgaagtacgacaaagagattattgtcatcaatacagcagtggcctgttccaataattcaagaaatggaatatttgatttgccaataagtcctggagaagaattggaagtcattgataccaccgaacaaaatctagtgatatgtcgtaattctaaaggcaaattaaaaatcaatttgtattccctgagtacaaactgtctagggaataagaaaaagcaaactcagaattataaaactgtcctgaaaaacccatttgcagaaaatggagaattgttcatgctacatatagccaataccctgacatag

SEQ ID NO: 11141 - DNA, 578 bp, Homo sapiens
  SIMILAR (946)..(2256): 951254mologous to Homo sapiens putative p150,accession number U93574,Smith-Waterman Score=2181.
atgcatttctcagaacagatccccattgttaagcgatgcatgactgtaattaagattggcatcatgtcattaaataaaatccacagaactattggaaaagtcaaaagtgctaaacatgaagataaaaaaatgaaggaaaaacaaccatgtgaattgaaacctaaaaacacagaaaaggaaccatattcaaaccatgttttcaaggtagatgcctgtgaagggacacctgaaaaaattcagatgaccaacgtccacacaggtagaaggaacatgttggctggaaagcaagaggccatgattgacatcatccagacaaatccctgccctgagggcccaaagctggccaggcactcccaaggccactgtgggcatctggaggttttggagtcaactaaagaaactccagacctaggggtctctaagacaagttccatctcggaggagatatatgatgatgtcgagtactccaggaaagaggttttagatggaaaagaagcactcaaaagactgcagcaattcttcaagaaagaaaaggatagatttaaaataaagaaaaccaagtcgaaagaaaacttaag

SEQ ID NO: 11142 - DNA, 1242 bp, Homo sapiens
  SIMILAR (349)..(546): 561254mologous to Rattus norvegicus pheromone receptor VN6,accession number U36898,Smith-Waterman Score=194.
tcataacacatgtggctgagggttggccgtggctccacagtcacgggtgggctttcctgggctcagcttctcacagcgtctccttgcagggcccaggctgtaggagatgtcatcagggcgtgttccatttcttgtttctagactgtctccctccagtagaatgtgcgttctgctatacagcagtgctgtgtgacgcgatagcaggtcctttttaaacatctgggaactgcttaataaagtccccggcatcttgaagccacttgcagaccttggcagttgctgttgctcctgctgctgctgctgctgctgcattgtcaagactacattgatgtccagggaactaggtgacaacctgcttggcttcatgaagaaggaataatatccaattaggctaagtgtattcggtgcctgagtgacaagccctggagacctgagggcttctggggcccccagggcggtttcaggaggctgtctccagaccggggaagggggtgtaatatatgggggtatagggataaataattctgtgtgctgtgcaggccgtggagactcatcttctgcacaggtcaagttctccaaatctcttctcttttccttctctccttctctttgtttttctttctcttcctgttctcttgttttatcttgacttctctcgactgtggtgacggtttgcatatatctgcgattgtatttaaaatcgagtgtggctgtgtttgtcagtcgtggtttgtgttctttgatttgttctgcatgttcttcttttggagaggatgtgtcactttgccaatcttggtccttgctgttgtctggtggagggaaacaagcctgccaggccggctcatctgacccctctttggctatggcctgcaggctcagaatagttcttacattttcaatcatctcctggggataaggctgccttcgtctagaaagtgcctcggttccagcttggaaatatccatgtacagtcccttttttgttattccaaaacccaaagagatctggcccaaaatacctttctaacatggaggaattaggaatactgaaggcatcggcccccaagggtttgatgtgctcttgtccccaaggcctgcagatttgcatcacctctccacttcgtggactcctcgtacctgcctgattccaggatgctctaacctggccacgcatcccccgtggattctcagctgttgtgtgtttcctcctcaggtggccactgtgtctggtgctcacccacat

SEQ ID NO: 11143 - DNA, 930 bp, Homo sapiens
  SIMILAR (1)..(573): 971254mologous to Homo sapiens vacuolar protein sorting protein 18,accession number AF308802,Smith-Waterman Score=984.
atggcttgcctggctagctgccctttgctcaagattgagaatgtgctgccttcttttcctgatttcgtcaccatcgaccacttcaagaaggcgatctgcagctcacttaaggcctacaaccaccacatccaggagctgcagcgggagatgaaagaggctacagccagtgcccagcgcatccggcgagacctgcaggagctgcggggccgctacggcactgtggagccccaggacaaatgtgccacctgcgacttccccctgctcaaccgccctttttacctcttcctctgtggccatatgttccatgctgactgcctgctgcaggctgtgcgacctggcctgccagcctacaagcaggcccggctggaggagctgcagaggaagctgggggctgctccacccccagccaagggctctgcccgggccaaggaggccgagggtggggctgccacggcagggcccagccgggaacagctcaaggctgacctggatgagttggtggccgctgagtgtgtgtactgtggggagctgatgatccgctctatcgaccggccgttcatcgacccccagcaagccaaaagaggagagactgggggccaattttttaacacaaggaagagcatcactaatctacgtcaacctcccccaaaggaaggggccgccgatgtcaaacccacaagggtgcagtttatgagcagcgatgggccaaggcatcacctccaacctgcaagagtcgcacatgatgtgcacaaagaggctgaggcagccgagctccggcctgaagcacctggaccagacgacaaagaggtcggcttccttagtccggaggactgtccggactgtgagcaagaggaagctacagcccacgagggccacccgcagcctgacaccttcagcagtaaacaagataaaataacttcttcaagataa

SEQ ID NO: 11144 - DNA, 1089 bp, Homo sapiens
  SIMILAR (400)..(708): 461254mologous to Rattus norvegicus pheromone receptor VN6,accession number U36898,Smith-Waterman Score=234.
atggacccttgcgatgttcagatatgtccggagtttcttccttctggtgggttcgtggtctcgctgacttcaggagtgaagctgcagaccttcgcggtgagtgttatagctcttaaaggcagcacgtctggagttgtttgttccttctggtgggttcatggtcttgctggcttcaggagtgaagctgcagaccttcccgaaattcctttggttacaagtttaccccataaacggcaacacactcacctccatccaagacagactcaaggtggaggaagcgtggaaatgtgcttccggacaaagctctcagtatcctgggtgccattgtttcttctactcagccgtgttttttctactgagacagacaaaccctcagcccaggatagcagaagccgtgggagttcaggccaaccggcagacctgctacaggttctctctgctggtgaccacccaccccacaaccactcaagaagcctcatcaaaacattgttggagaaaactgggtgcccacggaggagaaacggaatgcaaggagattgcaatctggttagtgaaatagaatggggtcagtgctttgaaccagatgcactattactaatagctggaggaaattttgaagatcagcttagagaagaagtggtccagagagtttctcttctccttctctattacattattcatcaggaagagatctgttcttcaaagctcaacatgagtaataaagagtataaattttacctacacagcctactgagcctcaggcaggatgaagattcctctttcctttcacagaatgagacagaagatatcttggctttcaccaggcagtactttgacacttctcaaagccagtgtatggaaaccaaaacgctgcagaaaaaatctggaatagtgagcagtgaaggtgctaatgaaagtacgcttcctcagttggcagccatgatcattactttgtccctccagggtgtttgtctgggacaaggaaacttgccttccccagactactttacagaatatattttcagttccttgaatcgtacgaataccctccgcctatcaggcaagcgtgctatgaaagctatgcggtga

SEQ ID NO: 11145 - DNA, 3922 bp, Homo sapiens
  SIMILAR (1501)..(2184): 991254mologous to Escherichia coli ATH1 protein,accession number D90769,Smith-Waterman Score=1180.
cggagaaagctccaaaagcaagccctgggccctgaacaaaatctagagacattattaaacctggcaacctcggtgttctataatagggaccaagaggaacaggtccaaaaggaaaagcgagatcagagaaaggccgcagccttagtcatggccctcagacaaacaaaccttggtggttcagagaggacagaacatgaagcaggccaatcacctggtaaggcttgttatcagtgtggtttactgggacactttaaaaaagattgtccaatgagaaacaagctgccccctcgtccgtgtccactatgctgaggcaatcactggaaggtgcactgccccagaggatgaaggttccctgggtcagaagcccccagccagacgatccaacaacaggactgagggtgcctggggcaagcgccagctcatgtcatcaccctcactgagccccgggtatgtttaactattgagggccaggaaattgacttcctcctggacactggcgcggccttctcagtgttaatctcctgtcctggacgactctcctcaacctccgttaccatccaaggaatcctgggacagcctgtaaccaggtatttctcccacctcctcagttgtaattgggagactttgctcttttcacatgcctttcttcttatgcctgaaagacccacagggttattagggagggatatattagccaaggctggagctattatctacatgaatatggggaacaagttacccatttgttgtcccctacttgaggagggaatcaaccctgaagtctgggcattggaaggacaatttggaagggcaaaaaatgcccacccagtccaaatcaggttaaaagatcccaccacttttccttatcaaaggcaatatccctaaggcctgaagctcataaaggattacagaatattgttaaacatttgaaagctcaaggcttagtaaggaaatgcagcagtccctgcaacaccccaattctggaagtacaaagaccgagactagtgcaagatcttagactcattaatgaggcagtaatttcactatatccagttgtacccaacccctataccctgctctctcaaataccagaggaagcagaatggttcacagttctggacctcaaggatgccttcttctgtgttcccctgcactctgattcacagttcctctttgcttttgaggatcccacaaaccacacatcccaacttacatggatggtcttgccccaagggtttagggatagccctcatctgtttggtcaggccctagccaaagatctaggccacttctcaagtccaggcactctggtccttcaatatgtggatgatttacttttggctaccagttaggaagccttgtgccagcaggctactctagatctcttgaactttctagctaatcaagggtacaaggtgtctatgtcgaaggcccagctttgcctacagcaggttaaatatctaggcctaatcttagccaaagggaccagggccctcagcaaggaatgaatacagcctatactggcttatcctcgccctaagacattaaaacagttgagggagttccttggaattaccagcttttgccgactatggatccctggatacagcgagacagccaggcccctctaatcaaggaaacccagagggcaaatactcatctagttgagtgggaaccagaggcagaaacaaccttcaaaaccttaaagcaggctctagtacaagctccagctttaagccttcccacaggacagaatttctctttatatgtcagagagagagccaggatagctcttggagtcctcactcaaactcatgggacaaccccacaaccagtggcatacctaagtaaggaaattgatgtagtagcaaaaggctggcctcactgtttaagggtagttgcagcagtggccgtcttagcatcagaggctatcaaaataatacaaggaaaggatctcactgtctagactacttatgatgtaaatggcatactaggtgccaaaggaagtttatggctatcagacaactgcctacttagataccaggcactactccttgagggaccagtgcttcaaatatgcacatgcatggccctcaaccctgccacttttctcccagaggatggggaaccaatcaagcatgactgccaacaaattatagtccagacttatgccgcccgagatgatctcttagaagtccccttaactaatcctgaccttaacctatatactgatggaagttcatttgtggagaatgggatacgaaggttagtgatgtaaccatacttgaaagcaagcctcttcccccagggaccagtgcccagttagcggaactagtggcacttacctgggccttagaactgggaaagggaaaaagaataaatgtgtatacagatagcaagtatgcttatctaatcctacatgcccatgctgcaatatggaaagagagggagttcctaacctctgtaggaacccccattaaataccacaaggaaattatagagttattgcacgcaatgcaaaaacacaaagaggtgggaatcttacactgacaaagccatcagaataggaaggagaggggagaacagcagcataagcagctggcagaggcagcagaaaggaaagaaagagacaggaagtcaaagaaagagacagagaggaagagacaagaagttagagagaaagagggacagacacagaagtcaaagagagggtaaaaaagagaggaagagacaaagaagaagtcaaagagagagatggaagtagtaaagaaaaaacagtgtacctattcctttaaaagccagggtaaatttctctctacccacgcaaggcaattctctattggatctcaacccatatctgcctctcaaacagttgaagaaataatgaaatctatccttactttacaatcccaaataagactctttggcagcagtgactctccaaaaccgctgaggcctagatctcctcactgctgaaaaaggaggactctgcaccttcttaggggaagagtgttgtttttacactaaccagtcagggatagcatgagatgccacccagcgtttacaggaaaaggcttctgaaatcagacgcctttcaaattcttataccaacctctggagttgggcaacatggcttctcccctttctaggtcccgtggcagccatcttgctgttactcgcctttgggccccgtatttttaaccttcttgtcaaatttgtttggtctagaatcgaggccatcaagctacagatggtcttacaaatcgaaccccaaatgagttcaactaacaacttctaccgaggacccctggactgaccagctggcacttcccctggcctagagagttcccctctgaaggacactacaactgcaaagccccttcttcgcccctatccagcaggaagtagctagagcagtcatcggccaaattcccaacagcagttggggtgtcctgttgattgaggggtgacagcatgctggcagtcctcacagccctcactcgctcgctcactctcggcacctcctctgcctgggctcccactttggcagcacttgaggagcccttcagctctgtatctagctactctgatgggtccttggagaacctttatgtctagctcagggattgtaaatacaccaatcagcaccctgtgtctagctcagggtttgtgaatgcaccaatggacactctgtatctagctactctggtggggccttggagaacctttgtgtcaacactctgtatctaactaacctggtggggatgtggagaacctttgtgtctagctcagggattgtaaacgcaccaatcagcgccctgacaaaacaggccactgggctctaccaatcagcaggatgtgggtggggccagataaggggattaaaagcaggctgcccgagccagcagtggcaaaaaaaaaa

SEQ ID NO: 11146 - DNA, 1420 bp, Homo sapiens
  SIMILAR (76)..(372): 871254mologous to Homo sapiens p40,accession number U93569,Smith-Waterman Score=438.
tcagtacaacctctgtgccaccagctccgacgatgggactatgacagtcttcaggttgtgcacgtaaatgactgcattgttggagccagaggccatcagatagctcaattctggctggctgccatgctcatgatgccagctaatggtattcacaagcttgtgatgtttgattgaattggtgtccctgatgagtttgttgatgtcaaaggcttctccactaagcttccagggattatgctgtaagacaatcccttctcctccacagctgtataaagcaagggaaggtctgtctccttctcctccaagtgacatggggggtactggtggcccccaggctaaagtatatacagtcttcttatgatatgtgctagaaatctgtggaggcttgttggagtaggtgtcatacaatcccacttttccatcatcagttccaaaagctaagcaaccttccttggttgggtgccagcacagcgctgtaaccttggacttcacgccttgccaaaaatttttcacatcatagttgttctttatggagagtgtattccatacacggatcatgccatccccaacacctatggccaaagagctattgtgtccggaattggttccttccggtgggttcttggtctctctgacttcaagaacgaagccatggaccctcgtggtgagtgttacagttcttaaagatgatgtgtccgcagtttgttccttcagatgttcagatgtgtccagagtttcttcctcctggtgggttcgtggtctcactgacttcaggagtgaagctgcagaccttcacaacagaaaagttctccaagtccccacctgtcccagaagcccaatcagcttcacctctcactggcattcactgtgggactttgcggcacctagtctgggcactctggcagcccagagggagctcgtcccagacaatcaagaggaaaagaggggaagcgagaaagagatggagacctggtattgtggccaatcatcccgtgaaaagggaatggcggtccatgcatgggattcagcctctgatcaagcccagcaggcatcagcccgctgccctgactataatcatgttctttgtggcaacatggatgcagctggaggcccttatcctaagcaaattaatgcagaaacagaaaaccaaatatcacatgttcttatttataagttagagctaaatattgggtacacaattgacataaagatgggaacaatagacactggggactccaaaagtggggagcctagtggtggcagctgcactggctgtgtcagtcctgcctcaggacaggatgcagattctaagcagcaaagttctcaggatggcaccaagaagcagctgctcagggctcagatacctgtgggactccatgtgggttccccgtctggagcgacatcttggtacagtctctag

SEQ ID NO: 11147 - DNA, 442 bp, Homo sapiens
  SIMILAR (281)..(138): 871254mologous to Homo sapiens Human secreted protein, SEQ ID NO: 5210,accession number G01129,Smith-Waterman Score=226.
  misc_feature (1)...(442): n = a,t,c or g
cttccgaggcgatcaggcagcatcagtcttcagccgttaagccaagaaggagtcagtcagagagccttgggccagagttccaggggctctgggagtggctgccaggtgagttgaacagtccgatttccagtggagtctggatttgaaattggtgagatgtttcttgggctggtcggtctgaggacctgaggtcgtaggtggatctttctcacggagcaaagagcaggaggacaggggattgatctccgaagggaggtcccccaatctgagtcacggcaccaaannnnnnnnnnnnnnnnnnnnnnnnnnnnnnnnnnnnnnnnnnnnnnnnnnnnnnnnnnnnnnnnnnnnnnnnnnnnnnnnnnnnnnnnnnnnnnnnnnnnnnnnnnnnnnnnnnnnnnnnnnnnnnnnnnnnncctcgtgccgaattcctgcagcgggc

SEQ ID NO: 11148 - DNA, 409 bp, Homo sapiens
  SIMILAR (13)..(213): 411254mologous to Murine leukemia virus pol polyprotein,accession number M14702,Smith-Waterman Score=130.
  misc_feature (1)...(409): n = a,t,c or g
ccctcaaaataagtagaggcctttcctacagggtctgagaaggccaccgcagtcatttcttcccttctgtcagacataattcctcagtctngccttcccacctcaatacngtctgataacagacgagcctttattagtcaaatcagccaagcagtttttcaggctcttagtattcngtgaaacctttatatcccttatggtcctccatcttcangaaaacacacctcaccaagctcagccaccaacttaaaaaggactggacaatacttttaccactttcccttctcagaattcaggcctgtcctcgtaatgctacagggtacagcccatttaaggtcctgtatagacactcctttttattacgccccagtctcattccagacaccagaccaacttagactgtgcctca

SEQ ID NO: 11149 - DNA, 411 bp, Homo sapiens; identical to SEQ ID NO: 447
  SIMILAR (1)..(186): 851254mologous to Homo sapiens ribosomal protein L31,accession number X69181,Smith-Waterman Score=265.

SEQ ID NO: 11150 - DNA, 1146 bp, Homo sapiens
  SIMILAR (355)..(681): 1001254mologous to Homo sapiens PRO982, a novel secreted protein,accession number Y96731,Smith-Waterman Score=621.
atgcacataaaccagaaaatctacaagaaactgatatatttttggacatatacactcccaagattggaccaggaagagattcggtccctgaatagaccaataacaagttctgaaattgaatcagcaataaatagcctaccaaccaaaaaatttccaagaccagatggattcacagttgaattctaccagatgtacaaagaagagctgacacacaacaagaaaagaaagcttcaggccaatatccttgatgaacatcaatgcaaaaaatcctcaagaaatcccggcaaactgaatccagcagcacatgaaaagctaatccaccatgatcaagcaggctttattcctgggatgcaagctcttgtctgctggataacagtcttcctcctccagtgttcaaaaggaactacagacgctcctgttggctcaggactgtggctgtgccagccgacacccaggtgtgggaacaagatctacaacccttcagagcagtgctgttatgatgatgccatcttatccttaaaggagacccgccgctgtggctccacctgcaccttctggccctgctttgagctctgctgtcccgagtcttttggcccccagcagaagtttcttgtgaagttgagggttctgggtatgaagtctcagtgtcacttatctcccatctcccggagctgtaccagatgctgctgcagggccagtacacagttgtgctcctgccagtgcccaaaacacacctacccgggctcctgcatccccttgccggcaagctgcacccccaccccaccccacccactgcatttttacagaaaaccacaagtagatattgccagcaatgcattatcaacggtgttgctgccagaaagacaacgagagctcttttctcaagccaaactcattgccttaactcgagccctcactcttgcaaaaggactacgcatcaatatttatacagactctaaatatgccttccatatcctgcaccatcatgctgttatatgggctgaaagaggtttcctcattacacaagggtcctccatcattaatgcatctttaataaaaactcttctcaaggccgctttacttccaaaggaagctggagtcattcactgcaagggccatcaaaaggcatcagatcccattgcttag

SEQ ID NO: 11151 - DNA, 456 bp, Homo sapiens
  SIMILAR (40)..(153): 921254mologous to Homo sapiens calbindin D28K,accession number S46006,Smith-Waterman Score=196.
ggacgtgcatgaaatttggtgccgtgactcggatcgggggacctcccttgggagatcaatcccctgtcctcctgttctttgctccatgagaaagatccacctacaacctcaggtcctcagactgaccggcccaaggaacatctcaccaattttaatcagaccatcacggatgccgagcttcgggtaactctcacagtggaaggaccatcacagatgctctgggtaactctcacagtggaagacataattcctcggtttagccttcccacctctatacagtctgataatggaccagcctttactagtcaaatcacgcaagcagtttctcaggctcttggtattcagtggaaccttcatatcccttacagtcctcagtcttcaggaaaggtagaacggactaatggtcctttaaaaacacacctcaccaagctcagccaccaatttaaaaaggactag

SEQ ID NO: 11152 - DNA, 1131 bp, Homo sapiens
  SIMILAR (355)..(939): 501254mologous to Feline leukemia virus gag-pol precursor polyprotein gPr80,accession number M18247,Smith-Waterman Score=466.
atgcatgagatttggtgccgtgactcggatcaggagacctcccttgggagatcaatcccctgtcctgctgctctttgctccgtgagaaagatccacgtacaacctcaggtcctcagaccaaccagcccaagaaacatctcaccaatttcaaatctgcgactgaagagtgacgctgcctcatcgccttggaaaccccctggaccatcacggacgccaagctttggcctcctttgcgtcttcctctcatatccccccaccttaaccacaagtataggacatctctactccttccctggcaaccgatcacatgcccattaccatcccactaaacctaatcacccttaccccactcaacgccaatatcccatcccaccgcacgctttaaaaggattaaagcctgttatcactgacctgctacagcataggcttctaaaacctataaactctccttacaattcccccattttacctgtccaaaaacccgacaagtcttacagattagttcaggatctgcgccttaccaaccaaattgttttgcctatccaccctgtggtgcccaacctgtacactcttttgtcctcaataccttcctccacaactcactattctgtgcttcatcttaaagatgcttttttcactattcccctgcacccctcatcccagcctctctttgctgtcacctggactgaccctgacacccaacagtcccagcagcttacctgggctgtgctgccgcaaggtttcagggacagccctcattacttcagccaagctctttctcatgatctactttctttccacccctctgcttctcaccttattcaatatattgatgaccttcttctttgtagcccctcctttgaatcttctcaacaagacacacttctgcttcttcagcatttattctccaaaggatatcagtctgatgacagaccagcctttactagtcaaatcacccaagcagtttctcaggctcttggtattcagtggaaccttcatatcccttaccatcctcaatcttcaggaaaggtagaatggactaatggtcttttaaagcttctgctcctacttctgactgctaatatcgatgacaccagttatctgcaaattcctcataaggggctccaatga

SEQ ID NO: 11153 - DNA, 609 bp, Homo sapiens
  SIMILAR (193)..(339): 571254mologous to Baboon endogenous virus strain M7 gag-pol precursor polyprotein,accession number D10032,Smith-Waterman Score= 157.
atgacctcaggtcctcagaccgaccagcccaaggaacatctcaccaattttaaattggatgaacaggaaagagttttttctctagcccaatctcacactgataaccgccggcttcacgagccagacctccaggaagttattagagcagttcccctaggagatccaaaatggaactatcaggctgattccccagacgtaattcctcggtttggccttcccacctctatacagtccgataatggactggcctttattagtcaaatcacccaagcagtttctcaggctcttggtattcagtggaaacttcgtaccccttaccatcctcaatcttcaggaaagtgctgggattacaggcataagtcactgcatccagccaaatgtttgctgaattcttacagccccagcaatgtccaaggctctggagacaccgtggtggacaggacaccatccctgtccttaagaaagagtagcctttggtataaggcaccccagtccagagatggagatactattggcgatgggaaaacatcaggagcacaccaactggggcagcccaataaaaagaggcatggatatcacatcatcagcttccctgactttttatcataa

SEQ ID NO: 11154 - DNA, 835 bp, Homo sapiens
  SIMILAR (1)..(459): 921254mologous to synthetic construct tet protein,accession number M20189,Smith-Waterman Score=696.
  misc_feature (1)...(835): n = a,t,c or g
ttatgttgtttgtacttgccaggatacacttccatttcatatttgcaagtacacataaaggtatccttcatcagcagcacagtgcttcctttcctctgaatctgccatcagctcaggcagatttctaagcagcaaatcagcctttgccagaacactgcaggacaccagtgcagcgcccagcctgcgaccatgnnnnnnnnnnnnnnnnnnnnnnnnnnnnnnnnagtgacatttggtgccgtgactcggatcggggggacctcccttgggagatcaatcccctgtcctcctgctctttgctccatgagaaagatccacctacgacctctggtcctcagaccaaccagcccaaggaacttctcaccaattttaaatcagtcccaactccaagcgttgctgagtctttccaatcttccttttctacggacccatctgacccctcctctcctccccaggctgctcctcgccaggccaagccaggtcccaattcttcctcagcctctgctccccgaccctataatccttttatcacctcccctcctcacacctggtcgggcttacagtttcattctgcgactagccctcctccacctgcccaacaatttcctcttaaaaaggtggctcaagttaaaggcacagtcaagtggctaaagactgatgctgcccgatcgcctcagaagcctacaggaaccatcacagatgctttagataactctcacagtggaggtccgataatggaccggcctttattagtcaaatcacccaagcagtttctcaggctcctggtattcagtaaaacctttatatcccttaccatcctcaatcttcaggaaag

SEQ ID NO: 11155 - DNA, 1133 bp, Homo sapiens
  SIMILAR (382)..(654): 951254mologous to Homo sapiens target of methylation-induced silencing-1,accession number AF255794,Smith-Waterman Score=453.
gctgaggctctccctgtccagttctacttccatctttcagacattcgaggtatgctgcttcatgagccagacctccagaaaggcattaaagcagtttcccaagaggatccccaatggagctatcaggcagattccccaggtatagctaggcgagattatatggtttcccgcctagttgaagggcttaaaaaggcagcttacaaagctgttaattatgacaagcttaaaaaaactacccaagttaccattgttcctggcccggacttcaatctggcctcccacattattcctgataccacacctgacccccatgactgttatctctctgatacacctggcattcactccatttcccatatttccttctttgctattcctcaccctgatcacacctggtttattgatggcagttccaccacgcctaatcgccacacaccagcaaaggcaggctatgctatagtaccttccacatctatcattgaggctgctgctctgccgccctccgctacctctcggcaagccaaactcattgccttaactcgaaccctcactcttgcaaaggaattatgtgtcaatatttatactgactctaaatatgccttccatatcctgcaccaccatgctgttatatgggctgaaagaggtttcctcactaagcaagggtggtccaacattaatgcctctttaataaaaactcttctcaaggccactttacttccaaaggaagctggagtcatacactgcaagggccaccaaaaggcatcagatcccatcgctcagggcaacacttatgctgataagatagctaaagaagcagctagcggtccaacttctgtccctcatggccagtttttctccttctcattggtaactcccacctactctcccactaaaacctccacctatccatctcttctcacacaaggcaaatggttcttggaccaaggaaaatatctccttccagcctcaaaggcccattctattctgccgtcatttcataacctcttccatgtaggttacaagccgctagcccacctcttagaatatctcatttcctttctttcatggaaatctatcctcaaggaaatcacttctcagtgatccatctgctattctactactcctcagggatt

SEQ ID NO: 11156 - DNA, 1845 bp, Homo sapiens
  SIMILAR (754)..(1305): 991254mologous to Escherichia coli 37KD protein, similar to YI22-ECOLI,accession number D85613,Smith-Waterman Score=989.
  misc_feature (1)...(1845): n = a,t,c or g
atgcagcaagaagaccctgaagaaagtaccaaaagccccaacccaacgaccaataaaaaacaagaaaagaaacttagcctgtttggtggtctcttcacatggacgcgtgtgaaattcggtgccgtgactcagattgggggacctcccttgggagatcaatcccctgtcctcctgctccttcaacgtttattctccaaaggatatcgggtatccccatccaaagctcaaatttcttctccatccgttacctacctcaatagtgtctccttaataaaaactcttctcaagaccactttacttccaaaggaagctggagtcattcactgcaagggccatcaaaaggcatcagatcccattgctctgggcaacacttctgctgataagggattgttcagaccccctcccttcccttcacatcaagctcggggatttgcccctgcccaggactggcaaattgactttactcacatgccccgagtcaggaaactaaaatacctcttggtctgggtagacactttcactggatgggtagaggcctttcccacagggtctgagaaggccaccgcagtcacttcttcccttctgtcagacataattcctcggtttggccttcccacctctatagagtccgataatggaccggcctttactagtcaaatcacccaagcagtttctcaggctcttggtattcagtggaaccttcatatctcttaccgtcctcaatcttcaggaaaggtagaacagactaatggtcttttaaaaacacacctcaccaagctcagcctccaacttaaaaaggactggacagtacttttacctcttgcccttctcagaattagagcctgtcctcggaatgctacagggtacagcccatttgagctcctgtatggacgctcctttttattaagccccagtctcattccagacaccagaccaacttagactgtgcctacctccccaaaaaaaaacttgtcatccctactatcttctgtctagtcaaactcctatttgccgttctcaactactccatacatgccctgctccttgtttacactgctggtttacactgtttctccaagccacccacagctggatatctccggggtgctatccccaaaccgcccaccactcttaactccctcttaaagtaaataaataatctttactggcagggctatgctgaacctccttgggcactctctaattggatgtcctgggtcctcccaattgttagtcctttaatacctgtttttctcctcttattcggaccttgtgtcttccgtttagtttttcaattcatacaaaaccgcacccaggccatcaccaatcattctatacaacaagtgtttcttctaacaaccccacaatatcaccccttatcacaaaatcttccttcagcttaatctctcccactctaggttcccacgcctcccctaatcccgcttgaagcagccctgagaaacatcgcccattatatctccataccaccgcccaaaaattttcgccgccccaacacttcaacactattttgtgttatttttcttattaatataagaaggcaggaatatcaggcctctgaggcccagggccagggccatcgcatcccctgtggacttggcacgtgtaacatccaggatgggcctggaagttaactggaaggttccacaaaaggaagttaaaaacagcctttaactggatggacatttccaccattgtggatttgtttcctggccccacccnaactggattcaatgtactttgntaatcttcccccacccttaaggaaggttctttgttatttttccccanccttggggatgttattttttgangttccacccctgg

SEQ ID NO: 11157 - DNA, 4991 bp, Homo sapiens
  SIMILAR (1267)..(2781): 871254mologous to Homo sapiens putative p150,accession number U93563,Smith-Waterman Score=2247.
atgaatccccagagggctgttgaaaagataaatctctcgaaggagacgaatgctgaccttatggatatgaactgtgaatcccatggtcctgaaatgggttttcaggctgatgctcaattagctgaccagtctcaagtagccgaaatagagcgtcagaaagtggatgttgaccttgagaataagagtgttcagtctagccgttcttctctgagttctgattctccggcttctctttatcattcagctcatgatgagcctcaagaagctttggatgaagtaaatcttaaagagttaaatattgacatggaagttaggagctatgattgctccagctctgagttgacttttgattctgacccgcctcttctgtcagttactgagcagtctcatctggatgctgaaggaaaagaacggcacattgacctggaagatgagagctgtgagtcagatagttctgaaataacttttgattctgatattcctctttattcagtaattgaccaacctgaagtagctgtttatgaggaagaaactgttgatctggaaagtaaaagtaatgaatcttgtgtctctgaaataacttttgattctgatattcctcttcattcaggaaatgatcaccctgaagtagctgttaaagaagtaattcagaaagaagagtacattcacttagaaaggaagaatgatgaacccagtggttctgaaataagttcggattcccatgcccctcttcattcagtgactaattctcccgaagtagctgttaaaaagctaaatcctcaaaaagaagagcaggtacacttagaaaataaggaaaatgaacctattgattctgaagtaagtttggattataatatcatttttcattcagtgactggacgttctgaagatcccattaaagaaataagccttcacacaaaagagcacatgtacttagaaaataagagtgtttttgaaacaagtttggattctgatgtccctcttcaggcagcgactcacaaacctgaagtaattgtcaaagaaacatggcttcaaagagaaaagcacgctgaattccaaggtagaagtactgaattcagtggttcaaaaacaagtttagattctggtgtccctcattattcagtaactgaacctcaagtagctgttaacaaaataaacagaaagaagcaatatgttctagaaaacaagaatgataaatgtagtggttctgaaataattttggattctaatgttccacctcagtcaatgactgaccaacctcaactagcttttttgaaggaaaaacatgttaatctgaaggacaaaaacagtaaatcaggtgattctaaaataacttttgattctgaacaacttcaggaagcggttaaaaaaatagaccaatggaaggaagaggttattggcctgaaaaataagattaatgaacctagtacttataaattaatacatcatcctgatgtttctgtccaatctgtggctgatcaacccaaatcagtggctgaccggctgagagaaaccgttaaagaaataagcctttggaaggatgaagaagttgacacggaagataggagaaatgaagctaagggttttgaaattatgtatgattctgatgttcttcagccagtggctggccaacctgaagaagtagttaaggaggtcagtctttggaaagagcatgttgacttggaaaataagattgtcaaacctacagattccagaataaattttgattctcatgaaccccttcagtccgtaactaataaaattccaggggcgaataaagaaataaatcttttgagggaggaacatgtttgtctggatgataagggctatgtgcccagtgattctgaaataatttatgtttcaaatatccctcttcagtcagtgataaaacaaccacacattttggaagaggagcatgccagtctggaagataagagcagtaattcttatagtcctgaagaaagttctgattccaatgactcttttcaggcagcagcagatgagcttcaaaaacctgtcaaagaaataaatctttggaaggaagaccatatttacctggaagataagagctataaattaggtgattttgatgtaagttatgcttctcatattcctgttcagtttgtgactgatcaatcttctgtacctgtcaaagaaataaacttgcaaaagaaggatcataatgatctagaaaataagaactgtcagaagttgaccaaccctcaagtgtcttacaaagaggcagaccttcagaaggaagagcatgttgtcatggaagaaaagaccgatcaacctagtgattcagaaatgatgtatgattctgatgttccttttcaaatagtagttaaccaatttccaggatcagtcaaagaaacccaccttccaaaggtggtacttgtggatctggtgcccggtgatagtgattatgaagtaatttcagatgatattccccttcagttagtgactgacccacctcagttgactgtcaaagatatcagctgtataaatacagaatgtattgatatagaagataagagctgtgacttttttggttctgaagtcagatgtaattgtaaagcctctactccctcaatgacaaaccaatgcaaagagactttcaaaataataaaccggaagaaggactatattattctgggagagccaagttgtcaatcttgtggttctgaaatgaattttaatgttgatgcctctgatcagtccatgacttacgagtcacaaggacctgatgagaaaatggtgaaatatattgattcagaagataagagctgtggatataatggttctaaaggaaaatttaatttggaagacacttctcatcgaacgactcaccgactgcagaaagctcacaaagaagccagtcttcggaaggatccaagaaatgctggcctaaaaggtaagagctgtcagtctagtgcttctgcagtggattttggtgcctcttccaagtcagcgctccatcgaagggctgataaaaaaaaacgttcgaagctaaaacatagagatctagaagtgagctgtgaaccggatggttttgagatgaattttcagtgtgctccccctcttccatctgatactgatcagcctcaagaaactgttaagaaaagacacccttgtaagaaggtatcttctgacttgaaagaaaagaaccatgattcccagtcaagctctgttctcaaggttgattctgtaaggaacctgaaaaaagcaaaggatgtcatagaggataatcctgatgaaccagttcttgaagccttgcctcatgtacctccttcatttgtggggaaaacatggtctcagataatgagagaagatgacataaaaattaatgctctggtgaaggagtttagggaaggtcgtttccactgttactttgatgatgactgtgagaccaaaaaagtttcttcgaaggggaaaaaaaaggttacctgggctgacttgcaaggtaaggaggacactgcaccaactcaagctgtgtcagagagtgatgatattgtctgtggtatttcagatattgatgacttgtcagtggccttagataaaccatgccatcgtcatcctccagcagagaggcctcctaagcaaaaggggcgtgtggcttctcaatgccagacagcgaaaatcagccatagtactcagaccagttgtaagaattacccagtgatgaaaagaaaaataattagacaagaggaagacccaccaaaaagtaagtgttcacgtttacaggatgacagaaaaaccaaaaagaaagtcaaaattgggacagttgaatttcctgcatcatgtactaaagttttgaagcctatgcaacccaaagccttagtctgtgttctttcttctttaaatattaaactgaaagagggtgaaggccttcctttccctaaaatgaggcaccatagttgggataatgatattcggtttatatgcaaatataaacggaatatctttgattattatgagcccttgattaagcaaattgtaattagtcctcccctgagtgtaatagtaccagagtttgagaggcgtaactgggttaaaattcattttaataggagcaaccaaaactccagtgcaggagataatgatgctgatggacaaggctctgcttcagcgcctttaatggcagtgccggcaagatatggatttaattcacatcagggaaccagtgactcttctctgtttctggaagaatcaaaggttctgcatgctcgtgagcttccaaagaaaagaaatttccagctaacatttttaaatcatgatgttgtcaaaatctctccaaaatcagttagaaataagcttttggaaagtcaaagtaaaaagaaaattcatggaaagagggtgacaactagtagtaataagctaggttttcccaaaaaggtttataaaccaattattctccagcaaaaacccagaaaagcttcagagaaacagtcaatttggattcggaccaaaccaagtgatatcattagaaagtatatttcgaaatactctgtctttttacgtcatagatatcagtccaggagcgcttttcttggaaggtatctgaagaagaaaaaatctgttgtcagtaggctaaagaaggcgaagagaacagctaaagtgcttttgaactcttcagttccaccagctggtgccgaagagctgtcaagcgctatggcaaatcctcctccaaagcgacctgtgcgggcttcttgccgcgttgcaagaaggaggaagaagactgatgaaagctaccatggccgacagaaaggtccttctacacctgtgagagcatatgatctgagaagctcatcttgtttacaacaacgtgagagaatgatgactcggctagcaaacaaactgagaggtaatgagcactctattgcatgtaataccgccggcggcactctacacgacttggagccgcctgcgctaccgtatgcagcactctccacggtagctccctggggactcaaacttttccagttccccat

SEQ ID NO: 11158 - DNA, 798 bp, Homo sapiens
  SIMILAR (433)..(882): 981254mologous to Homo sapiens putative p150,accession number U93574,Smith-Waterman Score=738.
atttcttccactgcccgtctgagggaacgctaagtagtgtgtccggcgccgtgttccaggtaactgggccaccgtggcgcgggaacgcagacgcgccaccacctcccggccggcccggaccctcaatctcctcggcgtctttggaagatccgaggcccaggactggtgccagctccgcgtttgttccgcgagaaagcgagaggccgagcccgggctggtgcgatggccgcggttggtggcaaagcagggagagggccgccagttcatcagcgaggcggccgtgcggggcaacgccgccgtccctggattattgcccggaacctcggtgtcagacgctgtcaggtggcctacggcccgggcatccttcggccttcaccggccttttacggctttcatctttttacctgcttcgcctcccgtcctgctctcccctgctccctcattctcaaaggcgggaaaggaaggtggaacaaaataatttcaaaatcaccggaaacctctctttacaaggaaggccctcatccgggggcctctttcacctacgttcctgttctggacggttcctctacggcatggtgcacgtctactgaaatgggggcccgggggactttttttaaaaaaccagatcgggaggactgtggccagcaattaacaccatgtagacttccttagttcttaagtggttgaattcgctgcttgttctgtaacgttataaataatttatatctgaagacggagagcctgtaatattcttcagattaaatggaagcgtgagacacttaaaaaaaaaaaaaaaaa

SEQ ID NO: 11159 - DNA, 1774 bp, Homo sapiens
  SIMILAR (656)..(1222): 471254mologous to Homo sapiens Human secreted protein encoded by gene No. 55,accession number Y27621,Smith-Waterman Score=441.
atgtgtgatatgtcccctctaggaatccccagacttcctttcctgacatacgtgagctgtctgacgcatactccttccagtttggtcacagactacaactcttgcctgatttcatcagcttcatctgcacgaaaaagtcccggatatcccataaaagtccacgaatttaaggaggctcacatgcttttgtaagttttggtaacatctattccttgaattttcagtgacacagcaagaggtacaatttaaaccagaatccctctgtaagaagctgttctcagatcataaagaactggagggtttaatgaagaccctgatacatccttgttctcaggggattgtgatattttctagaagctgggctggtgatgttggcttcaggaaagaacagaatgtcctgtgtgatgctctcctgatagcagttaacagccccgtggtactctatacaatcttaatagaccccaattggcctggaggacttgaatatgcccgaaacacagctcatcagttaaagcagaaactgcaaactgttggtggttacacagggaaagtgtgcatcattccaaggctgatacacctgagcagcacacagagtagacctggtgagatccccctgcgttaccccaggtcctacaggcttgctgatgaggaggaaatggaagacttgctgcaggctctggtggtggtctccctgtcctccagatctcttctgagtgaccagatgggctgtgaatttttcaacttgctcataatggagcagagccagttgctttctgagagtcttcagaagacacgtgaattattcatctactgctttccaggagtcaggaagacagccctagccataaagatcatggagaaaattaaggacttgtttcactgcaaaccaaaagagatcctctatgtttgtgaaagcgactccctaaaggattttgtgacccaacaaaccacctgccaagctgtgaccaggaaaactttcatgcaaggggagtttctaaagattaaacacatagtgatggatgagactgagaatttctgcagcaaatatggcaattggtacatgaaggctaagaacatcacccatccaaaggcgaaggggactggaagtgaaaaccttcaccatgggattctctggctttttcttgacccttttcaaatccatcacgcagatgtcaatggccttccccctccatctgctcagtttcctcgaaaaacaatcaccagtgggatccactgtgctctggaaatagcgaaggttatgaaagaagaaatgaagaggatcaaagaaaatcctccctccaacatgtctccagacacattagcattgttcagcgagactgcctatgaggaagcaacgtgtgcccaggctctgcctggggtgtgtgagacaaagactaatctgacaacagaacaaatagctaactatgtggcaagaaaatgtcacagcctgttccagtgtggctatctgcccaaagatatagcaattctgtgcaggagaggggaggacagaggacgctataggcttgcactactcaaagcaatggaattaattgagacccacagaccatcagaggttgtgtttagcccggccaccggtgtttggggaagtcacattgttttagacagtattcagcaattttcaggcctggagaggactgtcgtgtttgggcttagtccagaatgtgaccagtcagaggaatttcataagctctgctttgcttcaagagccattaaacacctctacctgctttatgaaaagagggcagcctactga

SEQ ID NO: 11160 - DNA, 2599 bp, Homo sapiens
  SIMILAR (784)..(2460): 871254mologous to Homo sapiens putative p150,accession number U93563,Smith-Waterman Score=2393.
atgcttggagagatgatgtttggctcagtagcaatgagctacaaaggatccaccttaaaaattcatcagattcgttcccctccacagctcatgctcagcaaagtgtttactgctcggactggcagcagtatttgtgggagtctcaatacgctacaagatagtcttgaattcatcaatcaggacaacaatacattaaaggctgataataacacagttattaatggactgcttggaaatatagcatctctcagcagcttgctgatcactccatttccttccccaaactcctcacttacccgaagttgtgccagcagctaccagcgacgttggcgacgcagccaaacaacaagtttggaaaatggggtatttcctagatggtctatagaagaaagctttaatctctcagatgaaagctgtggccctaacccaggaattgtgcggaaaaagaagattgcaattggggtaatcttttcattgtccaaagatgaagatgaaaataacaaatttaatgaattctttttttcacattttcctctctttgaaagccacatgaacaaattaaagagtgcaatagaacaggctatgaaaatgagccggagatcagctgatgccagtcagagaagtttggcatataatcgaatagttgatgccctaaatgaattcagaacaacaatttgtaatctttacacgatgccacgaattggagaacctgtctggcttacaatgatgtcggggactccagaaaagaaccacctttgctatcgtttcatgaaggagttcacctttctaatggaaaatgcttccaaaaatcaattcttgccagctctcattactgcagttctgaccaatcatcttgcctgggttccaacagtcatgccaaatggacaaccacctataaaaatatttttagaaaagcattcctctcagagtgtggacatgttggcaaagactcatccatataacccactttgggcacaactgggagacttgtatggcgctattggctctcccgtacggttagcaaggactgtggtagttggcaaacgacaagacatggtccagaggctactttattttcttacttattttataagatgctctgaacttcaagaaacgcatcttttagaaaatggagaagatgaagccatcgttatgccaggcacagtaattactaccactttagagaaaggtgaaatagaagaatcagagtatgtccttgtcacaatgcatagaaacaaaagcagtttgctctttaaagagtcagaagaaattagaactcccaattgtaactgtaaatattgcagtcatccactccttgggcaaaatgtagagaacatttcacaacaagagagagaagatattcaaaacagctctaaggagctgctaggaatttcagatgagtgccggatgatttctccttctgactgccaagaagaaaatgctgttgatgttaaacagtacagagataaattaagaacttgctttgacgccaagttagagacagttgtttgcacaggatctgttccagtagacaaatgtgcattgtcagagtcaggcttagagtcaacagaggaaacatggcagagtgagaagttgctggattcagacagtcacacaggcaaagcaatgagatccacaggaatggttgtggaaaaaaaaacctccagataagattgtgcctgcttcattttcttgtgaggctgcccagacaaaggttactttcctgattggggattctatgtcacctgattcagatactgagcttcgaagtcaggcagtggtggatcagattaccagacatcacaccaaaccattgaaggaagaaagaggggctattgatcagcatcaagaaactaaacaaacaaccaaggaccaatctggagagtctgatacacagaacatggtttctgaagagccctgtgaacttccctgttggaatcattcagacccagaaagcatgagcttattcgacgaatattttaatgatgattcaatcgaaaccaggactattgatgatgttccatttaaaacaagtacagatagtaaagaccattgctgtatgttagagttttcaaaaatattgtgtacaaaaaataacaagcagaacaatgaattttgtaaatgtatagaaacagttccccaagattcatgtaaaacctgctttcctcagcaggaccaaagagatacactctccattcttgtcccccatggggataaagagagttcagataaaaaaattgctgtaggaactgaatgggacattccaagaaatgaaagttcagacagtgcccttggggatagtgaaagtgaagatacaggtcatgatatgactagacaagttagcagttattatggaggagagcaagaagattgggcagaagaggatgagataccttttcctgggtcaaagttaatcgaagtgagtgctgttcagcccaacattgccaacttcgggaggtccttgctgggtggctactgctcatcttatgtgcctgactttgttcttcaaggaattgggagtgatgagaggttccgtcagtgtctgatgtcagatttatctcatgctgtgcaggttaagacaattgttaaaaccctctga

SEQ ID NO: 11161 - DNA, 1629 bp, Homo sapiens; identical to SEQ ID NO: 7483
  SIMILAR (1)..(531): 1001254mologous to synthetic construct tet protein,accession number M20189,Smith-Waterman Score=889.

SEQ ID NO: 11162 - DNA, 969 bp, Homo sapiens; identical to SEQ ID NO: 7484
  SIMILAR (200)..(430): 1001254mologous to Homo sapiens proteasome subunit XAPC7,accession number AF022815,Smith-Waterman Score=404.

SEQ ID NO: 11163 - DNA, 1326 bp, Homo sapiens; identical to SEQ ID NO: 7485
  SIMILAR (91)..(999): 781254mologous to Homo sapiens putative p150,accession number U93567,Smith-Waterman Score=1202.

SEQ ID NO: 11164 - DNA, 1269 bp, Homo sapiens
  SIMILAR (1145)..(1849): 481254mologous to Rattus rattus proteasome subunit RC6- 1,accession number D30804,Smith-Waterman Score=348.
atgggcaaggacttcatgactaaaacaccaaaagcaattgcaacaaaagccaaaattgacaaatgggatctaattaaactaaagagctgcgcagcaaaagaaactaccatcagaattttggaggaacaggtggtatttggtgacatgatactgttgctttttgtgaagtgcagggagggggatccacctttggacccatgtgaatgggtgttggttgtggtggtgtcagctgcttgggttggtctaacctcaggccctgagaaatgtggtcaggtgccagcagacttaggatgggactccgctggtgatacccaggcaaacaggtctggagtggacctccagcaaactctaacagacccacagctgagggtcctgactgttaaaaggaaaactaacaaacagaaaggacatccacaccaaaaccccatctgtacgtcaccatcatcgaagaccaaagcctggcagagacacaacaaaaaagataattttaaaccaatatccctggtgaacatcaatgcaaaaatcctcaataaaatactggcaaaccgaatccagcagcacatcaaaaagcttatccacaatgatcaagttggcttcatccttgggatgcaagaattggaaaaaactataaagttcatatggaaccaaaaaagagcccgcattgccaagacaatcctaagccaaaagaacacagctagaggcatcacactacctgacttcaaactatactacaaggctacagtaaacaaaacagcatggtactgctatcaaaacagagatatagaccaatggaagaggacagagcccccggaaataataccacacatctacaaccatctgatctttgacaaatctgacaaaaacaagcaatggggaaaggattcccaatttaataaatggtgctgggaaaactggctagccatatgtagaaagctgaaactggatcccttccttacatcttatacaaaaattaattcaagatggattaaagacttaaatgttagacctaaaaccataaaaaccctagaagaaaacctaggaaataccattcaggacataggcatgggcaaggacttcctgactaaaacaccaaaagcaatggcaacaaatgccaaaattgacaaatgggatctaattaaactaaagagcttctacacaggaaaagaaactaccatcagagtgaacaggcgacctgcagaatgggagaaaatttttgcaatctacccatctgacaaagggctagtatccagaatctacaaagaactttaa

SEQ ID NO: 11165 - DNA, 1677 bp, Homo sapiens
  SIMILAR (1)..(1371): 811254mologous to Homo sapiens HSPC021,accession number AF077207,Smith-Waterman Score=1845.
atggatgtttatagcagctgtattcagaattgccagcacttggaagcaaccaagatatttttcagtaggcaaacaggatcagaagcggacctccagaaaactccagcagacctgcagcagaggggcctaatggttagaaggaaaactaacaaacagaaaggaatagcatcaatatcaacgaaaaggacatccacgcaaaaacacaatccaaaggtcaccaacattaaagaccaaagccaatatcatactgaatgggcaaaagctggaagcattccctttgaaaactggcacaagacaaagatgccctctctcaccactcctattcaacatggtattggaagttctggccaggtcaatcaggcaagagaaagaaataaaagtattcaaataggaagagaggaagccaaattgtctctctttgcagatgacatgattgtatatttagaaaaccccatcgtctcagcccaaaatctccttaagctgataagcaacttctgcaaagtctcaggatacaaaatcaatgtgcaaaaatcacaagtgttcctatacaccaataacagacaaacagagagccaaatcatgagtgaactcctattcacaattgctactaagagaataaaatacctaggaatccaacttacaagggatgtgaaggacctcttcaaggagaactacaaactgctgctcaaggaaataagagaggacacaaacatatggaaaaacattccaggctcatggataggaagaatcaatatccctccgctgctgatacccaggcaaacagggtctggagtggacctccagcaaactccaacagacctgcagctgagggtcctgactgctacaaggaaaactaaccaacagaaaggacatccacaccaaaaccccatctgtacatcaccatcatcaaagaccaaaggcagatcaacaagacagaaagttaacaaggatatccaggaattcaactcagctctgccccaagtggacctaatagatatctacagaactctccaccccaaatcaacagaaaatacattcttctcagcaccacaccacacttattccaaaattgatcacatagttggaagtaaagcactcctcagcagatgtaaaagaacagaaattataacaaactgtctctcagaccacagtgcaatcaaattagaactcaggattaagaaactcactcaaaactgctcaactacatggaaactgaacaacctgcttctgaatgacaactgggtacataacgaaatgaaggcagaaataaagatgttctttgaaaccaatgcgaacaaaaacacaacataccagaatctctgggacacatttaaagcattgtgtagagggaaatttatagcactaaatgcccacaagagacagcaggaaagatctaaaactgacaccctaacatcacaattaaaagaactagagaagcaagagcaatcacattcaaaagctagcagaaggcaagaaataactaagatcagagcagaactgaaggagatagggacacaaaaaatccttcaaaaaatcaatgaatccaggagctggttttttgaaaagatcaacaaaattgatagactgctagcaagactaataaagaagaaaagagagaagaatcaaacagatgcaataaaaaatgataaaggggatatcaccaccgattccacataa

SEQ ID NO: 11166 - DNA, 1122 bp, Homo sapiens
  SIMILAR (1)..(330): 331254mologous to Methanothermobacter thermautotrophicus ribonuclease PH,accession number AE000848,Smith-Waterman Score=140.
tcacatttgacaaagatcggatagttgtagatatgtggcattatttctgagggctctgttccattggtctatatctctgttttggtaccagtaccatgctgttttggttactgtagccttgtagtatagtttgaagtcaggtagcgtgatgcctccagctttgttctttcggcttaggattgacttggcaatacgggctcttttttggttccatatgaactttgaagtagttttttccaattctgtgaagaaagtcattggtaacttgatggggatggtgaatctataaattaccttgggcagtatggccattttcatgatattgattcttcctacccatgagcatggaatgttcttccatttgtttgtatcctcttttatttccttgagaagtggtttgtagttctccttgaagaggtccttcatgttccttgtaagttggattcctaggtattttattctctttgaagcaattgtgaatgggagttcactcatgtttggctctctgtttgtcagctcctccttgtacctctggtagaattcggctgtgaatccatctggtcctggactttttttggttggtaagctattaattattgcctcaatttcagagcctgttattggtctatgcagagattcaacttcttcctggtttagtcttgggagggtgtatgtgtcaaggaatttatccatttcttctagattttccagtttatttgcatagaggtgcttgtagtattctctgatggtagttcgtatttctttggtctttgatgatggtgacgtacagatggggttttggtgtggatgtcctttctgtttgttagttttccttccaacagtcaggagcctcagctgcaggtctgttggagtttgctggaggtccactcctgaccctgtttgcctgggtatcagcagcggaggaacagctgttggccccgtggcagttgtgatgtagttattacctgaagacacaaaaacttgccaaatctcttggtatcgaggaaagatgtgtggatttcctgtcatatctctctccttatttagggactcatcattaatagtgtcagtggatttcttctttcttctgtgtgtcaacagcagacctacacttgatagcat

SEQ ID NO: 11167 - DNA, 2139 bp, Homo sapiens
  SIMILAR (540)..(4): 711254mologous to Homo sapiens dJ475N16.3 (novel protein similar to RPL7A (60S ribosomal protein L7A)),accession number AL035587,Smith-Waterman Score=612.
atggatgaagctggaaaccatcattctcagcaaactaacacaggaacagaaaaccaaacaccacatgttctccctcataagtgggagttgaacaatgagaacgcatggacacaaggaggggaacatcacacactgggacctgttggaagtgttggaagttctggccagggcaatcaggcaagagaaagaaataaagatattcaattaggaaaagaggaagtcaaattggccctgtttgcagacaacatgattgtatatttagaaaaccccatcatctcagcccaaaatctccttaagctgataagcaacttcagcaaagtctcaggatacaaaatcaatgtacaaaaatcacaagcattcttatacatcaataagagacaaacagagatccaaatcatgagtgaactcccattcacaactgcttcaaagagaataaaatacctaggaacccaaattacaagggatgtgaaggacctcttcaaggaggactacaaacaactgctcaacaaaataaaagaggacacaaacaaattgaagaacattccatgctcatggataggaagaatcaatatcatgaaaatggccatactgcctaagcctaactgggaggcaccacccagtaggggcagactgacacctcacacggccaggtacccctctgagacaaagattccagaggaacaatcaggcagcaacatttgctgttcagcaatattcacggttctgcagcctccgctgctgatacccaggcaaacaaggtctcgagtggacctccagcaaactccaacagacctgcagctgaggctcctgactgttagaaggaaaactaacaaacagaaaggacaaccacaccaaaagcccatctgtacgtcaccatcatcaaagaccaaaggagaactacgtgatgaatgcacaagcttcagtagccgatttgatcaactggaagaaagggtatcagtgactgaagatcaaatgaatgaaatgaagcgagaagagaagtttagagaaaaaagaataaaaagaaacgaacaaagcctccaagaaatgtgggactatgtgaaaagaccaaatctacgtctcattgatgtacctgaaagtgacagggagaatggaaccaagttggaaaacactctgcaggacattatcctggagaacttccccaatctagcaaggcaggccaacattcaaattcaggaaatacagagaatgccacaaagatactcctcaagaagagcaactacaagaaacctaattgtcagattcaccaaagttgaaatgaaggaaaaaatgttaagggcagccagagagaaaggtcgggttacccacaaagggaagcccatcagactaacagcagatctcttggcagaaactctgcaagccagaagagagtgggggccaatattcaacattcttaaagaaaagaattttcaacccagaatttcatatccagcaaaactaagcttcataagtgaaggagaaataaaatactttacagagaagcaaatgctgagagattttgtcaccactagccctgccctagaagagctcctgaaggaagcactaaacatggaaaggaacaaccgaacaacaagacagaaagttaacaaggatatccaggaattgaattcagctctgcaccaagcagacctaatagacatctccagaactctccaccccaaatcaacagaatatacattcttctcagcaccacatcacacttattccaaaattgaccacatagttggaagtaaagcactcctcagcaaatgtaaaagaacagaaattataacaaagtgtctctcagaccacagtgcaatcaaactagaactcaggattaagaaactcactcaaaactgcacaactacatggaaactgaacaacctgctcctgaatgactactgggtacaaaatgaaatgaaggcagaaataaagatgttctttgaaaacaatgagaacaaagatacaacataccagaatctctgggacacatttaaagcagtgtgtagagggaaatttatagcactaaatgcccacaagagaaagcagaaaagatctaaaactgacaccctaacatcacaattaaaagaactagagaaggaagagaaacacattcaaaagctagcagaaggcaagaaataa

SEQ ID NO: 11168 - DNA, 924 bp, Homo sapiens
  SIMILAR (460)..(900): 711254mologous to Homo sapiens putative p150,accession number U93563,Smith-Waterman Score=494.
  misc_feature (1)...(924): n = a,t,c or g
atggagggaagccctagngtcgncntaatgggncttangaccgaagtcccgggagttcacagtgagaatgataagaatcagaagaagaaaataagaaaactagaccctaaaaagaaacaggtggacacagtgcagataatccagggtagcaaaaaagggtctagttttcttattttcttcttctcccctcttatcattctcactgttgaactgcaagttgggaatgtagttgctcaggaactctccatccagttggagctgttttggagaactagagcttctcagtctgtgacagagccaacagcaggtctttgcttattaaatcctggtgaacaggagatgcgggcgttaagagggaggagaaagcctctgctgctgatacctaggcaaacaggatctggagtggacctccagcaaactccaacagacctgcagctgagggttctgactgttagaaggaaaactaacaaacagaaaggacatccacaccaaaaccccatcttgttggaagttctggccagggcaatcaggcaggagaaggaaataaagggtatccagttaggaaaagaggaagtcaaattgtccctgtttgcaggtgacatgattgtatatctagaaaaccccattgtctcaacccaaaatctccttaagctgataagcaactgcagcaaagtctcaggatacaaaatcaatgtgcaaaaatcacaagcattcttatacaccaataacaaacaaacagacagccaaatcatgagtgaactcccattcacaattgcttcaaagagaataaaatacctcagcaatccaacttacaagggatgtgaaggacctcttcaaggaaaactacaaaccattgctcaacgaaataaaacagaaccaaacaaatggaagaacattccagtcatgggagaagaaccaatgtga

SEQ ID NO: 11169 - DNA, 3519 bp, Homo sapiens; identical to SEQ ID NO: 6604
  SIMILAR (1942)..(2364): 921254mologous to Homo sapiens dJ475N16.3 (novel protein similar to RPL7A (60S ribosomal protein L7A)),accession number AL035587,Smith-Waterman Score=632.

SEQ ID NO: 11170 - DNA, 1167 bp, Homo sapiens
  SIMILAR (27)..(530): 261254mologous to Escherichia coli pspA protein,accession number X57560,Smith-Waterman Score=83.
ttattgatttgcatatgttgaaccaggcttgcgtcccagggatgaagcccacttgatcatggtggatagctttttgatgtgctgctggattcggtttgccagtattttatcgaggatttttgaatcgatgttcttcagggatattggtctaaaattctctttttttgttgtgtctctgccaggttttggtatcaggatgacgctggtctcataaaatgagttagggaggattgcctctttttctgttgattggaatagtttcagaaggaatggtaccagctcctccttgtacctctggtagaatttggctgtgaatccatctggtcctggactttttttgattggtaaactattaattattgcctcaatttcagagcatgttattggtctcttcagagattcaacttcttcctggtttagtcttgggagagtgtatgtgtcaaggaatttatccgtttcttctagattttctttggtctttgatgatggtgacgtacagatggggttttggtgtggatgtcctttgtgtttgttagttttccttctaacagtcaggaccctcagctgcaggtctgttggagtttgctggaggtccactccagaccctgtttgcctgagtatcagcagtggaggctgtttgcttctccaggcctgtatttcaattgtgcttaaggcccatttgaggaatgtatccatttcttctagattttctagtttatttgcgtagaggtgtttgtagtattctctgatggtagtttgtatttctgtgggatcggtggtgatatcccctttatcattttttattgtgtctatttgattcttctctctttttttctttattagtcttgctagcagtctatcaattttgttgatcctttcaaaaaaccagctcctggattcattgatttcttgaagggttttttgtgtctctatttccttcagttctgctctgattttagttatttcttggcttctgccagcttttgaatgtgtttgctcttgcttttctagttcttttaattgtgatgttagggtgtcaattttggatctttcctgctttctcttgtaggcgtttagtgctataaatttccctctacacactgctttgaatgcgtcccagagattctggtatgtggtgtctttgttctcgttggtttcaaagaacat

SEQ ID NO: 11171 - DNA, 1587 bp, Homo sapiens; identical to SEQ ID NO: 2482
  SIMILAR (793)..(951): 331254mologous to Homo sapiens Human 5' EST secreted protein SEQ ID NO:487,accession number Y12456,Smith-Waterman Score=73.

SEQ ID NO: 11172 - DNA, 1763 bp, Homo sapiens
  SIMILAR (1584)..(1222): 971254mologous to Homo sapiens UDP-GalNAc:polypeptide N- acetylgalactosaminyltransferase (GalNAc-T3),accession number X92689,Smith-Waterman Score=623.
ttaggtcccatttgtcaattttggcttttgttgccattgcttttggtgttttaacatgaagtccttgcccatgcctatgtcctgaatggtattgcctacattttcttctagggtttttatggttttaggtctaacatttaagtcttcaatccatcttgaattaatttttgtataaggtgcaaggaagggatccagtttcagctttctacatatggctagccagttttcccagcaccatttattaaatagggaatcctttccccatttcttgtttttgtcaggtttgtcaaagatcagatggttgtagatatgcggcattatttctgagggctcttttctgttccattggtctatatctctgttttggtaccagtaccatgctgttttggttactgtagccttgtaatatagtttgaggtcaggtagcatgatgcctccagctttgttcttttggcttaggattgacttggcaatgcgggctcttttttggttccatatgaactttaaagtagttttttccaattctgtgaaaaaagtcattggtggcttgatggggatggcattgaatctataaattaccttgggcagtatggccattttcatgatattgattcttccaacccatgagcatgtaatgttcttccatttgtttgtatcctcttttatttcattgagcagtggtttgtagttctccttgaagaggtccttcatgtcccttgtaagttggatccctagatattttattctcagctcctccttgtacctctggtagaatttggctgtgaatccatctggtcctggactttttttggttgttaagctattaattattgcctcaatttcagatcctgttattggtctattcagagattcaacgtcttcctggtttagtttgatttcattcatttgatcttccatcagtgataccctttcttccagttgatcaaatcggctactgaggcttgtgcattcatcacatagttttcgtgccttggcttttggctccatcaggtcctttaaggacttctcgatggggttttggtgtggatgtcctttctgtttgttagttttccttctaacagtcaggaccctcagctgcaggtctgttggactttgctggaggtccactccagaccctgtttgcctgggtatcagcagtggaggctgccgaacagcggatattggtgagcagcagatgttgctgcctgatcgttcctctgaaagttttgtctcagaggagtacctggccgtgtgaggtgtcagtctgcccctactggggagtgcctcccagttaggcttctcgggggtcagggacccacttgaggaggcaatctgtccattctcagatctccagctgcgtgctgggagaaccactactctcttcaaagctgtcagacacggacatttaagtctgcagaggattctgctgccttttgtttggctattcccccatcttctcttggggacgccagtgacacgtgtggttgcattggctccaccttggactcgcccctgtccctgtttgcacttgtcctggaaagcggtgtcttctcgcaggagccccagtgctttgggaagcaggacaggccactggtccgttgtcttagaaaccagtccctgaggcttggcaaagcaggagccctccgtggcagtgcttggctgtcggggctccgaggctccggcctgacctctccacggggtcgacaggaacgtctccggatgccacgagtcgcacagaggtaggacttcatcatttcttcttc

SEQ ID NO: 11173 - DNA, 2004 bp, Homo sapiens
  SIMILAR (688)..(2001): 891254mologous to Homo sapiens putative p150,accession number U93563,Smith-Waterman Score=2155.
atggcttcatctgcaaaccaagccttcactggacaccgtaaggaaagtgaagctgcccttctgttggttcagtttgctcctccagctcaaaaaactatgaaagcatatataaagaatgaggaaacaaatgggccaagggtagatatctatgaagcaccagcatttaaggggggcagactgacacctcatatggacgggtacccctctgagatgaaacttctagaggaacgatcaggcagcaacatttgctgttcaccaatattcgcggttctgcagcctccgctgctgatacccaggcaaacagggtctggagtggacctccagcaaactccaacagacctggagctgagggtcctgacttttagaaggaaaactaacaaacagaaaggacatccataccaaaaccccatctgtacatcaccatcatcaaagaccaaagaaatacaaactaccatcagagaatactataaacacctctatgcaaataaactagaaaatctagaaggaatggataaattcctcgacacatacaccttcccaagactaaaccaggaagaagttgaatctctgaatagaccaataacagcctctgaaattgagacaataattaatagcttaccaaccaaaaagagtccaggaccagatagattcacagccgaattctaccagaggtacaaggaggaactgctgataagcaacttcagcaaagtctcaggatacaaaatcaatgtgcaaaaatcacaagtattcttatacaccaataacagacaaacagagtgtcaaatcatgagtgaactcccattcctaactgcttcaaagagaataaaatacctaggaatccaacttataagggatgtgaaggacctcttcaaggagaactacaaaccactgctcaacaaaataaaagaggatacaaacaaatggaagaacgttccatgctcatggataggaagaatcaatattgtgaaaatggctgtactgcccaaggtaatttatagattcaacaccatccccatcaagctaccaatgacttccttcacagaattggaaaaaactactttaaagttcatatgggaccaaaaaagagtctgcattgccaagtcaatcctaaaccaaaagaacaaagctggaggcatcacgctacctgacttcaaactatactacaaggctacagttaccaaaacagcatggtactggtatcaaaacagagatatagatcagtggaacggaagagagccctcagaaataataccacacatctacaactatctgatctttgacaaacctgacaaaaacaagaaatgggggaaggattccctaattaacaaatggtgctgggaaaactggctagccatatgtagaaagctgaaactggatcccttccttacatcttatacaaaaattaattcaagatggattaaagacttaaatgttagacttaaaaccataaaaaccctagaagaaaacctaggcaataccattcaggacacaggcgtgggtaaggacttcatgtctagaacaccaaaagcaatggcaacaaaagccaaaattgagaaatgggatctaattaaactagagagcttctgcacagcaaaagaaactaccatcagagtgaacaggaaacctacagaatgggagaaaattttcgcaacctactcatctgacaaagggcttgtatccagaatctacaatgaactccaacaaatttacaagaaaaaaacaaacaaccccatcaaaaagtgggcaaaggatatgaacagacacttctcaaaagaaaacatctatgcagccaacagacacatgaaaagatgctcatcatcactggccaccagagaaatgcaaatcaaaaccacaatgaaataccatctcacaccagttagaatggcgatcattaaaaagtcaggaaacaacaggtgctggagaggatgtgtacaaataggaacacttttacaccgctggtgggactgtaaagtagttcaaccattgtggaagagagtgtggtga

SEQ ID NO: 11174 - DNA, 741 bp, Homo sapiens
  SIMILAR (539)..(417): 901254mologous to Homo sapiens Human secreted protein, SEQ ID NO: 4473,accession number G00392,Smith-Waterman Score=209.
atgaacatcaacaaaaagggcatccacacagaaaccttatccgaaggtcaccaacatcaaagaccaaaggtagataaagccacgaagatgaggaaaaaccagcacaaaaaggctgaaaattccaaaaaccagagcacctcttctcctccaaaggatcacaactcctcaacagcaaggaaacaaaactggatggagaatgattttgacgaattgatagaagtaggcttcagaagtcttagcaaatggcacaccaggagattatatcccgcatctagctcagagggtcccacgcccacggagcctcggtcactgctagcacagcagtctgagattgaactgaaagctgggtgcccctctgagatgaagcttccagaggaaggatcaggcagcaacatttgtcgttctgcaatatttgctgtgctgcagcctctgctggtgatacccaggcaaacagggtctggagtggacctccagcaaactccaacagacctgcagctgatggtcctgactgttagaaggaaaactaacaaacagaaaggacacccacaccaaaaccccatgtgtacgtcaccatcatcaaagaccaaagagctaaaggaggatgttcgaacccatcacaaagaagctaaaaaccttgaaaaaagattagacaaatggctaactagaataaacagcatagagaagaacttaaatgacctcatggagctgaaaagcatggtacgagaactacatgacgcatga

SEQ ID NO: 11175 - DNA, 1368 bp, Homo sapiens
  SIMILAR (1272)..(439): 991254mologous to Cloning vector pSacBII RepL,accession number U09128,Smith-Waterman Score=1401.
atggggctgaaagctctgactgggggagcagccttgactcgtcctctcactgtccctcagaggagggaggaggacaaagtgtggcctccgctgctgatacccaggcaaacagggtctggagtggaccaccagcaaactccaacagacccgcagctgaggatcctgactgttagaaggaaaactaacacacagaaaggacatccacaccaaaaccccaactgtacatcaccatcatcaaagaccaaagagctaaaggaggaagttggaacccaacgcaaagaagttaaaaaccttgaaaaaagattagacgaatggctaactagaatagccaatgcagagaagtccttaaaggacctgatgcagctgaaaaccatggcacaagaactccaaatacaaactaccatcagagaatactataaacacctctatgcaaataaactagaaaatctagaagaaatggataaattcctcgacacatacactctcccaagactaaaccaggaagaagttgaatctctgaatagaccaataacaggctctgaaattgaggcaataattaatagcttaccaaccaaaagaagtccaggaccagatggattcacagccgaattctaccagaggtacaaggaggagctgtgttggaagttctggccagggcgatcaggcaggaaaaaagaagtaaagggtattcaattaggaaaagaggaagtcaaattgtccctgtttgcagatgacatgattgtatatttagaaaaccccatcatctcagcccaaaatctccttaagctgataggcaacttcagcaaagtctcaggatacaaaatcaatgtacaaaaatcacaagcattcctgtacaccaataacagagaaacagagagccaaatcatgagtgaactcccattcacaactgcttcaaagagaataaaatacctaggaatccaacttaccagggatgtgaaggagctcttcaaggagacctacaacccactgctcaatgaaataaaagaggatacaaccaaatggaagaacattccatgctcatgggtaggaagaatcaatatcgtgaaaatcgccatactgcccaaggtaatttgtatattcaatgccatccccatcaagctaccaatgactttcttcacagaattggaaaaaactactttgaagttcatacggaaccaaaaaagagcccgcattgccaagtcaatcctaagccaaaagaacaaagccggagacgtcacgctacctgacttcaaactatactacaaggctacagtaaccaaaacagtatggtactggtaccaaaacagagatatagaccaatggaacagaacagagccctcagaaataatactgcatatctacaactaa

SEQ ID NO: 11176 - DNA, 3924 bp, Homo sapiens
  SIMILAR (1272)..(439): 991254mologous to Cloning vector pSacBII RepL,accession number U09128,Smith-Waterman Score=1401.
atgggcagtctcctccagtcctccaaggacaaattgaggagttatttgctctgggggtggagagacaaaggagatgggttgctacccttgctgtctgcagctttttatgtgatggtaggagaagttctaagcaaagactcttgcacaggcactgctcagatacagggcactgtccccacagatgtgcctacttcatcttggtgcacaggtacctgttatggttcctgcccactgaaggcaatgtgccccccacactcttctccagcccagggaagccagacgctcaccagctcccagtcagaatggtccctctgcctttctgtcttccctgatcttgatccctccaaagcatgtggctgccctttgggctgtctgatatttgctggggctggcctggggccgccccttgggctgtctgatatcagcttgggctttgttggcagtagcactgcagtgggacatatggtccttgccaagtatctcatcaagagggatgcagtgcccctttgccccatgctggtgatgttagctttatccctgggcagaaagggtgtcgggcaagatgcaggaagtgaggctcctggggtcattctcctcaccctggttgtgtccagggtgtgtgcttactccccggtggtcccgtgggcagtaaggatggccacagtgctgcaggccactgtgttcctgcaagcaaggagacaccacactggggaactgtatgtcagattcctgcccaagccccaggtctggcacagaggaagactgtggagagcaacacctccctgccctgctctttcccaccctgctctgcgtgtcttgatgtctagcaggtgtgttctgatctctcctgatgtggaccccagtggaggcactgcttcgacaggaagcatggtgctgccagggcaggatgtgcgccaggatgcctctggctgcgctaggctgaaggggtgctttggaaggccacggtgctgcagggcatgtaggttggagggtcctggctgggagccagctaagcctcaggttcctgctgcctctgggtttgtgtggttctggccagatcctcgagggctcctgcccttggaagcccaccattatctggagaagtgcatgtccacatctggcaaagcaaggggtcagccgcaggtgactgaagagtttagttccaggcagaatgaaacccctgttgttggtgagacaaaactttcagaggaacgatcaggcagcaacatttgctgtgcaccaatatccgctgttctgcagcttctgctgctgatacccaggcaaacagggtctggagtggacctccagcaaactccaacagacctgcagctgagggtcctgaatgttagaaggaaaactaacaaacagaaaggacatccacaccaaaaccccatctgtatgtcaccatcatcaaagaccaaagagaagtccttaaaggacctgatggagctgaaaaccaaggcacgagaactatgtgatgaatgcacaagcctcagtagccgaatcgatcaactggaagaaaggatatcagtgatggaagatcaaatgaatgaaatgaagcaagaagagaagtttagagaaaaaataatagaaagaaatgaacaaagcctccaagaaatatgggactatgtgaaaagggcaaatctatgtcggattggtgtacctgaaaatgatggggagaatggaaccaagttggaaaacactctgcaggatattatccaggagaacttccccaatctagcaaggcaggccaacattcagattcaggaaatacagagaactccacaaagatactcttcgagaagagcaattccaatacacataattgtcagattcaccaaagttgaaatgaaggaaaaaatgttaagggcagccagagagaaaggtcaggaatgcagttcttcaccagcaacagaacaaagctggacggagaatgacgagttgagagaagaaggcttcagacaatcaaactactccgagctacaggaggaaattcaaaccgaaggcaaggaagttaaaaactttgaaaaaaatttacacgaatgtataactagaataaccaatacagagaagtgcttaaaggagctgatggagttgaaagccaaggctcgagagctacgtgaagaatgcagaagcctcaggagccgatgcaatcaactggaagaaaggatatcagtgatggaagatcaaatgaatgaaatgaatgacagggagaatggaaccaagttggaaaacactctgcaggatattatccaggagaacttccccaatctagcaaggcaggccaacgttcagattcaggaaatacagagaacgccacaaagatactcctcgagaagagcaactgcaagacacataattgtcagattcaccaaagttgaaatgaaggaaaaaatgttaagggcagccagagagaaagaaaagcaagagcaaacacattcaaaagctagcagaaggcaagaaataactaaaatcagagcagagctgaaggaaatagagacacaaaaaacccttcaaaaaattaatgaatccaggagctggttttttgaaaggatcaacaaaattgatagactgctagcaagactaataaagaagaaaagagagaagaatcaaatagatgcaataaaaaatgataaaggggatatcaccaccgatcccacacaaatacaaactaccatcagagaatactacaaacacctctatgcagataaaccagaaaatctagaagaaatggataaattcctcgacacatacaccctcccaagactaaaccaggaagaaattgaatctctgaatagaccaataacaggctccgaaattgtggtaataatcaatagcttaccaatcaaaaagagtccaggaccagagggattcacagccgaattctaccagagatctaccttacgacaagaagaagagaagagaaaaaatgccagtgcattgtatgaaaaaatcaggggacacttaagaagaaaagaagagcagtacaggaaagaagttgaagcaaacaaacaacttcagctgacgctgagaacacgagatacggaattgaggacagtaagaaatcatttgaaccaggttgtacaagagctaaatgacacccagaggcaactttctcgggaacagaacgccagaatattacaagatgaaattctgaccaatcacctttgcaaacaaaaggagatagcactggctcgaaggaaaaggaattctcagattcctcacagccatgacaaagtacaagatctgttgcatgaaaatcgcatgttgcaggacgaaattgccaccctcagactggaaatagacacaatagaaaaacagaacgaggaaaataaaaagaactattttgaggacattggtgacctgcaaaagacaataaaacggaatggggaaatattaacaacaatgatatccgagtatactgcacagcttggtgtcctgacagctgagaataccatgctccattctcaactggagagggaaaaacaaaagaaagaaagcctggagacagaagttgaatcacaccgttgcagactggctgctgttagacgtgattgtgaacaaagtgagacatccaaaagagacgtggaacttgctttccagggagcaaaagatgaatggtttcatttaccggagaaaatgaattttgatgacctaaaagctaacagtgtccttcgttctcagcaactgtctagaactcaaagtaacttggaaagcctaagccttaagttccaacacacaagagatgctcttacagaaaagcagaaaagaggtttgtttcagaatgcatgggaagagacctacgccaaacccagtgtcaaatccaggaaattcaacaaatgtatcaaaataaacaatgtaactgaaggaattcattggaaagcaggaatctgtagaggcgaggctgtctcaactgcagagtga

SEQ ID NO: 11177 - DNA, 2322 bp, Homo sapiens
  SIMILAR (100)..(1419): 931254mologous to Homo sapiens putative p150,accession number U93574,Smith-Waterman Score=2128.
atgactcttaacgagcatgctgctttcaagcatctgtttaacaaagcacatcttgcaccgcccttaatccatttaaccctgagtggacacagcacatgtttcagagagcacagggttggagccaaatccaacaatccaccagccagcaaaggagtctgggcgttgcagtctgcaagggtcaagtttgcagagaccacagcagggcagaaagggatgaatacaacttgggtcttttattacccaaatgtggcctccacctggtggggggccatgatacctgtacacgtggttttacctggaggctgccatgatgccagcacacttggtgacaaggaaaagagggcaggggaggctgtattgaatgtacctggcttccaggactctctcgaaagccatggaaggatagtcaactgccttatcccagatgtgcaagagaacaatccttcaacagggaacgagagctggttgaaaagtcaccagaggctgggggagcccacatcaagacgctggttaatcaccctgccagtcacatcaagatcaaactccatagggcatcttaaaggaacaccaggaaaaagcaaggaggaaataaaggcaactgtgtgtgctccaactttgaaaaatggattttggattgctgagcgggtcatgactgttagtggacacgagggggcagcctcatcccgggctctgagggaagagctacggcttcttttttcctcctgtgcacagggcagactgacacctcacatagccgggtacccctctaaggcgaagctccgagaggaacgatcaggcagcaacatttgctgttcagctatattcgctgtactgcagcctctgctgctgatacccaggggaacagggtctggagtggacctcctgcaaactccaacagacctgcagctgagggtcctgactgttagaaggaaaactaacaaacaggaaggacatccacaccaaaaccccacctgtacatcaccatcatcaaagaccaaagatagatccacgagacggaacgttaagaaggatacccaggaattgaactcagctctgcgccaagtggacctaatagacatctacagaactctccaccccaaatcaagagaatataccttcttctcagcaccacatcgcacttattccaaaattgaccacacagttggaagtaaagcactcctcagcaaacgtaaaagaacagaaattataacaaactgtctctcacaccacagtgcaatcaaactggaactcaggattaagaaactcactcaaaaccgctcaactacatggaaactgaacaatctgctcctgaatgactactgggtacataacgaaatgaaggcagaaataaagatattctttgaaaccaacgagaacaaagacacaacataccagaatctctgggacacatttaaagcagtgtgtagagggaaatttatagcactaaatgcccacaagagaaagcaggaaagatctaaaattgacaccctaacatcacaattaaaagaactagagaagcaagagcaaacacattcaaaagctagcagaaggcaagaaataactaagatcagagcagaactgaaggagatagagacacaaaaaaaccttcaaaaaatcaatgaattcaggagctgcctggcagagacacaacaaaaaaaaaagaattttggaccaatacccctgatgaacatcaatgcaaaaatcctcaataaaataccggcaaaccaaatccagcagcacatcaaaaaggttatccgccatgatcaagtgggcttcatccctgggatgcaaggctggttcaacatacgaaaatcaataaacgtaatccatcatataaacagaaccaaagacaaaaaccacacgattatctcaatagatgcagaaaaggcctttgacaaaattcaacagcccttcatgctaaaaactctcaataaattaggtattgatgggacgtatctcaaaataataagagctacttatgacaaacccacagccaatatcacagtgaatgcgcagaaactggaagcattccctttgaaaactggcacaagacagggatgccctctctcaccactcctattcaacatagtgttggaagttctggccagggcaatcatgcaggagaaagaaataaagggtattcaattaggaaaagaggaagtcaaattgtccctgtttgcagatgacatgattgtgcatttagaaaaccctatggtctcagcccaaaatctccttaagctgataagcaacttcagcaaagtctcaggatacaaaatcaatgtgaaaaatcacaagcattcttatgcaccaataacagactaa

SEQ ID NO: 11178 - DNA, 3546 bp, Homo sapiens
  SIMILAR (418)..(1005): 1001254mologous to Escherichia coli transposase,accession number X60200,Smith-Waterman Score=1035.
atgctggacaaaggcatgggcaaagactccatgtccaaaacaccaaaagcaacggcaacagaagccaaaattgacaaatgggatctcattaaactaaagagctgctgcacagcaaaagaaactatcatcagattggaaaatggatataccttatttgattatgatgttggactgaatgatataattcagctgctagttcgcccagaccctgatcatcttcctggcacatctacacagattgaggctaaaccctgttctaatagtccacctaaagtaaagaaagctccgagggtaggaccttccaatcagccatctacatcagctcgtgcccgtcttattgatcctggctttggaatatataagtccatgccacatgccaggacagagacctctgtgggcacatatgaatcccactcgacttctgaactggaggatctgacagagcccgagcaaagagagctcaaaaccaaactcactaaattggaggctgaaattgtaaccctacgccacgtactagcagccaaagagagacgctgtggggaactcaagaggaagttaggcctcaccgccttggtagggctgagacagaatctgtccaagagctggcttgatgttcaggtctccaacacctatgtgaaacagaagacatcagctgctctgtccaccatgggcactctcatctgcaggaagcttggaggcgtgaagaagtcggccacattcagatcttttgaagtccagtgcccctctgagacgaagcttccagaggaaggatcagacagcaacatctgctgttctgcaatatttgcagtcctgcagcctccactggtgatacccaggcaaacagggtctggagtggaccagcagcaaattccaacagacctgcagctgagggtcctgactgttagaaggaaaactaacaaacagaaagcacatccacaccaaaaccccatctgtacgtcaccatcatcaaagaccaaagaaatacaaactaccatcagagaatactataaacacctctacgcaaataaactagaaaatgtagaagaaatggataaattcctggacacatacaacctcctaagactaaaccaggatgaagttgaatccctgattagaccaataacaggttgtgaaattgaggcaataattaatagcctaccaaccaaaaaaagtccaggaccagatggattcacagccgaattctaccagaggtacaaagaggagctggcaccatttcttctgaaactattccaatcaatagaaaaagagggaatcctccctaattcattttgtgaggccaacatcatcctgataccaaagccgggcagagacataacaaaaaaagagaattttagaccaatatcgctgatgaacatcgatgcaaaaatcctcaataaaatactggcaaatcgaatccagcagcacatcagaaagcttatccaccatgatccagttggcttcatccctgggttgcaaggctggttcaacatatgcaaatccataaatttaatccatcatataaacagaaccaaagacaaaaaccacacgattatctcaacagatgcagaaaaggcctttgacaaaattcaacagcccttcatgctaaaaactttcaataaactagacaaacaagagagccaaatcatgagcgaactcccattcacaattgcttcaaagaaaataaaatacctaggaatccaacttacaagggatgtgaaggacctcttcaaggagaactacaaaccactgctcaatgaaataaaagaggacacaaacaaatggaagaacattccatgctcatggataggaagaattaatatcatgaaaatggccatactgccaaaggaaaggcggcgagggagagggaccagaagttctggaaacccttcgaatcttcagtttgcgcgaatcctaccacagtcaggaagcagagttagggttcttattcttgagagctcaatgcccgagtttcccctgtttgagagccgaagacgcggaagagccgcggaagccaggcgaacgctcagccgggccccgccgagcgcgggaagcgagggacctgggcacccagtgcctacggccgctgtcctaccaaatacaaacggcgagatatttgcgctccggacgccctcacttctgaccccgcgcggcgcacctccagttggggctggcagggacccactccccaccattcggcgggactgggccccgcaccccgcgcctcgcgggggctgcccacccgcagcggagccagaagaggcgctggcattcgggccgcacgtcgaacagcgcccacacccgctcgcgcagctcctcaatcgtggctttgcgagacacgtcctcaatggtgcacgtcttggagccatcaatggtgacctgctccacgtgactcgctcttccatgttctgttatcttaatgagaacaaagacaaaacataccagaatctctgggacacattcaaagcagtgtgtagagggaaatttatagcactaaatgcccacaagagaaagcaggaaagatccaaaattgacaccctaacatcacaattaaaagagctacaaaagcaagagcaaacacattcaaaagctagcagaaggcaagaaataactaaaatcagagcagaactgaaggaaatagagacacaagaaacccttcaaaaaattaatgaatccaggagctggttttttgaaaggatcaacaaaattgatagacctctagcaagactaataaagaaaaaaagagagaagaatcaaatagatgcaataaaaaatgataaaggggatatcaccaccaatcccacagaaatacaaactaccatcagagaatactataaacatctctacgcagataaactagaaaatctagaagaaatggataaattccttgacacatacactctcccaagactaaaccaggaagaagttgaatctctgaatagaccaataacaggctctgaaattgaggcaataatcaataccttaccaaccaaaaaaagtccaggaccagatggattcacagccgaattctaccagaggtacaaagaggagctggtaccattccttctgaaactatcccaatcaatagaaaaagagggaatcctccctaactcattttatgaggccagcatcatcctgataccaaagccgggcagagacacaaccataaaagagaattttagaccaatatccttgatgaacattgatgcaaaaatcctcaataaaatactggcaaaccgaatccagcagcacatcaaaaagcttatccaccatgatcaagtgggcttcatccctgggatgcagggctggttcaatatacgcaaatcaataaatgtaatccagcatataaacagaaccacagacaaaaaccacatgattatctcaatagatgcagaaaaggccttcaacaaaattcaacaactcttcatgctaaaaactctcaataaattaggtattgatgggacgtatctcaaaataataagagctatctatgacaaacccacagccaatatcatactgaatgggcaaaaactggaagcattcccttag

SEQ ID NO: 11179 - DNA, 1260 bp, Homo sapiens
  SIMILAR (904)..(1659): 911254mologous to Cloning vector pSacBII RepL,accession number U09128,Smith-Waterman Score=1166.
ttacaatttggcatgtttttgcagtggctggtaccggttgttcctttccatgtttactgcttccttcaggagctctttcagggcaggcctggtggtgacaaaatctctcagcatttgcttgtctgtaaagtattttatttctccttcacttatgaagcttagtttggctggatatgaagttctgggttgaaaattcttttctttaggaatgttgaatattggcccccactctcttctggcttgtagagtttctgccaaaagatcagctgttagtctgatgggcttccctttgtgggtaacccgacctttctctctggctgccattaacattttttccttcatttcaactttggtgaatctgacaattatttgtcttggagttgccgttctcaaggagtatctttgtggcattctctgtatttcctgaatttgaatgttggcctgccttgctagattggggaagttctcctggataatatcctgcagagtgttttccaacttggttcccttctccccgtcactttcaggtacaccaatcagatgtagatttggtcttttcacatagtcccttatttcttggaggctttgtttgtttctttttattcttttttctctaagcttctcttctcgcttcatttcattcatttgatcttccatcactgatacccttttgaggcttgtgcattcatcacatagttctcgtgccatggttttcagctccattgggtcctttaaggacttctctgcattggttattctagttagccattcgtctaattttttttcaaggtttttaacttctttgccatgggttcgaacttcctccattagctcggagtagtttgatcgtctgaagccttcttctctcaactcgtcaaagtcattctccatccagctttgttccattgctgctgaggagctgcattcctttggaggaggagaggcgctctgctttttagagtttccagtttttctgctctgttttttccccatctttgtggttttatctacctttggtctttgatgatggtgatgtacagatggggttttgtgtggatgtcctttctgtttgttagtttcccttctaacagtcaggaccctcagctgcaggtctgttggagtttgctggaggtccactccagaccctgtttgcctgggtatcagcagcggagtctgcagaacagcagatactggtgaacagcaaatgttgctgcgtgatcgttcctctggaagttttgtctcagaggagtacccggccat

SEQ ID NO: 11180 - DNA, 762 bp, Homo sapiens; identical to SEQ ID NO: 988
  SIMILAR (7)..(183): 831254mologous to Homo sapiens cytochrome c-like polypeptide,accession number S80864,Smith-Waterman Score=251.

SEQ ID NO: 11181 - DNA, 986 bp, Homo sapiens
  SIMILAR (286)..(984): 881254mologous to Homo sapiens p40,accession number U93564,Smith-Waterman Score=1038.
cctaactgggaggcaccacccagtaggggcagactgacacctcacacggccaggtacccctctgagacaaagattccagaggaacaatcaggcagcaacatttgctgttcagcaatattcacggttctgcagcctccgctgctgatacccaggcaaacaaggtctcgagtggacctccagcaaactccaacagacctgcagctgaggctcctgactgttagaaggaaaactaacaaacagaaaggacaaccacaccaaaagcccatctgtacgtcaccatcatcaaagaccaaaggagaactacgtgatgaatgcacaagcttcagtagccgatttgatcaactggaagaaagggtatcagtgactgaagatcaaatgaatgaaatgaagcgagaagagaagtttagagaaaaaagaataaaaagaaacgaacaaagcctccaagaaatgtgggactatgtgaaaagaccaaatctacgtctcattgatgtacctgaaagtgacagggagaatggaaccaagttggaaaacactctgcaggacattatcctggagaacttccccaatctagcaaggcaggccaacattcaaattcaggaaatacagagaatgccacaaagatactcctcaagaagagcaactacaagaaacctaattgtcagattcaccaaagttgaaatgaaggaaaaaatgttaagggcagccagagagaaaggtcgggttacccacaaagggaagcccatcagactaacagcagatctcttggcagaaactctgcaagccagaagagagtgggggccaatattcaacattcttaaagaaaagaattttcaacccagaatttcatatccagcaaaactaagcttcataagtgaaggagaaataaaatactttacagagaagcaaatgctgagagattttgtcaccactagccctgccctagaagagctcctgaaggaagcactaaacatggaaaggaacaaccg

SEQ ID NO: 11182 - DNA, 903 bp, Homo sapiens
  SIMILAR (635)..(3): 911254mologous to Homo sapiens putative p150,accession number U93569,Smith-Waterman Score=978.
cagctcctgaattcattgattttttgaaggtttttttgtgtctctatctccttcagttctgctctgatcttagttatttcttgccttctgctagcttttgaatgtgtttgctcttgcttctctagttcttttaattgtgatgttagggtgtcaattttagatctttcctgctttctcttgtgggcatttagtgctataaatttccctctacacactgctttaaatgtgtcccagagattctggtatgttgtgtctttgttctcgttggtttcaaagaatatctttatttctgccttcatttcgttatgtacccagtagtcattcaggagcagattgttcagtttccatgtagttgagcggttttgagtgagtttcttaatcctgagttccagtttgattgcactgtggtgtgagagacagtttgttataatttctgttcttttacgtttgctgaggagtgctttacttccaactgtgtggtcaattttggaataagtgcgatgtggtgctgagaagaaggtatattctcttgatttggggtggagagttctgtagatgtctattaggtccacttggcgcagagctgagttcaattcctgggtatccttcttaacgttccgtctcgtggatctatctttggtctttgatgatggtgatgtacaggtggggttttggtgtggatgtccttcctgtttgttagttttccttctaacagtcaggaccctcagctgcaggtctgttggagtttgcaggaggtccactccagaccctgttcccctgggtatcagcagcagaggctgcagtacagcgaatatagctgaacagcaaatgttgctgcctgatcgttcctctcggagcttcgccttagaggggtacccggctatgtgaggtgtcagtctgccc

SEQ ID NO: 11183 - DNA, 891 bp, Homo sapiens
  SIMILAR (724)..(2): 821254mologous to Homo sapiens NAG13,accession number AF194537,Smith-Waterman Score=1005.
ctagtttattgaaagtttttagcatgaagggctgttgaattttgtcaaaggccttttctgcatctgttgagataatcgtgtggtttttgtctttggttctgtttatatgatggattaaatttatggatttgcatatgttgaaccagccttgcaacccagggatgaagccaactggatcatggtggataagctttctgatgtgctgctggattcgatttgccagtattttattgaggatttttgcatcgatgttcatcagcgatattggtctaaaattctctttttttgttatgtctctgcccggctttggtatcaggatgatgttggcctcacaaaatgaattagggaggattccctctttttctattgattggaatagtttcagaagaaatggtgccagctcctctttgtacctctggtagaattcggctgtgaatccatctggtcctggactttttttggttggtaggctattaattattgcctcaatttcacaacctgttattggtctaatcagggattcaacttcatcctggtttagtcttaggaggttgtatgtgtccaggaatttatccatttcttctacattttctagtttatttgcgtagaggtgtttatagtattctctgatggtagtttgtatttctttggtctttgatgatggtgacgtacagatggggttttggtgtggatgtgctttctgtttgttagttttccttctaacagtcaggaccctcagctgcaggtctgttggaatttgctgctggtccactccagaccctgtttgcctgggtatcaccagtggaggctgcaggactgcaaatattgcagaacagcagatgttgctgtctgatccttcctctggaagcttcgtctcagaggggcactgga

SEQ ID NO: 11184 - DNA, 942 bp, Homo sapiens
  SIMILAR (238)..(810): 781254mologous to Bacteriophage P1 non-essential to replication and lytic development,accession number X15639,Smith- Waterman Score=707.
atggaccagctgtgcttggaggtagagggaaaaatagttgataagacagagggtaacattgatgactcactggtggaaatgcttccactgaaggcctcaagggtgaagcctccgctggtgatacccaggcaaacagggtctggagtggacctccaacaaaatccaacagacctgcagctgagggtcctcactgttagaaggaaaactaacaaacagaaaggacatccacaccaaaaccccatctgtacgtcaccatcatcaaaggccaaagaaagggtatcagtgattgaagatcaaatgaatgaaacgaagcgagaagagatgtttagagaaaaaagagtaaaaagaaatgaacaaagcctccaagaaatatgggaatatgtgaaaagaccaaatctacgtctgattggtgtacctgaaagtgatggggataatggaaccaagttggaaaacactcttcaggatattatccagcaatacttccccaacctagcaaggcaggccaacattcaaattcaggaaatacagagaatgccacaaagatgctcctcaagaagagcagctccaagacacataattgtcagattcaccaaagctgaaatgaaggaaaaaatgttaagggcagccagagggaaaggtcgggttacccacaaagggaagcccatcagactaaaagtggatgtcttggcagaaactctacaagccagaagagagtgggggccaatattcaacattcttaaagaaaagaattttcaacccagaatttcatttccagccaaactaagcttcataagtaaaggagaaataaaatcctttacagacaaggaaatgctgagagattttgtcaccaccaggcctgccttacaagagctcctgaaggaagcactaaacatggaaaggaacaaccggtaccagccccagcaaaaacatgccaaattgtaa

SEQ ID NO: 11185 - DNA, 2976 bp, Homo sapiens
  SIMILAR (598)..(1131): 971254mologous to Bacteriophage P1 non-essential to replication and lytic development,accession number X15639,Smith- Waterman Score=878.
ctaggccagcagactatctaggccagcagaatgtaatgttgtgggaggaggaagcaaaaaatttgctagtggatcactaggagtgatggtgagtggtgccgcttccacttccacccgttgattcctggacccgtgaatcctggcctgaggaatggtgccatattgagggctcagtgttggtctctgctgctggcaaatggggcactcagcagtggctgtagccaggtcatccctggtgagtggaagcccatgttgctgagcccatgcataatctccatccctgccaccatggccacgttgttcatgggcccattgggcgatgacaggggtggctcttccccaaatttctttgtcaccaattttccaatcatgcttcttccaagtccctgaccatccagccaaaccactggctacagcccatgaatcagtatataattgcacatctggccatttctccttccatgcaaagcgcaaaaccaggtgcactgctctaagttctgcccactgggaagatttcccttcatggctgtccttcagggatgtcctagaaaggggctgtagtgctgcagctgtccacttttgggtggtatctggatatcgtgcagaatcatttgtgccttcaggacctacttgagaccaatcatgtatataccacttccatttgctgatggaatgctgctgtgcacggcccactctatggcacgctgttttggttactgtagccttgtagtatagtttgaagtcaggtagcgtgatacctccagctttgttcttttggcttaggattgacttggcaatgcgggctcttttttggttccatatgaactttaaagtagttttttccaattctgtgaagaaagtcattggtagcttgatggggatggcattgaatctataaattaccttgggcagtatggccattttcatgatattgattcttcctacccgtgagcatggaatgttcttccatttgtctgtatcctcttttatttcattgagcagtggtttgtagttctccttgaagaaatccttcacatctcctgtaagttggattcctaggtattttattctctttgaagcaattgtgaatgggagttcactcatgatttggctctctgtttgtctgttgttggtgtataagaatgcttgtgatttttgtacattgattttgtatcctgagactttgctgaagttgcttatgagcttaaggagattttgggctgagacgatggggttttctagatatacaatcatgtcatctgcaaacaggcacaatttgacttcctcttttcctaattgaataccctttatttccttctcctgcctgattgccctggccagaacttccaacactatgttgaataggagtggtgagagaagacatccctgtcttgtgccagttttcaaagggaatgcttccagtttttgcccattcagtatgatattggctgtgagtttgtcatagatagctcttattattttgagatacggcccatcaatacctaatttattgagagtttttagcatgaagggttgttgaattttgtcaaaggccttttctgcatctattgagacaatcatgtggtttttgtcattggttctgtttatatgctggattacgtttattgatttgcgtatgttgaaccaaccttgcatcccagggatgaagcccacttgaccgtggatatgctttttgatgtgctgctggattcggtttgctagtattttattgaggatttttgcatcgatgttcatcagggatattggtctaaaattctctttttttgttgtgtctctgcccagctttggtatcaggatgatgctggcctcataaaatgagttagggaggattccctctttttctattgattggaatagtttcagaaggaatggtaccagctcctccttgtacctctggtagaattcggctgtgaatccatctggtcctggactttttttggttggtaagctattaattattgcctcaatatcagattctgttattcgtctatttagagattcaacttcttcctggtttagtcttgggagggtgtatgtgtccaggaatttatccatttcttctagattttctagtctatttgcgtagaggtgtttatagtattctctgatggtagtttgtgtttctttggtctttgatgatggtgacgtacagatggggttttggtgtggatgtcctttctgtttgttagttttccttctaacagtcagtaccctcagctgcaggtctgttggagtttgccggaggtccactccagaccctgtttgcctgggtatcagcagcagaggctgcagaacagcggatattggtgaacagcaaatgttgctgcctgatcgttcctctggcagtgttgtctcagaggagtactcggccatgtgaggtgtcagtctgcccttactggggggtgactcccagttaggccctttcgaatcaatcactccaggtttggcattaaacttcactgtcttcaatcgggcacgttcctttctttccaccctccttttgctggggatgacccccatctcctcactgtctccctccagcatgactctcctggcttgccaccactcatcatcagaggcattgataacgtggagaatatctccatatttaaaactaagtccttgacttggcagcccactgtccttgctcttgtcgtagtcgaacatggctagagactctttacttgcagtctccttacaaatgactgtcagtgccaggatctgaaggtccatgggatgcagcatgcacaggtagagcacaagagacagggagcaggcactaaatagctcaccactaacccctctgagtcctggatgggtgggttttgtcctccaaatagcctctgctacagatttaccaaggacctccaggttccttccagtacccttatctgccattcttagggtttggtctttgtctttagcatccaatttggctgctggagtgccaggcat

SEQ ID NO: 11186 - DNA, 1878 bp, Homo sapiens
  SIMILAR (16)..(2640): 771254mologous to Homo sapiens putative p150,accession number U93563,Smith-Waterman Score=3299.
atggtccttgcgctcacgggtaacaaggcagacctggccagcaagagacccctggaattccaggaagcacaagcctatgcagacgatgacagttggctgttcatggagacatcagcaaagggtgcaatgaatgtgaatgaaattttcatggcaatagctgagaaacttcccaagaacaagccccagaatgcagctggtgctccagacagaaaccaaggatatttgtctgcttgtgaattcagtggaagaaaattaccaaagcaaactaccaaacacattaaacaatctctccggaccaagctctgtggtgcttcttacgcatcatccaatttaatcccccgaaaactctatgagcctccgctggtgatacccaggaaaacagggtctggagtggatctccagcaaactccaacagacctgcagctgtgggtcctgactgttagaaggaaaagtaacaaacagaaaggatatccacaccaaaaccccatctgtatgttaccatcatcaaagaccaaagactttaaaccaacaaagatcaaaagagacaaagacggccattatataatggtaaagggatcaattcaacaagaagagctaactgtcctaaatataaatgcacccaatacaggagcacccagattcataaagcaagcccttagagacctacaaagagacttagactcccacacaataataatgggagattttaacaccccactgtcaacattagacagatcaacgagacagaaagttaacaaggatatccaggaattgaactcagctttgcaccaagcagacctaatagacatttacagaactctccaccccagatcaaaagattatacattcttctcagcaccacatcacacttattccaaaattgaccacatagttggaagtaaagcactcctcgccaaatgtaaaagaacagaaattacaagaaactgtctctcagaccacagtgcaatcaaattagaactcaggattaagaaactcactcaaaagtgctcaactacatggaaactgaacaacctgctcctgaatgactactgggtacataatgaaatgaaggcagaaataaagatgttctttgaaaccaatgagaaccaagacacaacataccagaatctatgggacacatttaaagcagtgtgtagagggaaatttatagcactaaatgcccacaagagaaagcaggaaagatctaaaattgacatcctaacatcacaattaaaagaactagagaagcaagagcaaacacattcaaaagctagcagaaggcaagaaataactaagatcagagtagaactgaaggagataaagacacaaaaaacccttcaaaaaatcaatgaatccaggagctggttatttgaaaagatcaacaaaattgatagacaactagcaagactaataaagaagaaaagagagaagaatcaaatagatgcaataaaaaatgataaaggggatatcaccaccgatcccacagaaatacaaactaccatcagagaatactataaacacctgtatgcaaagaaactagaaaatctagaagaaatggataaattcctggacacatacaccctcccaagactaaaccaggaagaagttgaatccctgaatagaccaataacaggctctgaaattgaggcaataattaagagcctaccagccaaaaaaagtccaggaccagacggattcacagccgaattctaccagaggtgcgagaaggagctagcacaattccttctgagactattcaaatcaacagaaaaagagggaatcctccctaactcattttatgaggacagcatcatcctgttttaccaaagcctggcagagacaccacaaaaaaagagaattttagaccaatatccctga

SEQ ID NO: 11187 - DNA, 2745 bp, Homo sapiens
  SIMILAR (172)..(1752): 951254mologous to Homo sapiens putative p150,accession number U93564,Smith-Waterman Score=2634.
atggctgggtacccctctgagacgaaacttccagaggaacaatcaggcagcaacatttgccgttcaccaatattctctgttctgcagcctccgtggctgatacccaggcaaacagggtctggagtggacctccagcaaactccaacagacctgcagctgagggtcctcactgttagaaggaaaactaacaaacagaaaggacatccacaccaaaatcccatctgtacgtcaccatcatcaaagaccaaagaactagagaagcaagagcaaacattttcaaaagctagcagaaggcaagaaataactaagatcagagcagaactgaaggaaatagagacacaaaaaacgcttcaaaaaatcaatgaatccaggagctggttttctgaagagatcaacaaaattgagagaccgctagcaagactaacaaagaagaaaagagagaagaatcaaacagacaccataaaaaaagataagggggatatcaccactgatcccacagaaatacaaactaccatcagagaatgctataaacacctctatgcaaataaactagaaaatctagaagaaatggataaattcctggacacatacactctcccaagactaaaccaggaagaagttgaatctctgaatagaccaataacagcctctgaaactgaggcaataattaatagcttaccaaccaaaaaaagtccaggaccagatggatttacagctgaattctaccagaggtacaaggaggagctggtacaattccttctgaaactattccaatcaatagaaaaagagggaatcctccctaactcattttatgaggccagcatcatcctaataccaaagcctggcagagacacaacaaaaaaagagaattttagaccaatatccctgatgaacatcgatgtaaaaatcctcaataaaatactggcaaaccgaatccagcagcacatcaaaaagcttatccaccatgatcaagtgggcttcatccctgggatgcaaggctggttcaacatatgcaaatcaataaaggtaatccagcatataaacagaaccaatgacaaaaaccacatgattatctcaatagatgcagaacaggcctttgacaaaattcaacagtccttcatgctaaaaactctcaataaattaggtattgatgggacgtatctcaaaataataagagctatctatgacaaacccacagccaatatcatactgaatgggcaaaaactggaagcattccctttgaaaactggcacaagacaggggtgccgtctctcaccactcctattcaacatagtgttggaagttctggccagggcaatcaggcaggagaaagaaataaaggctattcaattaggaaaagagaaagtcaaattgtccctgtttgcagatgacatgattgtatatctagaaaaccccatcgtctcagcccaaaatctccttaagctgataagcaacttcagcaaagtctcaagatacaaaatcaatgtgcaaaaatcacaagcattcttatacaccaataacagacaaacagagagccaaatcatgagtgaactcccattcacaattgcttcaaagagaataaaatacctaggaatccagcttacagtggatgtgaaggacctcttcaaggagaactacaaacgactgctcaatgaaataaaaaagtatacaaataaatggaagaacattccatgctcatggataggaagaatcaatatcgtgaaaatggccatactgcccaaggtaatttatagattcaatgccacccccatcaagctaccaatgactttcttcacagaattggaaaaaactactttaaagttcatatgcaaccaaaaaagagcccgcattgccaagtcaatcctaagccaaaagaacaaagctggaggcatcatgctatctgacttcgaactatactacaaggcaacagtagccaaaacaacaaggtactggtacgaaaacagagatatagaccaatggaatagaacagagcactcagaaataataccacacatctacagctatctgatctttgacaaacctgacaaaaacaagaaatggggaaaggattccctatttaacaaatggtgctgggaaaactggctagccacatgcagaaagctgaaactggatcccttcctcacaccttatacaaaaattaattcaagatggattaaagacttacatgttagacctaaaactataaaaaccctagaagaaaacctaggcaataccattcaggacataggcataggcaaggacttcatgtctaaaacaccaaaagcaatggcaacaaaagccaaaattgacaaatgggatctaattaaacaaaagagcttctgcacagcaaaagaaactaccatcagagtgaacaggcaacctacagaatgggagaacatttttgcaacctactcatctgaccaagggctaatatccagaatctacaatgaactcaaacaaatttacaagaaaaaaacaaacaaccccatcaacaagtgggcgaaggatatgaacaaacacttctcaaaagaagacatctatgcagccaacagacacatgaaaaaatgctcatcatcactggccatcagagaaatgcaaatcaaaaccacaatcagataccatctcacaccagttagaatggcgatcattaaaaagtcaggaaacaacagcctgagacattcaggccagaagaacatcctggcatctgctgggggtcggaaggctttggggacagacgtgagctga

SEQ ID NO: 11188 - DNA, 1062 bp, Homo sapiens
  SIMILAR (478)..(1050): 861254mologous to Homo sapiens unknown protein,accession number M22333,Smith-Waterman Score=850.
atggcttttggcagcttcacctctgtggctatgcaggatacggcccccatcctggctgctttcatgggctggcaatctcgcagtgcacttgggacccaatcccaagaatctggaaaagggagtcctgaccaagtcctggtgccacaggactgtggcccatggcttgggagtgtagaactggtatctgtgcctggctctcaagcaggggaagaacccatactctcagaaaacaaggggcgggtcacacagatgaaaattccagaggaacgatcaggcagcaacatttgctgttcagcaatattcgctgttctgcagcctccgctgctgatacccaggcaaacacgatctggagtggacctccagcaaaatccaacagacctgcagctgagggtcctgactgttagaaggaaaactaacaaagagaaaggacatccacaccaaaaccccacctgtacgtcaccagcatcaaagaccaaaggagcactgagattcataaagcaagtccttagagacctagaaagagccttagactcccacacaataatgggagactttaacaccccactgtcaacattagacagatcaacgagacagaaagttaacaaggatatccaggaattgaactcagctctgcaccaagtggacctaatagacatctacagaactctccaccccaaatcaacagaatatacagtcttctcagcaccacatcacacttattccaaaattgaccacacagttggaagtaaagcactcctcagtaaatgtaaaagaatagaaattttaacaaactgtctctcagaccacagtgcaatcaaactagaactcaggattaagaaactcactcaaaaccactcaactacattgaaactgaacaacctgctcctgaatgactactgggtacataaggaaacaaaggcagaaataaagatggtctttgaaatcgacgagaacaaagacacaatataccagaatctctgggacacatttaaagcagtgtgtagagggaaatttatagcactgaaagcccacaagagaaagcaggaaagagtgacaccgtaa

SEQ ID NO: 11189 - DNA, 1887 bp, Homo sapiens
  SIMILAR (679)..(765): 961254mologous to Homo sapiens Human secreted protein clone dh1073_12 protein sequence SEQ ID NO:106,accession number Y94950,Smith-Waterman Score=157.
ttacaatttggcatgtttttgcagtggcttgtactggttgttcctttccatgtttagtgcttccttcaggagctcttttagggcaggtctggtggtgacaaaatctctcagcatttgcttgtctgtaaaggattttatttctccttcacttatgaagcttagtttggctggatatgaaattctaggttgaaaattcttttctttgagaatgttgaatattggcccccactgtcttctggcttgtagagtttctgccaagagatccgctgttagtctgatgggcttccctttgtgggtaacccgagctttctctctggctgcccttaacattttttccttcatttcaactttggtgaatctgacgattgtatgtcttggagttgctcttctcgaggagtatctttgtggcgttctctgtatttcctgaatttgaatgttggcctgccttgccagattggggaagttctcccggataatatcctgcagagtgttttccaacttggttccattctccccatcagtttcaggtacaccaatcagatgtagatttgatcttttcacatggtcccatatttcttggaggctttgttcatttctttttattcttttttctctaaatttctctgctcgcttcatttcattcatttgatcttccatcactgatagtctttcttccagttgatcaaatcggctactgaggcttgtgcattcatcacatagctctcgtgccatggttttcagctccatcaggtcctttaaggacttctctgcatcgggtattctagttagccattcgtctaattttttttcaaggtttttaacttctttgccattggctgaaacttcctcctttagctcggaatagtttgattgtcggaagccttcttctctcaccttgtcaaagtcattctccatccagctttgttccgttgctggtgaggagctcgttcctttggtctttgatgatggtgatgtatagatggggttttggtgtggatgtcctttctgtttgttagttttccttctaacagtcaggaccctcagctgcaggtctgttggagtttgctggaggtccactccagaccctgtttgcctgggtatcagaagcagaggcttattttcgatgactgcttctgtgcaagcttggagcatgcttaaatggtgagcaaaaaccagaaatttaagcgaatcattctgaagcatcatcttaatataatcctttacagcacctgccttggccttcagtgtccatcctgtccttgccaggcctgcatagcccagtctggcttcccgggcttggtcaccggttaggtttataccactgtcaccgatttgtggtcctcgactttcggatctccgaacctttccggaactcactttttcatgtctacggtgctccctgggaagatcctttaagggtttctccggcgtatacgatctcttaccattgggcaacccgtgtcggttctgcctttccctttggcgtacatgtgaccgctcaagacatttgcaccagtgtgttttggtttctgttttatcttcattgcttgtactgtacctgacacaaagtgggtacttaaatatatctgcaagtctaaagtcctctttggtgagaacactgtacatccgctgaggcagagctttggagtagggagcagggcgcggcacagtggtgcgcaaaatgaattcccggccagcagggggtgggaagtctgacacggagttctgccttctttcctctggggagcccattctcttcaattcctcctctggtggagtcatagctgcagccatttcaatcttgctgcttgttattggtctgttcagagtctctatttcttcctggtttaatctaggagtgttgtatatttccaggaatttatccat

SEQ ID NO: 11190 - DNA, 1431 bp, Homo sapiens
  SIMILAR (325)..(942): 811254mologous to Cloning vector pZC320 SopB,accession number U26464,Smith-Waterman Score=790.
ttacaatttggcatgtttttgcagtggcttgtactggtttttcctttccatgtttagtgcttccttcaggagctctggtagggcaggtctggtggtgacaaaatctctcagcatttgcttgtctgtaaaggattttatttctccttcacttatgaagctcagtttggctggatatgaaattctgggttgaaaattcttttctttaagaatgttgaatattggcccccactctcttctggcttgtacagtttctgctgaaagatctgctgttagtctgatgggcttccctttgtgagtaacccgacctttctctctggctgcccttaacattttttccttcatttcaactttggtgaatctgacaattgtgtatcttggagttgctgttctcgaggagcatctttgtggcgttctctgtatttcctgaatttgaatgttggcctgccttgctagattggggaagttctcctggataatatcctgcagagtgttttccaacttggttccattctccccgtcactttcaggtataccaatcagacgtagatttggtcttttcacatagtcccatatttgttggaggctttgttcatttctttttattcttttttctctaaacttttcttcttgcttcatttcattcatttgatcttccatcgctgatacactttcttccaattgatcgcatcggctactgaggcttgtgccttcgtcatgcagctctcgtgccatggttttcagctccatcaggtcctttaagtacttttgtgcattggttattctagttagccattcgtctttggtctttgatgaaggtgacatacagatgggtttttggtgtggatgccctttctgtttgttagttttccttctaacagtcaggaccgtcagctgcaggtctgttggagattgctggaggtccactccagaccctgttttcctgggtatcagcagcggtggctgcagaacaacagatattggtgaaccgcaaatgctgctgcctgatcgttcctctggaagttttgtctcagaggagtacccatcaacatgtgggtgagtggttatgtcttctaggccgtaagtttccagcagggatggaagcgtgcacagccatgttgtgctcgtcttctgttctggaagcagcaacgctttcattctcagtccagcatagggcctgcactggtgggagctaaaagccgcagcagggaagggtctatccctctgagggtcgggaacataacggggctgcagcgttcggtcccttttgctcttctgagtgccctgcttcttgtcctgaccctggaacccaaccctgtgctcctggaacttacataccattcttttcctgtcaaacgtgagccttctgtgactcccagaaacagtagcatccatgtacctggagagcagcagccccaggtggcatcttcccat

SEQ ID NO: 11191 - DNA, 3264 bp, Homo sapiens
  SIMILAR (1417)..(2169): 971254mologous to Cloning vector pSacBII RepL,accession number U09128,Smith-Waterman Score=1229.
atggggcagcttatgtttctcactcaggtcctgaaaaatcaaggacaggaagactgcctatctaccagtgaggacccatcatatcttatcagcacctttacagtagggttgcctgatgtgaatatctgtacagtcagaaagggtcttcctggtgaccgagggcctcctggacctccagggatacgtggtcctccaggtcccccaggtggtgagaaaggtgagaagggtgagcaaggagagccaggcaaaagaggtaaaccaggcaaagatggagaaaatggccaaccaggaattcctggtttgcctggtgatcctggttaccctggtgaacccggaagggatggtgaaaaggggctgcagttatgggtcctcctggccctcctggatttcctggagaaaggggtcagaaaggtgatgaaggaccacctggaatttccattcctggacctcctggacttgacggacagcctggggctcctgggcttccagggcctcctggccctgctggccctcacattcctcctagtgacaaaggtgacacttgcttcaactgcattggaactggtatttcagggcctccaggtcaacctggtttgccaggtctcccaggtcctccagggcattccaggagctccaggtgctccaggctttcctggatctaaaggtgaacctggtgatatcctcacttttccaggaatgaagggtgacaaaggagagttgggttcccctggagctccagggcttcctggtttacctggcactcctggacaggatggattgccagggcttcctggcccgaaaggagagcctggtggaattacttttaagggtgaaagaggtccccctgggaacccaggtttaccaggcctcccagggaatatagggcctatgggtccccctggtttcggccctccaggcccagtaggtgaaaaaggcatacaaggtgtggcaggaaatccaggccagccaggaataccaggtcctaaaggggatccaggtcagactataacccagccggggaagcctggcttgcctggtaacccaggcagagatggtgatgtaggtcttccaggtgaccctggacttccagggcaaccaggcttgccagggatacctggtagcaaaggagaaccaggtatccctggaattgggcttcctggaccacctggtcccaaaggctttcctggaattccaggacctccaggagcacctgggacacctggaagaattggtctagaaggccctcctgggccacccggctttccaggaccaaagggtgaaccaggatttgcattacctgggccacctgggccaccaggacttccaggtttcaaaggagcacttggtccaaaaggtgatcgtggtttcccaggacctccgggtcctccaggacgcactggcttagatgggctccctggaccaaaaggtgatgttggaccaaatggacaacctggaccaatgggacctcctgggctgccaggaataggtgttcagggaccaccaggaccaccagggattcctgggccaataggtcaacctggtttacatggaataccaggagagaagggggatccaggacctcctggacttgatgttccaggacccccaggtgaaagaggcagtccagggatccccggagcacctggtcctataggacctccaggatcaccagggcttccaggaaaagcaggtgcctctggatttccaggtgatgatggcttgcagggtcagccaggacttcctggccctacaggagaaaaaggtagtaaaggagagcctggccttccaggccctcctggaccaatggatccaaatcttctgggctcaaaaggagagaagggggaacctggcttaccaggtatacctggagtttcagggccaaaaggttatcagggtttgcctggagacccagggcaacctggactgagtggacaacctggattaccaggaccaccaggtcccaaaggtaaccctggtctccctggacagccaggtcttataggacctcctggacttaaaggaaccatcggtgatatgggttttccagggcctcagggtgtggaagggcctcctggaccttctggagttcctggacaacctggctccccaggattacctggacagaaaggcgacaaaggtgatcctggtatttcaagcattggtcttccaggtcttcctggtccaaagctccaggcaactcagcacagagagactccatttgtttgggagaaagtaaaggaagagaacaagattctccatctggtaatgcagacaattcttttggatcttatacagaccacccaaaatggctgcaagaactacagcgttactggccttagggtgacccctaatgtggacacagcttcagtgactaaaaagttagatcacaacacccaagtcccttcaaatacctggaaagccttcccaaaaatgacaggttcgggggtacaggtgcaggtttgttacatgggtaaattgcatgtcactgaggtttggagtacaaaggatcccatcacccagcctaactgggacgcaacccccagtaggggcagactgacacctcacacggccgggtacccctctgagatgaaacttccagaggaacgatcaggcagtaacatttgctgttcaccaatattcactcttgtgcagcctctgctgctgatacccatgcaaacagggtctggagtggacctccggcaaactccaacagacctgcagctgagggtcctgactgttagaaggaaaactaacaaacagaaaggacatccacaccgaaaccccatctgtatgtcaccatcatcaaagaccaaagcaaggcaggccaacattcaaattcaggaaatacagagaacgccacaaagatactcctcgagaagagcaactccaagacacataattgtcagattcaccaaagttgaaatgaaggaaaaaaagctaagggcagccagagagaaaggtcgggttacccacaaagggaagcccatcagactaacagtggatctcttggcagaaactctacaagccagaagagagtgggggccaatattcaacattcttaaagaaaagaattttcaacccagaatttcatatccagccaaactaaacttcataagtgaagaagaaataaaatcctttacagacaagcaaatgctgagagattttgtcaccaccaggcctgccttacaagagctcctgaaggaagcactaaacatggaaaggaacaaccagtaccagccactgcaaaatcatgccaaattgtaa

SEQ ID NO: 11192 - DNA, 2547 bp, Homo sapiens
  SIMILAR (199)..(2997): 981254mologous to Homo sapiens putative p150,accession number U93563,Smith-Waterman Score=4799.
atgtataacagccacatgtgtctggtaccaaatctctggggggagcacgtggatatgatcatcgtggcgcatgtattactcatccttttgggggccactgagatactgcaagctgacttacttcctgatgaaaagatttcacttctcccacctgtcaatttcaccattaaagttactggtttggctcaagttcttttacaatggaaaccaaatcctgatcaagagcaaaggaatgttaatctagaatatcaagtgaaaataaacgctccaaaagaagatgactatgaaaccagaatcactgaaagcaaatgtgtaaccatcctccacaaaggcttttcagcaagtgtgcggaccatcctgcagaacgaccactcactactggccagcagctgggcttctgctgaacttcatgccccaccagggtctcctggaacctcaattgtgaatttaacttgcaccacaaacactacagaagacaattattcacgtttaaggtcataccaagtttcccttcactgcacctggcttgttggcacagatgcccctgaggacacgcagtattttctctactataggtatggctcttggactgaagaatgccaagaatacagcaaagacacactggggagaaatatcgcatgctggtttcccaggacttttatcctcagcaaagggcgtgactggcttgcggtgcttgttaacggctccagcaagcactctgctatcaggccctttgatcagctgtttgcccttcacgccattgatcaaataaatcctccactgaatgtcacagcagagattgaaggaactcgtctctctatccaatgggagaaaccagtgtctgcttttccaatccattgctttgattatgaagtaaaaatacacaatacaaggaatggatatttgcagatagaaaaattgatgaccaatgcattcatctcaataattgatgatctttctaagtacgatgttcaagtgagagcagcagtgagctccatgtgcagagaggcagggctctggagtgagtggagccaacctatttatgtggtcccagaactcattgatgggaagacattcacagcgaccgtggtgggtttgaacccttgggttgaatatgaattccgcacagttgcagccaacgtgattgggattggggagcccagccgcccctcagagaaacggagaacagaagaagctctccccgaagtcacaccagcgaatgtcagtggtggcggaggcagcaaatctgaactggttataacctgggagacggtccctgaggaattacagaatggtcgaggctttggttatgtggtggccttccggccctacggtaaaatgatctggatgctgacagtgctggcctcagctgatgcctctagatacgtgttcaggaatgagagcgtgcaccccttctctccctttgaggttaaagtaggtgtcttcaacaacaaaggagaaggccctttcagtcccaccacggtggtgtattctgcagaagaagaacccaccaaaccaccagccagtatctttgccagaagtctttctgccacagatattgaagttttctgggcctccccactggagaagaatagaggacgaatacaaggttatgaggttaaatattggagacatgaagacaaagaagaaaatgctagaaaaatacgaacagttggaaatcagacatcaacaaaaatcacgaacttaaaaggcagtgtgctgtatcacttagctgtcaaggcatataattctgctgggacaggcccctctagtgcaacagtcaatgtgacaacccgaaagccaccaccaagtcaaccccccggaaacatcatatggaattcatcagactccaaaattatcctgaattgggatcaagtgaaggccctggataatgagtcggaagtaaaaggatacaaagtaggtaatttcttttttgcaaaggcacctaatcgtgctcctccgctgctgaaacccaggcaaacagggtctggagtggacctccagcaaactccagcagacctgcagctgagggtcctgactgttagaaggaacactaacaaacagaaaggacatccacaccaaaaccccatctgtacgtcaccatcatcaaagaccaaagaagttgaaaaccttgaaaaaaggttagacaaatggctaactagactaaccaatgtagagaagtccttaaatgacctgatggagctgaaaaccatggcacgagaactacatgacgaaggcacaagcttcagtagccaattcgatcagctggaagaaagggtacctgtgatggaagatcaaatgaatgaaatgaagcaagaagagaagtttagagaaaaaagaatgaaaagaaacgaacaaagcctccaagaaataagggactatgtgaaaagaccaaatctacgtctgattggtgtacctgaaagtgacggggagaatggaaccaagttggaaaacactctgcaggatattatccaggagaacttccccagcctagcaaggcaggccaacattcaaattcaggaaatacagagaatgccacaaagatag

SEQ ID NO: 11193 - DNA, 3111 bp, Homo sapiens
  SIMILAR (1473)..(595): 911254mologous to Drosophila melanogaster Sog,accession number U18774,Smith-Waterman Score=1343.
  misc_feature (1)...(3111): n = a,t,c or g
tcaacaagatggtgaattgactagtgggtagatccacaggacgggtgtggtcgccatgatcgcgtagtcgatagtggctccaagtagcgaagcgagcaggactgggcggcggccaaagcggtcggacagtgctccgagaacgggtgcgcatagaaattgcatcaacgcatatagcgctagcagcacgccatagtgactggcgatgctgtcggaatggacgatatcccgcaagaggcccggcagtaccggcataaccaagcctatgcctacagcatccagggtgacggtgccgaggatgacgatgagcgcattgttagatttcatacacggtgcctgacagtcaaagagccgaacgctgtgcactgggtccaggatgacttgcacaccctgttcactgcgcagtttccgaccaccatggacaggggaatcttggaacaccagtctcactcgatgatgccgcatgtccgtgctcacattgatagtaaacagagtaaatatcattcccatgacaatcggaataaagatgaaattgagggtggtgacctgcagtaggcagcagtcctggtctggattggtatgaacatcttcgtactgaacgggaggctgcaatcctcctgtacacttgctctttaacctaggggactgttttttgaacttgaagttgaattcccacattggttcctgtctgttcccaacaatctttctgcaccagaaaagtaagcatttggaattctttaatgtgctgggggtgctttctggaatggctggattcttggagattcgagcagcaaatggctcatacatatggtacagagatcggatcacacaagcccggagacagtgcagcttctccattgactctggtcgcagacgcaaaggcagggaagcatccagcgtgtagtgccttcggtacaacctggtccaaaaggcagcagtgcaagtgacagtccaggcattcttacaaatcagggaaaaattcacaatgtcctcaggacggatataggaggccagcaatagccaaatatccatgggatactcttctcctccagccccgtccagttcttctttgtgtctcttgcttttcttttttctggagacagttctctcatggatgttttcctcctgggcatccatctcatcactgctgtcgatgatgtcatagggctcaccagccccagaaagagcttcctctgcaggaacatgagaggcttccaagccacaaagagattttacttcctgccgaacagcgttgagctgatgcttttgcctcacaactcttaagattctttcctttgtcttgactttaagtaacctgatgattatgtgcctagagggtgttctttttgtgatgaatttcccaggtgttctttgagcttcttggatttggatgtctagatctctaacaaagccaaggaaattttcatcgattattagcgcaaatatgttttccagacttttagatttctcttcttcctttttttctgtggaacttttctgccacctccgggggcagatcgctttccagataaacttgagtttcacatactcctcttcttcatcttctgactctgcatcttcctccacagctactaagtgctgtccactaatatgcactggctctgaagcacacttcaaccgtaagatcaccagtggtgttatttcaaggcccccagaaaccattggctgtacagacattttcaaagttgccagtgttactttaatcggactgccttcataattcattgcctctgtttcaacaatatgcaatttatcctttgctccagtccctgaaatcaccgttcttaaagataactggtgctcattttcatcattattcaccttaaagtgataatctttgtcggccttttgttgacaactgaaaagatagttctggggcctcagagggctcatgtccatgtccatcaaatcttccatggggtggtgacacgcatcacctctaccagctctgccgacagccacattgtatgttggctccccaccttgactctttgtccggatgtccattgtgcagtcaccatcgacgtatagactatctctgatcactgagcatttcttcgcgccaagagtcaaaccgttggtaaagaaaccttcccggtcttttcctacaatcatatctatttctattggcgtaatgctctgaaagacgcccccggccgtggctgcccagacgtatttggcgtcgcagtagccgacaatggcggcctcctggcagcagccatcgcacatcaggttatccacgtagctctgccaaccggccatcttcgagcccttcgcattgnccacgacatcatgttcattaatttcattttctgcatcactactgtcagtatcttcattgtcgtcttcctcatagtctgaagattctgtcatgttctgatgtgagcgggattccgataaagccccaaatgactgggcactgacagaagctaaaggtctcagtaaaggggtatgttctgtcacttcattttcttcttgactactgtctgtgtcagagtctgaatcgccttgagaaggaacaactttttgcttgcacactggacaggtttttttggttttagttagccaagggtctacacacttgcagtgataagcatgggaacagggaaggattctgagtttgtctccatcttcatactcatccaaacaaatggcacatacatcatactcatctcctttggtctttgatgatggtgacgtacagatggggttttggtgtagatgtcctttctgtttgttagttttccttctaacagtcaggaccctcagctgcaggtctgttggagtttgctggaggtccactccagaccctgtttgcctgggtatcagcagcagaggtcgggaagtgcaaggggtcagggagttccctttcctagccaaagaaaggggtgatggacggaacctggaaaatcgggtcactcccacccgaatactgcgctttcccgacgggctagaaaaacggtgcaccacgagattatatcccacacctggctcggagggtcctacgcccacggagtctccctgattgctagcacagcagtcggagatcaaactgcaaggcagcagcgtggctgggggaggggcgcccgccat

SEQ ID NO: 11194 - DNA, 10136 bp, Homo sapiens
  SIMILAR (520)..(1290): 371254mologous to Homo sapiens mixed lineage kinase MLK1,accession number AF251442,Smith-Waterman Score=302.
atgcacaaaagggagagctgtttatggtcaccagaactgcccccatctattaataatgatgaaaataataatagccgacaattactgggcatttactacacagccagtgacagcttccctggcaatgagagagggaatgggagcagcagtagttggagaagacatttcagtgaggacagctattcttcactgaaaagtctgccagcaaaattcatccccaagggaagcacaggtcttcctacactgagacagatgcccagcagcatgggacaggcacccagctggaatacagtcatcacggagggagccatcaaaggccacttggaccttgagatcaaagctgagtgttcaggatggcagaagggacagcagtctgagattgaactgcaaggtggcagcgaggctgggggcagggcacccaccaatgctgaggcttggcctccgctgctgatacccaggcaaacagggtctggagtggacctccagcaaactccaacagacctgccactgagggtcctgactgttaaaaggaaaactaacaaacagaaaggacatccacagcaaaaccccatctgtacgtcactatcatcaaagatgaaagaaatacaaactaccatcagagaatactataaacacctctatgcaaataaactagaaaatctagaagaaatggataaattcctcgacatacacaccctcccaagactgaaccaagaagaagttgaatctctgaatagaccaataacaggctctgaaactgaggcaataattaatagcttaccaactaacaaaagtccaggaccagatggattcacagctgaattctacgagaggtacaaggaggagctgataccattccttctgaaactattccaatcaatagcaaaagagggaatcctccctaactcattttatgaggccagcatcatcctgataccaaagtctggcagagacacacacacaaaaaagaattttagaccaatatccatgatgaacgtcgatgcaaaaatcctcaataaaatactggcaaaccaaatccagcagcacatcaaaaagtttatccaccatgatcaagtgggcttcatccctgggatgcaaggctggttcaatatacgcaaatcaataaatgtaatccagcatataaacagaaccaaagacaaaaaccacatgattatctcaatagatgcagtaaaggcctttgacaaaattcaacagcccttcatgctaaaaattctcaataaatttggtattgatgggaccccaaatctcattaagctgataagcaacttcagcaaagtctcaggacacaaaatcaatgtgcaaaaatcacaagcattcttatacaccaataacagacaaacagagagccaaatcatgagtgaactcccattcacaattgcttcaaagagaataaaatacctaggaatccaacttacaagggatgtgaacgacctcttcaaggaaaactacaaaccactactcaacgaaatagaagaggacacaaacaaatggaagaacattccatgctcatggataggaagaatcaatatcatgaaaatggccatactgcccaagatctattgttgcacaggatttctggctattacaagtcagttgcatcaagtaaattctgatttacttggctggtggctttgtgaacgacaattaccctcaggcgggctcaatggaaggccggagaaggtggatccttttcataccttatttggaattgctggattgtcacttttgggagaagaacagattaaacctgttaatcctgtcttttgcatgcctgaagaagtgcttcacagagtgaatgttcagcctgagctacattttatatttcaaaattacccaaagaaggagttgtcttcaaataaggaaacactaacggggtccccgctacaatttcggactccaggagactccacagagccgcccttcggtccaggtggtctctgcatccacctgtcctggcacgtcaggagctgcgggcgaccggagcagcagcagcagcagccttccctgccccgcgccaaactcccggccagctcaaggcaaggagtgattgggtggaggagtctccttgaggctagaggccggcagttcatggaggctcgggggcacgtgggtggtggttaccacagtgaagttgtgatttggttggggcgttcatactttggaaacaaaagagcttatgcagaaaacacagttgcatcaaattttacttttggtgcaagctcatcttctgcacgagatactaattatcctcaaacacttaaaactccattgtctactggaaatcctcagagatcaggttataagagctggacaccacaagtgggatattcagcttcatcctcatctgcgatttctgcacactccccatcagttattgtagctgttgtagaagggagaggacttgccagaggtgaaataggaatggcaagtattgatttaaaaaacccccaaattatactatcccagtttgcagacaacacaacatatgcaaaggtcacactgatgcaagaagtgaactcccatagccttgagcagctccacccttgtgcctttgcagggtacagccccctgaaccctgcagctgcttttaaggctggtgttgagtgtctgtggcttttccaggaacacaactcctcaccagcaagggaacaaaactggatgcagaatgagtttgacgacttgacagaagtaggcttcagaaggtcggtaataacaaacttctccaagctaaaggagcaggttctaacccatcaaaaggaagctaaaaaccttgaaaaaaaggtacaaagaggagctgggaccattccttctgaaactattccaatcaatagaaaaagagggagtcctctctaactcattttatgaaaccagcatcatcctgataccaaagcctggcagagacacaacaaaaaaagagaattttagaccaatatccctgatgaaccaattgatgcaaaaatcctcaataaaatactggcaaaccgaatccagcagcacatacaaaagcttatccactacgatcaagttggcttcatccctgcgatgcaaggctggttcaacatacacaaaatcaataaacataatccatcacaaaaacagaaccaacgacaaaaaccacatgattatctgaatagatgcagaaaaggcctttgacaaaattcaacaacacttcatgctaaaaactctcaataaattaggtattgatgggacatatctgacatatctcaaaataataagagctatttatgacaaacccacagccaatatcatactgaatgggcaaaaactggaagcattcccttttaagactggcacaagacagggatgtcctctctcaccactcctattcaacatagtgttggaagctctggccagggcaatcaggcaagagaaagaaataaagggtattcaattaggaaaagaggatgtcaaattgtccctgtttgcagatgacatgattgtatatttagaaaaccccatcgtctcagcccaaaatctccttaagctgataagcaacttcagcgaagtctcaggatacaaaatcaatgtgcaaaaatcacaagcattcctatacaccaataacagacagacagagagccaaatcatgagtgaactcccattcacaattgcttcaaagagaataaaatacctaggaatacaacttacaagggatgtgaaggacctcttcaaggagaactacaaaccactgctcaatgaaataaaagaggacacaaacaaatggaagaacattccatgctcatggataggaagaatcaatattgtgaaaatggccatactgcccaaggaatggggcttcctcagagctgaaatgtagtgattgttttgctcttatgagtctagccacccagcagagctccaggctggtgctgaagagtgtctgcaaagagtcctgtaatgttatctgtcttcaggtcttggcagccatggataccaccacctgctccagtggagcaatattcgatgttctgcagcctctgctgctgatacccaggcaaacggggtctggagtggacctccagcaaactccaacagacctgcagctgagggtcctgactgttagaaggaaaactaacaaacagaaaggacatccacaccaaaaccccatctgtacgtcaccatcatcaaagaccaaagaactagagaagcaagagcaaacacattcaaaagctagcagaaggcaagaaataactaagatcagagcaggactgaaggagttagagacacgaaaaacccttcaaaaaatcaatgaatccaggagcttgttttttgaaaagatcaacaaaattgatagaccactagcaagactcataaagaacaaaagagagaagaatcaaatagacgcaataaaaaatgataaaggagatatcaccaccaatcccacagagatacatactaccgtcagagaatactataaacacctctacgcaaataaactagaaaatctagaagaaatggataaattcctggacacatccaccctcccaagactaaaccaggaagaagttgaatctctgaatagaccaatcacaggctctgaaattcaggcaataattaatagcctaccaaccaaaaaaagtccagtacctgacggattcacagccaaattctaccagaggtacaaggcagagctcgtaccattccttctgaaactcttccaatcaatagaaaaagtgggaattctccctaactcattttacgaggccagcatcatcctaataccaaagcctggcagagacacaacaaaaaatgataattttagactaatatccctgatgaacatcgatgcaaaaatcctcaataaaatactgggaaaccgaattcagcagcacatcaaaaaacttatccaccatgatcaagtgggcttcatccctgggatgcaaggctggttcaacatatgcaaatcaataaacataatccagcatataaacagaaccaatgacaaaaatcacatgattatctcaatagatgcagaaaaggcctttgacaaaattcaacaacccttcatgctaaaaactctcaataagttaggtattgatcggacgtatctcaaaataataagagctatctatgacagacccacagccaatatcatactgaatgggcaaaaaatggaagcattccctttgaaaactggcacaagacagggatgccctctctcaccactcctattgaacacagcgttggaaattctggccagggcaatcaggcaggagaaggaaataaagggtactcaattaggaaaagaggaagtcaaattgtccctgttttcagatgacatgattgtatatctagaaaaccccattgtctcaacccaaaatctccttaagctgataagcaacttcagcaaagtctcaggatacaaaatcaatgtgcaaaaatcacaagcattcttatacaccaataacagacaaacagagagccaaatcatgagtgaactcccattcacaattgcttcaaagagaataaaatacctaggaatccaacttacaagggatgtgaaggacctcttcaaggagaactgcaaaccactgctcaacgaaataaaagaggttacaaacaaatggaagaacattccatgctcatggataggaagaatcaatatcatgaaaatggccatactccccaagaggactccattattatcgctgcctagtacattatatgaggagctgtggagacttaggtcctacttcccattgtgccctcaactttacaacatggagcagaataccacagactgggtaatttataaagaacagtgcatttggctcacagctctggagactggggagtccaagagcactgcaccagcatttggcaagggttatcccatggcagaatacatcatatggggcagattgacacctcacatggctggctactcctctgagacaaaacttccagaggaacgatcaggcagcaacatctgctgttcaccaatatccgctgttctgcagcctctgctgctgatacccaggcaaacagggtctggagtggacctccagcaaactccaacagacctgcagctgagggtcctgactgttagaaggaaaactaacaaacagaaaggacatccacaccaaaaccccatctgtacgtcaccatcatcaaagaccaaaggatcaaattcacacataacaatattaaccttaaatgtaaatgggctaaatgctccaattaaaagacacagactggcaaattggataaagagtcaagacccatcagtgtgctgtattcaggagacccatctcacgtgcagagacacacacaggatcaaaataaagggatggagggagatctaccaagcaaatggaaaacaaaaaaaggcaggggttgcaatcctagtctctgataaaacggactttaaaccaacaaagatcaaaagagacaaagaaggccattacatgatggtaaagggatcaattcaacaagaagagctaactaccctaaatatatatgcacccaatacaggagcacccagattcataaagcaagtccttagagacctacaaagagacttagactcccacacattaataatgggagactttaacaccccactgtcaacattagacagatcaacgagacagaaagttaacaaggatatccaggatttgaactcagctctgcaccaagtggacctaatagacatctacagaactctccaccccaaatcaacagaatatacattcttctcagcactacaccacatttattccaaaattgaccacatagttggaagtaaagcactcctcagcaaatataaaacaacagaaattataacaaactgtctctcagaccacagtgcaatcaaactcgaactcaggattaagaaactcactcaaaaccgctcaactacatggaaactgaacaacctgctcctgaatgactactgggtacataacaaaatgaaggcagaaataaatacattatttgaaaccaacgagaacaaagacacaacataccagaatctctgggacacattcaaagcagtgtgtagagggaaattcatagcactaaatgcccacaagagaaagcaggaaagatctaaaattgacaccctaacatcacaattaaaagaactagagaagcaagaacaaacacattcaaaagctagcagaaggcaagaaataactaagatcagagcaaaactgaaggaaatagagacacaaaaaatccttcaaaaaatcaatgaatccaggagctggttttttgaaaagatcaacaaaattgatagaccactagcaagaccaataaagaagaaaagagagaagaatcaaatagatgcaataaaaaatgataaaggggatatcaccactgatcccacagaaatacaaactaccatcagagaatactataaacacctctatgcaaataaactagaaaatctagaagaaatggataaattcctcaacacatacaccctcccaagactaaaccaggaagaagttgaatctctgaataaaccaataacaggctctgaaattgaggcaataattaatagcttaccaatcaaaaaaagtccaggaccagatggattcatagccaaattccaccagaggtacaaggaggagctggaggccagcatcatcctgataccaaagcctggcagagacacaaccaaaaaagagaattttagaccaatacccctgatgaatattgatgcaaaaatcctcaataaaatactggcaaaccgaatccagcagcacatcaagaagcttatccaccatgatcaagtgggcttcatccctgggatgcaaggctcgttcaacatatgcaaatcaataaacgtaatccaggatataaacagaacgaatgacaaaaaccatatgattatctcaatagatgcagaaaaggcctttgacaaaattcaacaacccttcattctaaaaactctcaataaattaggtattgatgggacgtatctcaaaataataagagctatctatgacaaacccacagccaatatcatactgaatgggcaaaaactggaagcattccctttgaaaactggcacaagacaggggtgccctctctcaccactcctattcaacatagtgttggaagttctggccagggcaatcaggcaggagaaggaaataaagggcattcaattaggacaagaggaagtcaaattgtccctgtttgcagatgacatgattgtatatcgagaaaaccccatcgtctcaacccaaaatctccataagctgataagcaacttcagcaaagtctcaggatacaaaatcaatgtgcaaaaatcacaagcatttttatacaccaataacagacaaacagagagccaaatcatgagtgaactcccattcacaattgcttcaaagagaataaaatacctaggaatccaacttacaagggatgtgaaggatctcttcaaggagaactacaaaccactgctcaaggaaataaaagaggatacaaacaaatggaagaacattccatgctcatgggtaggaagaatcaatatcgtgaaaatggccatactgcccaaggtaatttatagatttaatgccatccccatcaagctaccaatgactttcttcacagaattggaaaaaactactttaaagttcatatggaaccaaaaaagagcccgcattgccaagtcaatcctaagccaaaggaacaaagctggaggcatcacactacctgacttcaaactatactacaaggctacagtaaccaaaacagcatggtactggtaccaaaacagagatatagaccaatggaacagaacggagccctcagaaataatgccacatatctacaaccatctgatctttgacaaacctgacaaaaacaagaaatggggaaatgattccctatttaataaatggtgctgggaaaactggctagccatatgtaggagaaagctgaaactggatcccttccttacaccttatacaaaaattaattcaagatggattaaagacttaaatgttagacctaaaaccataaaaaccctagaagaaaacctaggcaataccattcaggacataggcatgggcaaggacttcatgtctacaacaccaaaagcaatggcaacaaaagccaaaattgacaaatgggatctaattaaactaaagagcttctgcacagcaaaagaaactaccatcacagtgaacaggcaacctacagaatgggagaaaatttttacaatctacccatctgacaaagggctaatatccagaatctacaaagaactcaaacaaatttacaagaaaagaacaaacaaccccatcaacaagtgggtgaaggatatgaacagacacttctcaaaagaagacatttatacagccaaaaggcacatgaaaaaatgctcatcatcactggccatcagagaaatgcaaatcaaaaccacattgagataccatctcataccagttagaatggcgatcattaaaaagtcaggaaacaacagaccaagctccaatgtcttctctgtgaaactttctgagatccaatccttggctctcatagagactaggtgcttaatgaatgctgatgaacagggtgtgccactgattcaagaaatgctggaatcttgggcaagtatttgcaaagttcccaagtatccaaatgccgaagcagtgcggccagaagagcaaacaccccacctgcacccaggtgaaataaacagccatgttgctcacacaaagcttgtttggtggtctcttcacacggacacgcatgaaatttggtgccgtgactcggatcgggggacctcccttgggagatcaatcccctgtcctcctgctctttgctccgtgagaaagatccacctacgacctcaggtcctcagaccgaccagcccaagaaacatctcaccaatttcaaatccgcacacaagaacttccaaacgcctgaaccgcagcggccaggcgttcctccagaacctccttccccaggagcttgctacaagtgccagaaatctgaccaccaggccaaggaatgcctgcagcccaggattcctcctaagccgtgtcccatctgtgcgggaccccactggaaattggactgttcagctcacctggcagccactctcagagcccctggaactctggcccaaggctctctga

SEQ ID NO: 11195 - DNA, 2250 bp, Homo sapiens
  SIMILAR (976)..(2322): 811254mologous to Homo sapiens unknown protein,accession number M22334,Smith-Waterman Score=1882.
atgccattttatagtgagcagacttatattaaggagccagccatacagagatttgaggaagtacattttaggcagaataaaggagcagatggtgctcagatgtggaggatccaggtgtgctggctaacgggactcaagagaagtagggagcctctgctgctgatgcccaggcaaagagggtctggagtggacctccagcaaactccaacagacctgcagctgaggatcctgatggttagaaggaaaactaacaaacagaaaggacatccacaccaaaaccccatctgtacgtcatcatcaacaaagaccaaagaactggagaagcaagagcaaacaaattcaaaagctatcagaaggcaagaaataactaagatcggagcagaactgaaggaaatagagacacaaaaaacccttcaaaaattcaatgaatccaggagctggttttttgaaaagatcaagaagattgatagaccgctagcaagactaataaagaagaaaacagagaagaatcaaatagatgcaataaaaaatgataaaggggatatcaccaccgatcacccagaaatgcaaactaccatcagagaatactgtaaacacttctacgcaaataaactagaaaatctagaagaaatggataaattcctggacacatacaccctcccaagactaaagcaggaagaagttgaatctctgaataggccaataacaggctctgaaattgaggcaataattaatagcttaccaaccaaaaaaattccaggaccagatggattcacagccaaattctaccagaggtacaaggaggagcttgtaacattccttctgaaactattccaaacaatagaaaaagagggcaatcctaagcaaaaagaacaaactggaggcatcgcactacctgacttcaaactatactacaaggctacaggaaccaaaacagcatggtactggtaccaaaacagatatatagaccaatgaaacagaatagaggcctcagaaataacacgatcagacagcaacatttgctgttcagcaatactcgctgttctgcagccactgctgcctgatacccagacaaacagggtctggagtggacctccagcaaactccaacaggcctgcagctgagggtcctgactgttagaaggaaaactaacaaacagaaaggacatccacaccaaaaacccatctgtacgtcaccatcatcaaagaccaaaggtagataaaaccaccaagatggggaaaaaaacagagcagaaaaactggaaactctaaaaatcagagcgcctctcctcctccaaaggaacgcagctcctcaccagcaatggaacaaagctggacggagaatgactttgacgagttgagagaagacagcttcagacgatcaaactactccgagctacaggaggaagttcgaacccatggcaaagaagttaaaaaccttgaaaaacaattagacgaatggctaactagaataaccaatgcagagaagtcctcaaaggaccggatggagctgaaaaccaaggcacgagaactacatgacgaatgcacaagcctcagtagccgatgcgatcaactggaagaaagggtatcagtgacagaagatgaaatgaatgaaatgaagcgaggagagaagtttagagaaaaaagaataaaaagaaacgaacaaagcctccaagaaatatgggactatgtgaaaagaccaaatctatgtctgattggtgtacctgaaagtgatggggagaatggaaccaagttggaaaacactttgcaggatattatccaggagaacttccccaatctagcaaggcaggccaacattcagattcaggaaatacagagaatgccacaaagatactcctcgagaagagcaactccaagacacataattgtcagattcaccaaagttgaaatgaaggaaaaaatgttaagggcagccagagagaaaggtcaggttacccacaaagggaagcccatcagactaacagctgatctctcggcagaaaccccacaagccagaagagagtggggaccaatattcaacattcttaaaggaaagaattttcaacccagaatttcatatccagccaaactaagcttcataagtgaaggagaaataaaatattttacagacaagcaaatgctgagagattttgtcaccaccaggtctgccctaaaagagctcctgaaggaagcactaaacacggaaaggcacaaccggtaccagtcactgcaaaaacatgccaaattgtaa

SEQ ID NO: 11196 - DNA, 5421 bp, Homo sapiens
  SIMILAR (283)..(2295): 381254mologous to Homo sapiens SALF,accession number AF026169,Smith-Waterman Score=1030.
tcatgatttggctgtttgtctgttattggtgtataaaaatgcttgtgatttttgcacattgattttgtatcctgagactttgctgaagttgcctatcagcttaaggagattttgggctgagacaatggggttttctagatatacaatcatgtcaactgcaaacagggacaatttgacttcctcttttcctaattgaataccatttatttccttctcctgcctgattgccctggccagaacttccaacactatgttgaataggagtggtgagagagggcatccctgtcttgtgccagttttcaaagggaatgcttcctgtttttgcccattcagtatgatattggatgtgggtttgtcatagatagctcttattatttggagatatgtgccatcaatacctaatttattgagaatttttagcatgaagcgttgttgaattttgtcaaaggacttttctgcatctattgagacaatcatatgatttttgtcattgtttctgtttatatgctggattatgtttattgatttgcgtattttgaaccagtcttgcatcccagggatgaagcccacctgatcatagtggacaaactttttgatgtgctgctgaattaggtttgccattgttttattgaggattttagcatcgatgttcatcagggatattggcctaaaattctctttttttgttgtgtctctgccaggcttttgtatcaggatgatgctggcctcataaaatgagttagggaggattccctctttttctattgattggaatagtttcagaaggaatggtactagctcctccttgtacctctggtagaattcggctgtgaatccatctggtcctcgactttttttggttggtaagctattaactattgcttcaatttcagagcctgttattggtccattcagagattcaacttcttcctggtttagtcttgggagggtgtatgtgttgaggaatttatccatttcttctagattttctagtttatttgcatagaggtgtttatagtactctctgatggtagtttgtatttctttggtctttgatgatggtgacatacagatggggttttggtgtggatgtcccttctgtttgttagttttccttctaacagtcaggaccctcagctgcaggtctgttggagtttgcttttggtccactccagaccctgtttgcctgggtatcagcagcagaggctgcagaacagttaatactggtgagcagcaaatgttgctgcctgaacgttcctctggaagttttttctcagaggagtacctggccatgtgaggtgtcagtgtgcccctactgtggggtgcctcccagttaggatacttgggggtcatggacccacttgcggaggcagtctgtccattctcagatctccagctgcattctgggagaacctctactgtcttcaaagctgccttgggccagagtggagcccactgccctgaaaggtgtgtctcagcacagtcataagctgactgaagagccttaagagaacataagcagtagtttggcagtactctctgtggacctgtgatggtggtagccatggagttaggctcttccacaatggtagaactagtttccagtcccgccaacagtgtaaaagtgttcctatttctccacatcttctccagcacctgttgtttcctgactttttcataatcgccattgtaactggtgtgagatggtatctcactgtggttttgatttgcatttctctgatggccagtgaggatgagcattttttcacgtgtctgttggctgcataaatgtcttctttcgagaagtgtctgttcataccctttggccactttttgattgggttgtttggtttttttcttgtaaatttgtttgagttctttgtagattctggatattagccctttgtcagataagtagattgcaaaaatgttctcccattctgtaggttgcctattcactctgatggtagtttctcttttgctgtgcagaagctctttagtttaattagatcccatttgtcaattttggcttttgttgccattgcttttggtgttttagacatgaagtccttgcccatgcctatgtcctgaatggtattgcctaggttttcttctagggtttttatggtttttgatctaacatttaagtctttaatccatcttgaattaatttttgtataaggtgtaaggaagggatccagtttcagctttctacatatggctagccagttttcccagcaccatttattaaatagggaatcctttccccatttcttgtttttctcaggtttgtcaaagatcagacagttgtagatacatggcattatttctgagggctctgttctgttccattggtctatatctctgttttggtaccagtaccatgctgttttcgttactgtggccttgtagtatagtttgaagtcaggtagcatgatgcctccagctttgttcttttggcttatgattgacttggcaatgcgggctcttttttggttccatatgaattttaaagtagtgtttttccaattctgtgaagaaggttattggtagcttggtggagatggcattgaatctacaaattaccttgggcagtatggccattttcacaatattgattcttcctatccatgagcatggaatattcttccatttgtttgtgtcctcttttattttgttgagcagtggtttgtagttctctttgaagaggtccttcacatcccttgtaagttggatttgtaggtattttattatctttgaagcaattgtgaatgggggttcactcatgatttggctctctgtttgtctgttattggtatataggaatgcttgtgatttttgcacattgattttgtatcctgagactttgctgaagttgcttatcagcttaaggagattttgggctgagacaatggggttttctaaatatacaatcatgtcatctgcaaacagggtcaaaacagaagtcaaaaaaaatttgacttcctcttttcctaattgaatgccctttatttccttctcctgcctgattgccctggccagaacttccaacactatgttgaataggggtggtgagagagggcatccctgtcttgtgccagtttccaaagggaatgcttccagtttttgtccattcagtatgatattggctgtgggtttgtcatagatagctcttattattttgagatacgtcccatcaatacctaatttattgagagtttttagcatgaagcgctgttgaattttgtcaaaggccttttctgcatttattgagataatcatgtggtttttgtatttggttctgtttatatgttgatcatggtggataagctttttgatgagttgttggattcggtttgccagtattttattaaggatttttgcatcaatgttcatcaaggatattggtctaaaattctctttttttgtagtgcctctgccaggctttggtatcaggatgatgcagacctcataaaatgagttagggaggattccctctttttctattgattggaatagtttcagaaggaatggtaccagctcctccttgtacctctggtagaatttggctgttaatccatctggtcctggactttttttggttggtaagctattaattattgcctcaatttcagagcctgttattggtctattcagagattcaacttcttcctggtttagtcttgggagggtgtatgtgtcgaggaatttatccatttcttctagattttctagtttatttgcgtagaggtgtttatagtgttctctgatggtagtttgtatttctgtgggatcagtggtgatatcccgtttgtcattttttattgcgtctatttgattcttctctcttttcttctttattagtcttgctagccgtctatcaattttgttgaacttttcaaaaaaccagctcctggattcattgattttttgaagggttttttgtgtctctatttccttcagttctgctctgatcttagttatttcttgccttctgctaacttttgaatgtgtttgctcttgcttctctagttcttttaattgtgatgttagggtgtcaattttagatccttcctgctttctcttgtgggcatttagtgctataaatttccctctacacactcctttgaatgtgtcccacaaattctggtatgttgtgtctttgttcccattggtttcaaagaacatctttatttctgccttcattttgttatgtacccagtagtcattcaggagcacgttgttcagtttccatgtagttgagcggttttgagtgagttttttaatcctgagttctagtttgattgcactgtggtctgagagacagtttgttataatttccattcttttacatttgctgaggagtgctttacttccaactatgtggtcaattttggaataggtgtggtgtggtgctgaaaagaatgtatattctgttgatttggggtggagagttctgtagatgtctattaggtctgcttgctgcagagctgacttcaattcctggatatccttgttaactttctgtctcattgatctgtctaatgttgatattggggtgttaaagtctcccattattattatgtgggagtctaagtctctttgtaggtcactaaggacttgttttatgaatcttggtgcttctgtattgggtgcatatatatttaggatagttagttcttcctgttgaattgatccctttaccatgatgtaatggccttctttgtctcttttgatctttgttggtttaaagtctttggtctttgatgatggtgacatacagatgggtttttggtgtggatgtcctttctgtttgttagttttccttctaacagtcaggaccctcagctgcaggtttgttggagtttgctggaggtccactccagaccctgtttgcctgggaatcagcagcggtggctgcagaacagcggatattggtgaaccgcagatgctgctgcctgatcgttcctctggaagttttgtctcagaggagtatctggccgtgtgaggtgtcagtctgcccttattgcactgtattaaaacgatgcattcatgtggccacctctccttcatggtaagcaccgtatctccttcacctccttctccataacacagcacagcctctgaaatgaagccagtcttcagcaagtgctttgatgaacagtaaattttgaagcagctcttgaagactcccttgaggtccattttcttttgctgaagcccaaagaggtggggaatatagggaaagtccttctctaggttcccatgggaacagacattgccctttttctcctcctccaacctttgagtccaacctccgagtccaacctccatcctgatgctaccaccatctggatctctccattcaagtgaccagagaagctcacccttcacttcattcaggtgtctgctcagattcat

SEQ ID NO: 11197 - DNA, 4162 bp, Homo sapiens
  SIMILAR (148)..(390): 911254mologous to Homo sapiens AIM-1 protein,accession number AF172849,Smith-Waterman Score=375.
  misc_feature (1)...(4162): n = a,t,c or g
atgagccgaagcagggcgaggcatcgcctcacctgggaagcgcaaggggtcagggaattccctttcctagtcaaagaaaggggtgacaggcagcaactggaaaatcaggtcactctcaccctaatactgcgctttcccaacggtcttagcaaacggcacaccaggagattatatcctgcgcctggcctggagggtcctacgcccacagagccttgctcactgccagcacaggagtctgagatcaaactgcaaggtggcagcgaggctgcgggaggggcgcccacctttgccgaggctcgacctccactgctgatacccaggcaaacagggtctggagtggacctccagcaaactccaacagacctgcagctgagggtcctgactgttagaaggaaaactaacaaacagaaaggacatccacaccaaaaccccatatgtacatcaccatcatcaaagaccaaagacagatcaatgagacagaaagttaacaaggatatccaggaattgaactcagctctgcaccaagcagacctgatagacatctacagaactctccaccccaaatcaacagaatatacattcttctcagaaccacaccacacctgttccaaaattgaccacatagttggaagtaaagctctcctcaggaaatgtaaaagaacagaaattataacaaactgtctctcagaccacagtgcaatcaaactagaactcaggattaagaaacgcacgcaaaaccgctcaactacatggaaactgaacaacctgctcctgaatgactactgggtacataacgaaatgaaggcagaaataaagatcttctttgaaaccaaagagaacaaagacacaacataccagaatctctgggatgcattcaaagcagtgtgtagagggaaatttattagcactaaatgcccacaggagaaagcaggaaagatctaaaattgacacactaacatcacaattaaaaggaccagagaagcaagagcaaacacattcaaaaactagcagaaggcaagaaataactaagatcagagcagaactgaaggagagggtcgggcgctggagaataggtgaagcagcggatttagttggggtttcttctcaggctatcagagatgccgagaaagcagggcgactaccgcacccggatatggaaattcgaggacgggttgagcaacgtgttggttatacaattgaacaaattaatcatatgcgtgatgtgtttggtacgcgattgcgacgtgctgaagacgtatttccaccggtgatcggggttgctgcccataaaggtggcgtttacaaaacctcagtttctgttcatcttgctcaggatctggctctgaaggggctacgtgttttgctcgtggaaggtaacgacccccagggaacagcctcaatgtatcacggatgggtaccagatcttcatattcatgcagaagacactctcctgcctttctatcttggggaaaaggacgatgtcacttatgcaataaagcccacttgctggccggggcttgacattattccttcctgtctggctctgcaccgtattgaaactgagttaatgggcaaatttgatgaaggtaaactgcccaccgatccacacctgatgctccgactggccattgaaactgttgctcatgactatgatgtcatagttattgacagcgcgcctaacctgggtatcggcacgattaatgtcgtatgtgctgctgatgtgctgattgttcccacgcctgctgagttgaatgactacacctccgcgagggaggnggaaaactctgactcaacacagcagtcacctgaaaatatttcccaaactcttcctcaaagggagctgctaccatattcagagtacctgaacacagtcgcgtacattatggagcctcaccaaatgcctcttggactaaattactcagggaaggaggaggaagagaatgagtggaagctgactttctcaagggattttgccgatttcggaaccaccatcaaacaggattttcgcctgctggggcaaaccagcgtggaccgcttgctgcaactctctcagggccaggcggtgaagggcaatcagctgttgcccgtctcactggtgaaaagaaaaaccaccctggcgcccaatacgcaaaccgcctctccccgcgcgttggccgattcattaatgcagctggcacgacaggtttcccgactggaaagcgggcactcgagacagcattcagcacgaagtggtttactaaaagccaatgtgctagaaaacttcagacagggacgttactcacacttttatggtggtataggatgtggaagtccaaatcatcccctggctggctctgtgtggataggggattctgggtacaagggtggcagaatgctgctgaacatttcaggaggagcgactcaagccttcgcgaaagaaaataaccaaaaagcatacaaagaaacgtacggcgtctctcatattacacgccatgatatgctgcagatccctaaacagcagcaaaacgaaaaataccaagtgcctcaattcgatcaatcaacgattaaaaatattgagtctgcaaaaggacttgatgtgtgggacagctggccgctgcaaaacgctgacggaacagtagctgaatacaacggctatcacgttgtgtttgctcttgcgggaagcccgaaagacgctgatgacacatcaatctacatgttttatcaaaaggtcggcgacaactcaatcgacagctggaaaaacgcgggccgtgtctttaaagacagcgataagttcgacgccaacgatccgatcctgaaagatcagacgcaagaatggtccggttctgcaacctttacatctgacggaaaaatccgtttattctacactgactattccggtaaacattacggcaaacaaagcctgacaacagcgcaggtaaatgtgtcaaaatctgatgacacactcaaaatcaacggagtggaagatcacaaaacgatttttgacggagacggaaaaacatatcagaacgttcagcagtttatcgatgaaggcaattatacatccggcgacaaccatacgctgagagaccctcactacgttgaagacgagggatcctntagaggattttgccgatttcggaaccaccatcaaacaggattttcgcctgctggggcaaaccagcgtggaccgcttgctgcaactctctcagggccaggcggtgaagggcaatcagctgttgcccgtctcactggtgaaaagaaaaaccaccctggcgcccaatacgcaaaccgcctctccccgcgcgttggccgattcattaatgcagctggcacgacaggtttcccgactggaaagcgggcagtgagcgcaacgcaattaatctctgaatcatttctcctggaaaacccagatgacctggctgacagcttcgtgtttctactgaaacctggtattccaacagacctgcagctgagggtcctgtctgttagaaggaaaactaacaaacagaaaggacatccacaccaaaaacccatctgtacatcaccatcatcaagaccaaaagtagataaaaccacaaagatggggaaaaaacagaacagaaaaactggaaactctaaaatgcagagcgcctctcctcctccaaaggaacgcagttcctcaccagcaacggaacaaagctggatggagaatgactttgacgagctgagagaagaaggcttcagacgatcaaattactccgagctacgggaggacattcaaaccaaaggcaaagaagttgaaaactttgaaaaaaatttagaagaatgtataactagaataaccaatacagagaagtgcttaaaggagctgatggagctgaaaaccaaggctcgagaactacgtgaagaatgcagaagcctcaggagccgatgcgaccaactggaagaaagggtatcagcaatggaagatgaaatgaatgaaatgaagcgagaagggaagtttagagaaaaaagaataaaaagaaatgagcaaagcctccaagaaatatgggactatgtgaaaagaccaaatctacgtctgattggtgtacctgaaagtgatggggagaatggaaccaagttggaaaacactctgcaggatattatccaggagaacttccccaatctagcaaggcaggccaacgttcacattcaggaaatatag

SEQ ID NO: 11198 - DNA, 1074 bp, Homo sapiens
  SIMILAR (376)..(636): 731254mologous to Gallus gallus neuronal tetraspanin,accession number AF206661,Smith-Waterman Score=327.
atggcctgcacgctgtcagttctctgtcccaccttaggggccgggtggcaaagagggtctttggtgcaatgctgccaagtcgctgtttctgggtctcctgccctgcaccccctccccactgtcctgtctcagcagccgtgtgataggggctgttacacggtgatcctcaacaccttcgagacctacgtctacttggccggagcccttgccatcggggtactggccatcgagccccagtgttcccacccgaaatggagctgggccctccttgaagtgtttagcatgcagttgctgaatccccaaatctccaacagcaataaggaggcacagattttcctggaggttgtgcgggagaccaacgagagagacacaggctggctgggcggggcctgcctgctggccatcggcatctgggtcatggtggaccccaccggcttccgggagatcgtggctgccaatcctctgctcctcacgggcgcctacatcctcctggccatggggggcctgctctttctgctcggcttcctgggctgctgcggggccgtccgtgagaacaagtgtctgctgctattttccccttttgtggaacaaaagttcttctgttttctgttccttatcccatacctcagtgacctgtgccccggggactgggagaagatcaccctggctcattccccagatgaacaaagctctgaagcaatggagagcctggggccagagggcacgaggatttcctggctcagcaccccagctgtccagagagcatcagcaggggcccgatcctgtgtccttgcctgggttctctgtttccagctgatcagggcagatgaacaggaaggggaaactgaggcaccaagttacctgtgcttccctgctgccagaaggagctttccagaaagcacatgtcaccacagccctctcttgctggaacccaacctctacaggagaccaagctgcctcctacagaccacaggacctccaagactcaccatcgccacctcttgttattcctgccctgactttcctatcaccaccatcaaaggagagtcccccagaggtcttcctgaggcctga

SEQ ID NO: 11199 - DNA, 1501 bp, Homo sapiens
  SIMILAR (8)..(796): 551254mologous to Homo sapiens SPF31,accession number AF083190,Smith-Waterman Score=633.
  misc_feature (1)...(1501): n = a,t,c or g
atgggaataatcggggaagtggttggcaatgcagatgccaagacctcgccccacaacactggatcagtgggtctggtgtggagcccaggtatcagcattataggacgatacccaagaggccgggctggaggagaagatggcggccaacagcccccgcctctgatgaagaagcacagccagacggacctcgtgagccgcctgaagacccgcaagatcctcggcgtgggcggggaggatgacgacggggaggtgcatcgctccaagatcagccaggtcttaggcaatgaaatcaagtttaccattcgggagcctttggggctcagggtctggcagttcgtctctgctgtgctcttctccggcattgccatcatgctctatgatgcggtctttgatggagcccaggtgaccagcaagacccccatccgcctctacgggtgccctcctcaatgctgcgcccacaccccggcctctgatgaagctctctgctggggatgtgctgccatcttgtggccattggtggaatacacccagtgggttggagcttgcagtcgccaccatctgcaaggagcgctcataagggacttccttaaagcgagtccttaccgggctcaggttttctgtctgggagtccgtgtaaaagaaaacccaatcataggaccaggcatctccctgatcatgtggaacgctctctacacggctgagaaggtcatcattcgatggaccctgctcaccgaagcttgctatttcggggtccagttcttgggctgggaacctcccatttgcctaaggatctccttaccccccatcaccaagcacagcccacatttcaccagccagcaaaatgcaaatgtcattagcgctctgcaagctgctcacccgagaattcttcaccaaggagctcaccaagcactaccagggcaataacgacacagacgtcttctctgccacctggaactcggtcatgatcacatttggttgctgcggggtcaacgggcctgaagactttaagtttgcatctgtgtttcgactcctgaccctggatagtgaagaggtgcgcgagttcgctcgccggattttacttccaaagtcgggacggggtcctgctgagcccgggaggaagtgcctcctgggaaggagcctattcctaaacaagcagggctgttacacggtgatcctcaacaccttcgagacctacgtctacttggccggagcccttgccatcggggtactggccatcgagcttttcgccatgatctttgccatgtgcctcttccggggcatccagtagagggtatggcctgaagcctggaagacttcgccccacccaccacttgcccagcacccaatgtcctcccgtgcccctccccgctgtcctcttggccccaaggggaagaagatgaggccatcagagatcgaaggggagaaggggccaggggaattagagctattttttttaacaaaaacaaaattgaaggacaaaaattntgggattnatgtnttc

SEQ ID NO: 11200 - DNA, 456 bp, Homo sapiens
  SIMILAR (3)..(452): 991254mologous to Homo sapiens dJ310O13.2.2 (novel protein similar to human putative proteins (isoform 2)),accession number AL031658,Smith-Waterman Score=808.
tcctggaagacaccctgcatgttgtggacatggaagcgaggctgcgtcaacgatcggaagaaacaactgaggcagctcttctgctcccttcaagttcagaagaaagcttccagttgatccccagctgccaggaggaaatcagccttagcaggtgccacccaggcctccccaccactcccagatcccagcacagcacctcacagcattcgcctccccacctccagcctggcaccagctttgctggcttagcagctgcagcttactacctgaattgggccccttggatacctccagcccatccccaggcatctttgcaccaggagacagccaatcactgggactgggggaggtttaaccttgacaaactgacttggcagttaggcccaaagagaacaaatacagcaagttctgctacccccaggagatcatatctaataaatgagcacaggccctaaa

SEQ ID NO: 11201 - DNA, 981 bp, Homo sapiens
  SIMILAR (1)..(297): 921254mologous to Homo sapiens hepatocellular carcinoma- associated antigen 67,accession number AF243495,Smith-Waterman Score=456.
atgctctgtgagctgcaaagtgctgctgatgtcactggtggtgacgatggtgatgatgttcacctcaccaacgtggctgtgcaaaaaacatctcccgactaccacccaaagaagctccatcccacagtggggcccttgtgcatacacagccctgaaaatggcagcctgtcggtcactccttggccttgggatgcacacatgggctgcaagtggacgctgcagcgcttccggcagtacctggcgtccaaacacgggcccgaggcagtggagacactcttcagggacatcgacaacatctttgtcaaaagcctgcagagtgtgcagaaggtgatcatcagtgacaagcactgcttcgagctgtacggctatgacatcctcatcgaccaggacctcaagccgtggctcctggaggtcaatgcgtccccatcactgacagccagcagccaggaagactatgagctcaagacctgcctcctggaagacaccctgcatgttgtggacatggaagcgaggctcacgggaagggagaagcgagtcgggggctttgacctcatgtggaatgatggccctgttagcagagaggagggggctcctgacctgtcgggaatgggaaactttgtgaccaacacacatctcggctgcgtcaacgatcggaagaaacaactgaggcagctcttctgctcccttcaagttcagaagaaagcttccagttgatccccagctgccaggaggaaatcagccttagcaggccttgagtttgagattgggagctgagccagaaaccggaaaaccctgggctcatgggcaggacagcttcgggagttgagtgtcaagcccgaagggaagacttttggaaggaaaatactggcaaatccaagaagtgaaccagccgactttaggaaagccagaagccaggctactctagaccttctgccttcagagcatgaggacttctcccactcatccctgtacctgaggcac

SEQ ID NO: 11202 - DNA, 645 bp, Homo sapiens
  SIMILAR (358)..(525): 981254mologous to Homo sapiens put. HMG-17 protein,accession number X13546,Smith-Waterman Score=290.
tcgtgcttgtccttgaaactaaagaacatcaaagaacaattccctttgcatccatgaattatggttagtgcctggttttgaatcattgcctctacttgggactcttgcccctttgggttttgctggttctgaaatttctgatgcctgtagccaaagtgggacatttgagtgggcttctggaaatccaacattctagaagaaagccaaccaccaaaaacttttgaggaggaggagaaaacttctcctacccctggtaccttttggttggttgtgggtggttttcttccagtcccattgtacctgatgttccacctttttccctcctccttcctgcccaaaaaaagaaacctgctcctcccaaagccagagcccaagcctaaaaaggcccctgcaaagaagggagagaaggtacccaaagggaaaaagggaaaagctgatgctggcaaggaggggaataaccctgcagaaaatggagatgccaaaacagcccaggcacagaaagctgaaggtgctggagatgccaagtgaagtgtgtgcatttttgataactgtgtacttctggtgactgtacagtttgaaatactattttttatcaagttttataaaaatgcagaattttgttttttaaaaaaaaaaaaaaaaaaa

SEQ ID NO: 11203 - DNA, 2100 bp, Homo sapiens
  SIMILAR (108)..(278): 801254mologous to Mus musculus Pro-Pol-dUTPase polyprotein,accession number Y12713,Smith-Waterman Score=260.
atctaatggtgggaaccacagtcactcaactacaaaatttaaatacaatgggaataattggatctcaaggtctcaggagccaagtggcagtattcaactgtcaaaagcaaggagacttccagcctttcaccagggtaactgagcactggggaaggggaaataatcagacatttcagggactactggacactggctctgagctgatgttgattccaggggaccaaaaacatcactgtggtcctccagttaatgtaggggcttatgggggtcaggtgttactttggcccatttatcaagtgacccaaatggctgccagttttgaattgggttcagaagagaagaaggctctgcaacaggtccaggctgttgtgcaagctgctctaccacttgggccatatgacccagcagatccaatggtgcttgagaaaggaaagaggtttgtactcactggaatagacacttactctggatatgggtttgcctatcttgcacacaatgcttctgccaagactaccatccatggactcacagaatgccttatccaccattatgatgcttcctgccctggaacactggactccaagttcttcagtttagggactcagactggctctccttgctcatcagcttgcagacagcctattgtgggaccttgtgatcatgatatggatgaaaaattttacagagaaatagatatcataaagaaaaagcaatcacaacttctggaaataaaagacacacttagagaattacaaaatacaatggaaattttcaacaatagactagaacaaatagaagaaataactttagagctcaaagacaaggcttttacattaacccaaccagagaaagacaaagaaaaaggaattttaaaaaatgaaccaagcctccaagaaatttgggattatgttaaacagccaaacctaagactaattggtgttgccgagcacctacgtcccgcttggcgtcgaccttcgccaccatgccctttaaaaaggctgaatgtgttggtgacgcacatcctgcgacggtgaaggacgaaccacagagaatatccgcgaggttgtcgtgctaaacctgctcctccaaagccagagcccaagcctaaaaaggcccctgcaaagaagggagagaaggtacccaaagggaaaaagggaaaagctgattgctggcaaggagggggaataaccctgcagaaaattggagatgccaaaacagaccaggcacagaaagcttgaaggtgcttggagatgccaagtgaagttgtgtgcattttttgataacctgtgtacttctgggtgactgtacagtttgaaaatactattttttatccaagttttattaaaaatgcagaatttttgttttactttttttttttttttttaaaagctatgttgttagcacacagaaacactttcattgttgtttttttgggggaaagggggcataatgtcactaataagaatgtctccaaagctggattgatgtgggagaaaacacctttcccttctaagttttgagagacttcctcttggctcccaggaggagggattccctgactttgacacacatggccaccttggcacaaaaagccttgtggtatagaaaaacaaatttgtttttatgtcctcttctccctttccatctttcagcatagacttaactcccttaagcccagacatctgttgagacctgacccctagtcattggttaccagtgtgtcaggcaatctggactttccagtgatgccactgagatggcacctgtcaaaagagcagtggttccatttctagattgtggatcttcagataaattctgccattttcatttcacttcctgaaagtcagggtcggcttgtgaaaagttgttaaacaacatgctaaatgtgaaatgtcaaccctcactctaaactttccctgttcagagcatcagatgaagacttcattgggttttatagtggctttctgatttttggtagtccattgaagaagggagtttgaaagttgttgtatactgttaacgattgtctgcccatgtcctgcctgaaataccatgattgtttatggaaagtatctttaataaagctggatacagtttggc

SEQ ID NO: 11204 - DNA, 393 bp, Homo sapiens
  SIMILAR (826)..(2436): 991254mologous to Homo sapiens p97mapk,accession number X80692,Smith-Waterman Score=2850.
agaacgacccccggaccgaccaaatttttcttttcgctgcatcccgcgtccagcacctacgtgccgctgccgtctccgccggcaccatgcccaagagaaaggctgaaggggatgctaacggagacaaagcaaaggcgcaggacgaaccacacagaagatccgcgaggttgtctgctaaacctgctcctccaaagccagagcccaagcctaaaaaggcccctgcaaagaagggagagaaggtacccaaagggaaaaagggaaaagctgatgctggcaaggaggggaataaccctgcagaaaatggagatgccaaaacagaccaggcacagaaagctgaatgtgctggagatgccaagtgaagcgagtgcatttatgataactgtgtacttctgg

SEQ ID NO: 11205 - DNA, 645 bp, Homo sapiens
  SIMILAR (475)..(621): 891254mologous to Canis familiaris non-histone chromosomal protein HMG-17,accession number AJ388518,Smith-Waterman Score=235.
atggccacaggtaccgtggagatcacgggctgtgacccaccagttgtattagcaaatgtcaatggcagacccagatacagggatgagctgggaaatccaacaaagctgacatatctaggacatagaaggaagctggtgcagccaggatacccagaagtgagatcaacaacagcgggagaggtggggcctttggatcccttcaaaaggcttccccaaggagacacagctgtggatgatgagtctgagtggcttcaatctgactgtaacctcatgaaatacccctgtgagatccagaagaaccacccagctgtcaccgtcaacccacagaatggtctggaggctgggaagtccaagatcaaggtactagcagatctggtgtctggtgacagtcagcttcctggtttgcagatggccctcttctcactgtatcctcacatagtggaaagcagagagagaggaaatagagcccaggccaaaaaagcccctgcaaagaagggagagaaggtacccaaagggaaaaagggaaaagctgaggctggccaggatggggataaccctacagaaaatggagatgccaaaacagaccagggacagaaagctgaaggtgctggagatgccaagcgaactgtctctcaccagaactaa

SEQ ID NO: 11206 - DNA, 843 bp, Homo sapiens
  SIMILAR (1513)..(1298): 761254mologous to HERV-H/env62 envelope protein,accession number AJ289709,Smith-Waterman Score=268.
aggtccggatttccctggtcgaccatttcgttgcatcccgcgtccagcacctacgtcccgctgccgtcgtcgccgccaccatgcccaagagaaaggctgaaggggatgctaagggagataaagcaaaggtgaaggacgaaccacagagaagatccgcgaggttgtctgctgtaagtgtacgcttttgaattttcgtgcttgtccctgaaactaaaaaacatcaaaaaacaattccctttgcttccatgaattatggttagtgcctggttttgaatcattgcctctacttgggactcttgcccctttgggttttgctggttctgaaatttctgatgcctgtagccaaagtgggacatttgagtgggcttctggaaatccaacattctagaagaaagccaaccccacaaaaacttttgaggaggaggagaaaacttctcctacccctggtaccttttggttggttgtgggtggttttccttccagtcccattgtacctgatgttccacctttttccctctccttccctgcccaaaaaaagaaaccctgctccctcccaaagcccagagccccaagcctaaaaaggcccctgcaaagaagggagagaaggtacccaaagggaaaaagggaaaagctgatgctggcaaggaggggaataaccctgcagaaaatggagatgccaaaacagcccaggcacagaaagctgaaggtgctggagatgccaagtgaagtgtgtgcatttttgataactgtgtacttctggtgactgtacagtttgaaatactattttttatcaagttttataaaaatgcagaattttgttttttaaaaaaaaaaaaaaaaaaa

SEQ ID NO: 11207 - DNA, 1302 bp, Homo sapiens
  SIMILAR (187)..(459): 471254mologous to Canis familiaris non-histone chromosomal protein HMG-17,accession number AJ388518,Smith-Waterman Score=182.
tgaaatccggttctaaccggtccggggctcccagcgctataaaaactttataaaccccccggagcccgagcagtgtgaaggagaagaggcaagaacgacccccggactgaatcaaagcccgcgcgccgctgycatgcccgsgtkccagcacctacgtcccgctgccgtcgccgccgtcatccatgcccaagagaaaggctgaagggcatgctatgggagataaagcaaaggtgaaggacgaacctcagagaagattcgcgaggttgtcgtgctaaacctgctcctccaaagccagagcccaagcctaaaaaggcccctgcaaagaagggagagaaggtacccaaagggaaaaagggaaaagctgattgctggcaaggagggggaataacccttgcagaaaaatggagatgccaaaacagaccaggcacagaaagcttgaaggtgcttggagatgccaagtgaagttgtgtgcattttttgattaactgtgttacttctgggtgactgtacagtttgaaaatactattttttatccaagttttattaaaaatgcagaatttttgttttactttttttttttttttttaaaagctatgttgttagcacacagaaacactttcattgttgtttttttgggggaaagggggcataatgtcactaataagaatgtctccaaagctggattgatgtgggagaaaacacctttcccttctaagttttgagagacttcctcttggctcccaggaggagggattccctgactttgacacacatggccaccttggcacaaaaagccttgtggtatagaaaaacaaatttgtttttatgtcctcttctccctttccatctttcagcatagacttaactcccttaagcccagacatctgttgagacctgacccctagtcattggttaccagtgtgtcaggcaatctggactttccagtgatgccactgagatggcacctgtcaaaagagcagtggttccatttctagattgtggatcttcagataaattctgccattttcatttcacttcctgaaagtcagggtcggcttgtgaaaagttgttaaacaacatgctaaatgtgaaatgtcaaccctcactctaaactttccctgttcagagcatcagatgaagacttcattgggttttatagtggctttctgatttttggtagtccattgaagaagggagtttgaaagttgttgtatactgttaacgattgtctgcccatgtcctgcctgaaataccatgattgtttatggaaagtatctttaataaagctggatacagtttggc

SEQ ID NO: 11208 - DNA, 439 bp, Homo sapiens
  SIMILAR (140)..(304): 821254mologous to Homo sapiens Human 5' EST secreted protein SEQ ID NO:430,accession number Y12399,Smith-Waterman Score=228.
ccgaggcccagcagagcgctgccaacgtgaaagaccagaaaggcgaggacttccggcctccccgttggccagggtctcatgttccggtgcagcgccagctgttgtgaggacagccaggcctccatgaagcaggtcaccagtgcatcgagcgctgccatgtcgctctgctcaagcccaggctttggtcaccagtgagctggagaagttccaggaccgcctggcccggtgcaccatgcattgcaacgacaaagccaaagattcaatagatgctgggagtaaggagcttcaggtgaagcagcagctggacagttgtgtgaccaagtgtgtggatgaccacatgcacctcatcccaactatgaccaagaagatgaaggaggctctcttatcaattggaaaataaaagtatttgccagtggccatcagggctgagggcaagaat

SEQ ID NO: 11209 - DNA, 773 bp, Homo sapiens
  SIMILAR (339)..(506): 751254mologous to Homo sapiens Human 5' EST secreted protein SEQ ID NO:430,accession number Y12399,Smith-Waterman Score=213.
cggacgcgtggggccatggctgagctgcagcagctccgggtgcaggaggcggtggagtccatggtgaagagtctggagagagagaacatccggaagatgcaggtgagcggcccgaggcccagcagaggcgctgccaacgtgaaagaccagaaaggcgaggacttccggcctccccgttggccaggtcatgcctgcttctcttgcgcccaacctcgcttcacacagcgcgggtttctacactgttcttctctgagccccgcaatgcctctggtctcatgttccggtgcagcgccagctgttgtgaggacagccaggccttccatgcagtaggtgcaccagtacatcaaagcactgcaatggcgcctctggctcaagcccgggctttgctcaccagtgagttggagaagttccggcaccacctggcccggtgcgccatgcattgcaacgacaaagccaaagattcaatagatgctgggagtaaggagcttcaggtgaagcagcagctggacagttgtgtgaccaagtgtgtggatgaccacatgcacctcatcccaactatgaccaagaagatgaaggaggctctcttatcaattggaaaataaaagtatttgccagtggccatcagggctgagggcaagaatatattttttataaggaattgggaattttagtcttttaagcaaagtttacgaatgaagaaatgaaggatggccacaagcgtaaggcatatgtcacttgcctctggacactggttattttatgtttcagtccct

SEQ ID NO: 11210 - DNA, 441 bp, Homo sapiens
ttagtggaggcccagagagcttgtgtgtaaggggctgtgaccagactgctcagcaagggcttttgcttcgcagagtgctgcgcgtacattagaaagctgctgagtggaaatcttattccctgggattttaaacagccacatttcctggcgtttgacatcaatgggacatttagcaaatggagtgccagatggagctcctggctctattttattcaatacgagtgcttctaagaaaatcgcacttttcttataagcttccggataagaattgtgcaaggacagttgtattgcatcaaaacatgtggttttcacacgcattgctgtgcagatcacaggatttttgcacctgacaagaacatcttcaaaatcttccaagattccttcctgcaggcccctagttttattactagccagcgttccctcggattcacaccctgtcat

SEQ ID NO: 11211 - DNA, 927 bp, Homo sapiens
  SIMILAR (20)..(691): 751254mologous to Mus musculus surfeit 3 protein,accession number M14689,Smith-Waterman Score=797.
  misc_feature (1)...(927): n = a,t,c or g
tttggccttgacagnacatcagcccaaaaaagacctcaccggctttgtgaaatggccccgctatatcaggttgcagcggcagagagccatcctctataagcggctgaaagtgcatcttgcgataaaccagttcacccaggccctggcccgccaaacagctactcagctgcttaagctggcccacaagtacagaccagagacaaagcaagagaagaagcagagactgttggcccgggccgagaagaaggctgctggcaaaggggacgtcccaacaaagagaccacctgtccttcgagcaggagttaacaccgtcaccaccttggtggagaacaagaaagctcagctggtggtgattgcacacgacgtgggtcccatcgagctggttgtcttcttgcctgccctgtgtcgtaaaatgggggtcccttactgccaatatcaagggaaaggcaagactggggacgtctagtccacaggaaagacttgcaccacttgtcgcttcacacaaggtgaactcgggaagacaaaggcgctttggctaaaactggtggaagctatcaggaccaattacaatgacagatacgatgagatccgcctgtcactggggtggcaatgtcctgggtcctaagtctgtggctcgtatcgccaagctccgaaaaggcaaaggctaaagaacttgcccactaaactgggttaaatgtacactgttgagttttcatgtacataaaaataattgaaatatatacaaattttccttcnnnnnnnnnnnnnggggggcccctttaaaaagaaaaaattttaatacccgggggtgggaaaggaaaacttttttttagggggccccaaaataaatttccggggccgggttttaaaaacgggggagggggaaaaacccgggggtacccaaattaaaaccccttggaaaaaaaa

SEQ ID NO: 11212 - DNA, 400 bp, Homo sapiens
  SIMILAR (32)..(175): 1001254mologous to Homo sapiens Human secreted protein, SEQ ID NO: 6355,accession number G02274,Smith-Waterman Score=254.
  misc_feature (1)...(400): n = a,t,c or g
cctgcgccggaatttccgggtcgacgatttcgtgtctggtgtgggtttcccaagcaaggttccttggaagaagatgtctgcagaggagctggagaatcagtactgtcccagccgatgggttgtccgactgggggcagaggaagccttgaggacctactcacagataggaattgaagaccctgtgtcaaggagagtggaaagcctcatttgaagagctccacgatgtggaccactttgaaattgttgagaatctgacccagaaggacgacgtgctcacccagattatcttgaaaacaatcttccagtagttctgacgatacttggagcctggtccacgtgcatcccaccttgggaagcctctccaaagagctttcggagctgacactgacagcttcagttn

SEQ ID NO: 11213 - DNA, 436 bp, Homo sapiens
  SIMILAR (248)..(352): 501254mologous to Homo sapiens Human secreted protein, SEQ ID NO: 6582,accession number G02501,Smith-Waterman Score=95.
tttttttttttttaccaagcaaatgttcacatttattaatacaggttatgtttttaagaatgaacataaaaacagtgacatactattttgtaagtacattaatgatatcatattttaatatatacagactaataaacaatgacagtaaatcttcactgatttagataaaatgaatagtcactaaattaataaaaccagtgctagcttctacttacaatacagttatattacttttatgtaagttattctatggtatttggaaatagtttgctcttttatttttttattttttatttatttttattttttgagatggagtcttgctctgttgcccaggctggagcacagtggagattttcatgagtgtcccagcagtgagaatggactcttgccgggcagacagacacagcaaggctctcctgggtgctgggggaaa

SEQ ID NO: 11214 - DNA, 432 bp, Homo sapiens
  SIMILAR (1)..(1155): 981254mologous to Homo sapiens putative p150,accession number U93563,Smith-Waterman Score=1955.
cagggtttcaccatgttggccaggctggtctcgaactcctgacctcgtgatccgcctgcctcagcctcccaaagtgctgggattacaggtgtgagccaccacgcctggccccagtccaaaatatttaaagattgtttccttagtgtcttgaagttttgcacaaaattcttttttttgagatggagtctcactctgtcacccaggctggagtgcagtggcgtgatcttggctcactgcaacctctgcctcctgggttcaagcaattctcccacctcagcctcccaagtagctgggattagaagcatgcgccaaaaaggccgggctaatttttttgtatttttagtagagatgggttttcaccatgttggccaggctgatctcgaactcctgaccttgtgatctacccacctcagcctcccaaagtgctgggat

SEQ ID NO: 11215 - DNA, 550 bp, Homo sapiens
  SIMILAR (550)..(428): 1001254mologous to Homo sapiens Human secreted protein, SEQ ID NO: 6355,accession number G02274,Smith-Waterman Score=217.
gaaacttaatggaaattttattttctcacagttctgcaaactggaagtccaagatcaaggtgccagcagggttggtgtctgataagccccagggctgcagacctgccaccaatcctttgctgaaagccatctgggctgtctcccaggccatgctaccacaaacacccctgctgtgaatagctttgtacatccattaccataccacttgcaagcatctgtaggacgcactctcaggggtagaattctgggtcaaaaggcagacgcatttgtcactgtgaggccattgccggctgccatccatgggggtttgccaacaaccctgccccagcacagtgtgaagacaatgtgcctcacaggctcatcggagtggcttcatcagaaggtcgtgatttaattcacacaggagttctcaagcctataaatggacttcaattcctatctgtgagtaggtcctcaaggcttcctctgctcccagtcggacaacccatcggctgggacagtactgattctccagctcctctgcagacatcttcttccaaggaaccttgct

SEQ ID NO: 11216 - DNA, 882 bp, Homo sapiens
  SIMILAR (803)..(573): 1001254mologous to Homo sapiens Human secreted protein, SEQ ID NO: 8129,accession number G04048,Smith-Waterman Score=416.
tttttttttttttgagatggagtcttactctgtcacccaggctggagtgcagtggcgtgatctttgtcatgctctgtcagcaggtagatgggccagacgagtctaagaggcagctccgggcatctctgagcattgacttgcggacgttccccagccctggagctccatccaggctgggaagagggaggacgtggagattttcatgagtgtcccagcagtgagaatggactcttgccgggcagacagacacagcaaggctctcctgggtgctgggggaaactgaagctgtcagtgtcagctccgaaagctctttggagaggcttcccaaggtgggatgcacgtggaccaggctccaagtatcgtcagaactactggaagattgttttcaagataatctgggtgagcacgttgtccttctgggtcagattctcaacaatttcaaagtggtccacatcgtggagctcttcaaatgaggctttccactctccttgacacagggtttgttgcttggataccgcttctggacaaacgcaacgctgcgggtcacctggtctaccatgtggtccagggtgccttccgctctgccagtatcctccgtgaaagaacaggaagaaaggcaaggcttcagacgactcgtcggggaagtaaatgtccactttctccccttcgccgtctccataggggacatgcagcaggctcttcctggtggcccgggcccttgtggtggcttcaattcctatctgtgagtaggtcctcaaggcttcctctgctcccagtcggacaacccatcggctgggacagtacatgattctccagctcctccgcagacatcttcttccaaggacccttgcttgggaaacccacaccagacacatccatcat

SEQ ID NO: 11217 - DNA, 474 bp, Homo sapiens
tcctcccctttcccgtctcctctgtcctcggcaccctcacagtggctggcctgagggctactctccggagcatttgcgctgtggcctgcgctctggcaccctcaggtctaggcaggctcttcactgccaggtgagttctaacccctagcctccctctctgtggttttgaggttgtggaaatgttctctgagaattaatggaatacttagtgtaaaagaaaaaaaggaacaaaacacacgacagtcagatcagctgctgagtaagaggaggacctccctggcctgacctccattttctgaagggaaatggagtccttggcaggtggggctgtgcggtcgccctttccagcaccatgggtgggtggaactgtgcctttttgtcctaccggtttcagtcaatctttatcaagttttgctttccgaaatttgggaattccaccgcacggactagtgtcatcgatctcaaggggggccg

SEQ ID NO: 11218 - DNA, 2441 bp, Homo sapiens
  SIMILAR (1183)..(2016): 991254mologous to Cloning vector pSacBII RepL,accession number U09128,Smith-Waterman Score=1401.
cccgctggtcgctgccggacggcgtgggcggtggccgcgcagcagctgatgctgagcgcggcgctgcggaccctgaagcatgttctgtactattcaagacagtgcttaatggtgtcccgtaatcttggttcagtgggatatgatcctaatgaaaaaacttttgataaaattcttgttgctaatagaggagaaattgcatgtcgggttattagaacttgcaagaagatgggcattaagacagttgccatccacagtgatgttgatgctagttctgttcatgtgaaaatggcggatgaggctgtctgtgttggcccagctcccaccagtaaaagctacctcaacatggatgccatcatggaagccattaagaaaaccagggcccaagctgtacatccaggttatggattcctttcagaaaacaaagaatttgccagatgtttggcagcagaagatgtcgttttcattggacctgacacacatgctattcaagccatgggcgacaagattgaaagcaaattattagctaagaaagcagaggttaatacaatccctggctttgatggagtagtcaaggatgcagaagaagctgtcagaattgcaagggaaattggctaccctgtcatgatcaaggcctcagcaggtggtggtgggaaaggcatgcgcattgcttgggatgatgaagagaccagggatggttttagattgtcatctcaagaagctgcttctagttttggcgatgatagactactaatagaaaaatttattgataatcctcgtcatatagaaatccaggttctaggtgataaacatgggaatgctttatggcttaatgaaagagagtgctcaattcagagaagaaatcagaaggtggtggaggaagcaccaagcatttttttggatgcggagactcgaagagcgatgggagaacaagctgtagctcttgccagagcagtaaaatattcctctgctgggaccgtggagttccttgtggactctaagaagaatttttatttcttggaaatgaatacaagactccaggttgagcatcctgtcacagaatgcattactggcctggacctagtccaggaaatgatccgtgttgctaagggctaccctctcaggcacaaacaagctgatattcgcatcaacggctgggcagttgaatgtcgggtttatgctgaggacccctacaagtcttttggtttaccatctattgggagattgtctcagtaccaagaaccgttacatctacctggtgtccgagtggacagtggcatccaaccaggaagtgatattagcatttattatgatcctatgatttcaaaactaatcacatatggctctgatagaactgaggcactgaagagaatggcagatgcactggataactatgttattcgaggtgttacacataatattgcattacttcgagaggtgataatcaacttcacgctttggaaaaagaaaccttaacacttaatttcttctccaaggggtttcctgaggctttcaaaggacacttgctaaccaaaagtggaaaaaacccagtttttggcaatagcatcactcattgtttgtgggcattccagttaagagcacaacattttcaagaaaattcaagaatgcctgttattaaaccagacatagccaactgggagctctcagtaaaattgcatgataaagttcataccgtagtagcatcaaacaatgggtcagtgttctcggtggaagttgatgggtcgaaactaaatgtgaccagcacgtgggaacctgggcttcgcccttattgtctgtcagcgttgatgagcactcagagggactgttccagtgtctttctcgagaagcaggtggaaacatgagcattcagtttcttggtacagtgtacaaggtgaatatcttaaccagacttgccgcagaattgaacaaatttatgctggaaaaagtgactgaggacacaagcagtgttctgcgttccccgatgcccggagtggtggtggccgtctctgtcaagcctggagacgcggtagcagaaggtcaagaaatttgtgtgattgaagccatgaaaatgcagaatagtatgacagctgggaaaactggcacggtgaaatctgtgcacttgtcaagctgtgagacacagttggagaagggggatctgctcgtggagctggaatgaaagggatttataacctttcagtcatcacccaatttaattagccatttgcatgatgctttcacacacaattgattcaagcattatacaggaacacccctgtgcagctacgtttacgtcgtcatttattccacagagtcaagaccaatattctgccaaaaaatcaccaatggaaattttcattgatataaatacttgtacatatgatttgtacttctgctgtgagattccctagtgtcaaaattaaatcaataaaactgagcatttgtct

SEQ ID NO: 11219 - DNA, 2602 bp, Homo sapiens
  SIMILAR (215)..(322): 941254mologous to Homo sapiens propionyl-CoA carboxylase,accession number X14608,Smith-Waterman Score=166.
atggcccaagtcattcatgaggaatccacccccattgttgcaggactttttcttggtttagctaaggatggggttctttcgtcccatggccatgaaaattcaggcccacagacaatttgaatgggctttgacccgaagcttggaattgagtcgggaacacaaatgtgtctcgaggggagttgtgtggactccttaccataagtggaatactaaggtggaagttgatgggtcgaaactaaatgtgaccagcacgtggaacctggcttcgcccttattgtctgtcagcgttgatggcactcagaggactgtccagtggctggctgagggctactctccggagcatttgcgctgtggcctgcgctctggcaccctcaggtctaggcaggctcttcactgccaggtggaggagcttcctggggactgcatgccggcctcccaaacacccacccagcccttcctctgcaggcatctgagggcccaggactggccagagccccgtccccccgccaagtacattggcttcacatgggtggcacagcccctaccctctctgccagtaggatcttcaagtgagtgcgttagcaactcaactgcaaatatgaagaaatgcggcctggggatttcccaaggtcacgctaggggcaaaggccagcctgacctggctacagctctactctgggccccgccagggcctgggagcaagtgggtggtggacaggagcttaaggggctctgctgtggctgccactgaccatctttctggctggctctgtgcttctaatgtgggtgatttgcaaagaggtaacgcacaggatgtctccaatgttgggcttacaaaatggtcacaagcctcacaagtctttttgatgaacctagtgggcctgatgtatctccccgctccctgtctaattggtgtaaagtttgaaggcctgaatcctgtatctttcatccagcttattgcgtcctctcctttgacacgaggtcaaggttcacgttcgcatccgattatcagagcggcactcattaagcaggagtcggccttgccccaaacaaggcttgagagaaacctcggcccatttactcagcagattttcgcatgtcgtgggggcccgagtgtcacccagcattgctctgtgctgaagagctgcagacacctccagctgatgatgaattttctcttcactccttccacaaagattaaaagacagagaaccttctcccgcacatgccccctctcagaaaacatgctaagacagggacacatttggcaatgccgatcattcaaactgcagactgccatgaccacgaagaacgctcaaagaaagtgcaggaagaaaaagaagagaacgggggaaaaaagaccaccaaacataaaaggaagcccccacaagcacaggcttgaaagcggtgctcaagaccagatattcatcagaagacagaaggctcggagggcttaccagcccgctgcagtttccacttctgcaacgccggaccaccggaaaaacacggatcaatatcagccctggtgtctacgccacaaaagtgaaaatcccaccatttcattgttaaaggctgactcctttaatggcccatgcacgagcggcctcactctggagggcgcgggaacccaggggccacccgtccagccccgctgccggctcgggacttcaggcacacgtgccgtctgcctggtgctccccttgtctctcaagtggggctccccagaactgggcagcacccaaggggctaaggaagccaatgccaactacctgattttttcctcaatgttaagcagatattttatctgtactattgagaaatcaggaggcactaaaataaaaacatctcaaaacgttataaagaaaactgagaattttacttgtattcccttcaccacctacaaacttatccctatcaaggaaaatcccatgagctgggcagacccaggggatggaggaggtgacatgtggacaggcgccagtagatggcagcagatggctgttgcagcttcccacagccctccaagagcggctgcactacgtatcacctgtagaagtagcagtaatgtaattctgcagaccccatgcgctaaatgttgcaatgatcccgaggtctgcggctgctcccgagaatgtggagagcctggtgattccatccattttaacactgatcgcctcaatctgaagacagtctcaggggaaaatggactgagccacaattgtttagcttttttcctgggtggtaaatgtgcagataagccatttctctctgcccaacacctgaatggaacaatgattatcttccgggatacaaaactatctcctagtttcaccagttatgtgagcgcggatgctgacaaaggagaagtcttatttttcaaacgtcttttgggaacagcaaaggctatgaatattttagaactaataaatggaaaaaggaaagtagtaacttcagagtggagaaagggacaaacaccacctgaaccaaatgatcaaagtgatgccattaacagtgggacaaagagaaacgtgaacatgcgcctcccgagaggggacaacgaggacaacgcagcagcaccaccgttacgttcctgccaaaaatga

SEQ ID NO: 11220 - DNA, 508 bp, Homo sapiens; identical to SEQ ID NO: 3110
  SIMILAR (74)..(148): 561254mologous to Neurospora crassa hypothetical protein,accession number X01075,Smith-Waterman Score=64.

SEQ ID NO: 11221 - DNA, 1440 bp, Homo sapiens
  SIMILAR (1138)..(1031): 411254mologous to Homo sapiens Human secreted protein encoded by gene 22 clone HOGCO71,accession number W74752,Smith-Waterman Score=69.
gttgaagccctaactcccaatgtgactgtatttgaatgtaaagcctttaaggaagtaattaaagttaaatgtggccagaaggatgctgacaacatgagcctcccgtggtcggaacgggcttgtgaaggcggtgctggggtgcaccagggcagcagctacaggaagggctccatcctgtgctcaaccctggggatgctggacagctttgaggaggtcacagaaccaggccagtgttcgaactcaggagccgaatgtggagcctgtgctcggctgttcaacccgctagcagcaccaaccagcccgtcaaccccacacctagcctgctctcacaactgcttggggaacttttacaagagacaaattttctgctatgcagccatgatgaaaaaggaaatagatgtccacgtgctgatgtggaacagtttccaagatacatatggctataaagaaggacaagttgaaaaggacatggagcaaccagaagttctgtatgctgatggtgggagtggaaatcagtgcaaccactttggaaaactggcaatatcttctttgaggtttgtaagccacagaaaggcacagggttcctggagctcactggaaccagagaacttcaaaactcaggtactcagagataatccttgcatttctgagcatgctggggacttcctcacaggacaggctgtctgtggctttggtgacaagatcaggctgttgggggctttgcctgctttgacagcatcttcagcacctggaacagtgcctggtgcacagtgggtgctcactaaatattcagaggtacttacatgcacgtccaccttcttccaggaggaggaaaggaaagggaaggaagctttttctccattgcccaaagtctttgatatttgtattagtctgttctcacactgctataaagaactgcccaaggcttctgaggagctgtctggtacggaggcacctcagacccgccaggacgttctgtctgacttgacgtctgacttgacatctgccctttgttctgaggggccaagcccatttgcagctggcagaaaaaccctcccaatctgcagggaggagcttcacagggaccctggagagaatgttgtgcttcagcgagttcacataaaatcatctctgacggtgttgaggaaagtgccagggaactttggtctctcagtcactcatggattcagcagatacttcggagcagctgttatggaccaggtgctcatagctctcacatcactaggtactgaggagaaccctgtcaggaattatgattctcattgtgtagttggggaagctgagacatggaaggctgagctgtctgacgtgacgcagctggggagtggccgagctggaaatggagcccaggtctgtctgactctggagtctgtgcctttgactgatgcagaaattcagaacatccgtgctgaggcgtag

SEQ ID NO: 11222 - DNA, 409 bp, Homo sapiens
  SIMILAR (338)..(240): 421254mologous to Homo sapiens L apoferritin (aa 126- 175),accession number X03743,Smith-Waterman Score=71.
gtatatggattcttctttaagataaagggactcaaacatgatactacctcttatagtttttacatgcagagaataaagcacacagacctggaatctccctctgcggtctacgagcacaaccacgtcagcctgcgagccggcacgcctggtgaagtatgagatcagagcagaggccctggttgacggcaagtggcaggagttcaggacaaaccagatcaagcagaagtttgggttgaccacgtcatcctgcaaaagccataccttgaaaatccaaactgtgggcatcccaatctatgtaagttttgcattcatcttcccagcatcttgacagtttccagaatgaatctatgggattttccccccactggtctgcataaaagaaaataaaatgacataaaaggggaaaaag

SEQ ID NO: 11223 - DNA, 1971 bp, Homo sapiens
  SIMILAR (3)..(941): 991254mologous to Homo sapiens TACC2 protein,accession number AF095791,Smith-Waterman Score=1661.
tggagtttgactattctgaggacaagagtagttgggacaaccagcaggaaaacccccctcctaccaaaaagataggcaaaaagccagttgccaaaatgcccctgaggaggccaaagatgaaaaagacacccgagaaacttgacaacactcctgcctcacctcccagatcccctgctgaacccaatgacatccccattgctaaaggtacttacacctttgatattgacaagtgggatgaccccaattttaaccctttttcttccacctcaaaaatgcaggagtctcccaaactgccccaacaatcatacaactttgacccagacacctgtgatgagtccgttgacccctttaagacatcctctaagacccccagctcaccttctaaatccccagcctcctttgagatcccagccagtgctatggaagccaatggagtggacggggatgggctaaacaagcccgccaagaagaagaagacgcccctaaagactgacacatttagggtgaaaaagtcgccaaaacggtctcctctctctgatccaccttcccaggaccccaccccagctgctacaccagaaacaccaccagtgatctctgcggtggtccacgccacagatgaggaaaagctggcggtcaccaaccagaagtggacgtgcatgacagtggacctagaggctgacaaacaggactacccgcagccctcggacctgtccacctttgtaaacgagaccaaattcagttcacccactgaggagttggattacagaaactcctatgaaattgaatatatggagaaaattggctcctccttacctcaggacgacgatgccccgaagaagcaggccttgtaccttatgtttgacacttctcaggagagccctgtcaagtcatctcccgtccgcatgtcagagtccccgacgccgtgttcagggtcatagttttgaagagactgaagcccttgtgaacactgctgcgaaaaaccagcatcctgtcccacgaggactggcccctaaccaagagtcacacttgcaggtgccagagaaatcctcccagaaggagctggaggccatgggcttgggcaccccttcagaagcgattgaaattacagctcccgagggctcctttgcctctgctgacgccctcctcagcaggctagctcaccccgtctctctctgtgggtgcacttgactatctggagcccgacttagcagaaaagaaccccccactattcgctcagaaactccagagagaggcttgttcacccaacagacgtctccatcttccaaaacagccttgtactcccgcatcaggaccactgaggtggagaaacctgcaggccttctgttccagcagcccgacctgggactctgccctccagatcgccagagcagagatcattaaccaaggagagagaggtctcagaatggaaagataaatatgaagaaagcagggcgggaagtgatggaaatgaggaaaatagtggccgagtatgagaagaccatcgctcagatgatagaggacgaacagagagagaagtcagtctcccaccagacggtgcagcagctggttctggagaaggagcaagccctggccgacctgaactccgtggagaagtctctggccgacctcttcagaagatatgagaagatgaaggaggtcctagaaggcttccgcaagaatgaagaggtgttgaagagatgtgcgcaggagtacctgtcccgggtgaagaaggaggagcagaggtaccaggccctgaaggtgcacgcggaggagaaactggacagggccaatgctgagattgctcaggttcgaggcaaggcccagcaggagcaagccgcccaccaggccagcctgcggaaggagcagctgcgagtggacgccctggaaaggacgctggagcagaagaataaagaaatagaagaactcaccaagatttgtgacgaactgattgccaaaatggggaaaagctaa

SEQ ID NO: 11224 - DNA, 2204 bp, Homo sapiens
  SIMILAR (1098)..(1328): 971254mologous to Homo sapiens TACC2 protein,accession number AF095791,Smith-Waterman Score=372.
gcggccgccccggctcccggctgcaggaatcgcgccaggacgctggccccgctcgcggctagcttgcacgccagggcacagcgaggatgggagggtcgcagtccctgcagccagccccagccagcgacctgaacctggaggcttccgaggcaatccttggaaagctttacctggggctgctctgggaggagcatctggtagccccaagttactgctgtgggcagaaacgattccctggaattcagttttggtcgctcagcagtgggtgcatggctggggggcttctcctgccgtcagcatctttcctctgcacccccggcacagtggtatttcctgcaagggaacagccaggcatcagcgactgcctcctcctaggaagaacccatgagcgtggcagctccgtgcccggggcgacagcccagtttccgggcagctgcgcttgtggctgggcagatggcgtggagaatacaacttattcgaaaacgattgctctatatggattcttctttaagataaagggactcaaacatgatactacctcttatagtttttacatgcagagaataaagcacacagacctggaatctccctctgcggtctacgagcacaaccacgtcagcctgcgagcggcacgcctggtgaagtatgagatcagagcagaggccctggttgacggcaagtggcaggagttcaggacaaaccagatcaagcagaagtttgggttgaccacctttcttgagaactgttgctttctggaccgggacataggacgaagcttgaggccgctcttcctctgcttgcgtctgcacggcatcaccaaaggagaaaacagcaccacagccatcaaatatgagcatcaactgatctggttccaaattcatgagagctgctgtgatcacactttcacagatgaggacattgcagctgcggggcagttaagcaactcacaggaggttccacagccagtctggaaaatagtggccgagtatgagaagaccatcgctcagatgataggtaggtgtcctgacctgcgggggctcaggccggccccgatgtttctgaactatgaggaggccttggaagataggaggctcagaacagctcccgagggctcctttgcctctgctgacgccctcctcagcaggctagctcaccccgtctctctctgtggtgcacttgactatctggagcccgacttagcagaaaagaaccccccactattcgctcagaaactccaggaggagttagagtttgccatcatgcggatagaagccctgaagctggccaggcagattgctttggcttcccgcagccaccaggatggccaagcagggaactgtcgacaagggggctacgatgccacccccagctgccagcaggaaggaccccaggcacagcctgcaggtctgaagtgggtgacagtggccagaggttctcacaggtcgcaggacttcagtggagtgaagagagaggctgctcacccaacagacgtctccatctccaaaacagccttgtactcccgcatcgggaccgctgaggtggagaaacctgcaggccttctgttccagcagcccgacctggactctgccctccagatcgccagagcagagcacaaagctcggctggaacgccgggtcactggctcaaccaaccggtggcgtttgcccaaacagcctttctctggggacctgctctcactttcccagatgtgcaaggctctgagcatagactttgaggaagctttgaggaacccagacagttccttcctccaggacaacaccttcctccagcacaacaggggcagaggagccggtcttctggggagaagcttttacacatctggccctctcctttgtgatattgggaagctgcatgtccagaggcagcagatactctcaggtgttctgggctcaggtccagcaccacctcctcttggaagtcaccctgattgctcctccccacatactgccttagttttgatttccatgccttccttcttctacctggttccttacctccctccacctcccatgaaacaacagactgccgggaagcagcgctccccatacaaatccatcctgagtgccagctctgtgctgacctgtgctgctggttctggaaatgccaccagggacaggtggaggccttttcgtcctggagctcatggcctcaccggtcagcagagggtgaagcccaagctgtga

SEQ ID NO: 11225 - DNA, 587 bp, Homo sapiens
  SIMILAR (18)..(254): 681254mologous to Homo sapiens HSPC307,accession number AF161425,Smith-Waterman Score=258.
ggcacgaggaggcgcgtggggcttgaggccgagaacggcccttgctgcgcaccaacatggagactgtgtaccgtgtcccgatcttagtgctcgaatgtcccaacctgaagctgaagaagccgccctggttgcacatgccgtcggccatgactgtgtatgctctggtggtggtgtcttacttactcatcaccggagggatttatggagaattgacttcatgcaataattgtggtgccatcgctgtaaagcagggcaagctttgggaaagggaagatgagtgtaaggtggataggacaacaaactgggatccaaagcataacatgagccatgaggacagattgaaccccagagagccttatattcttagtcaagtgaatgcgtgccttgttggaggacgtgagcaggaaaattcactgctcctcaaggcttcactaatcaagaccacctatgtcatttccgcagcccctgaatgcatgattgggatggacacacagacactccctaacataccattgttcgcttggaattccccaggaagccttcttgatctaacttatgctacagaatatcagatatcagatgagtga

SEQ ID NO: 11226 - DNA, 569 bp, Homo sapiens
  SIMILAR (119)..(223): 741254mologous to Homo sapiens dJ1161H23.1 (similar to acetyl -coenzyme A synthetase),accession number AL133324,Smith-Waterman Score=141.
ggcacgagaagcagtgaacctgaggctgtctctgtgggcagggacttgaggaggaaacaggtggggaacaaagccatctctactttgatttttgaaaagtctggctaagggtgctgaagaaatgcttgatgatttgttggttacagttagagaaaagattggccccattgccacaccagactacatccagaatgcacctggcttgcctaaaacccgctcaggtatgttcagaggcctccatggattgggatgggctgaggcctggtggtggtggggtgtgcgtggatgaaagcctttggcagggctagggtgggtcagtgctttcaccaagtaactagaggtctgtggttccccagggaaaatcatgaggcgagtgcttcggaagattgctcagaatgaccatgagcttaataccctgaccaaaagcactgctgacagagcatgatgaagatggaagaaaagcaacaaaataaaacaagatagaatagtgtaacaaggtactcagaagttgcaatttctaagcaaatcttaagtgtcattctaggtccgatcttcatatcttggaagac

SEQ ID NO: 11227 - DNA, 822 bp, Homo sapiens
  SIMILAR (29)..(427): 561254mologous to Homo sapiens dJ1161H23.1 (similar to acetyl -coenzyme A synthetase),accession number AL133324,Smith-Waterman Score=311.
cacgaacgctttgagacaacctactttaagaagtttcctcggatactatgttacaggagatggctgccagcgggaccaggatggctattactggatcactggcaggattgatgacatgctcaatgtatctggacacctgctgagtacagcagaggtggagtcagcacttgtggaacattgaaggctgttgcaagaggcaagctgtggtgggccaccctcatccctgtgaaggggtgaatgcctcctactgctttgtcaccttgtgtgatggccacaccttcagccccaagctcaccgaggagctcaagaaagcagattatgagaaaaagattggccccatttgccacaccagactacatccagaatgcacctggcttgcctaaaacccagctcagggaaaatcatgaggcgagtgcttcggaagatttgctcagaatgaccatgacctcggggacatgtctactgtggctgacccatctggtcatcagtcacctcttcagccaccgctgcctgaccatccagtgaacatgattcttgaccttttaccttaggattcctccttgctccaaacttttggcccatcctcttttgcccccttcaggagtgctgagggccagtgttgacccacactacccttcccttgaccagctgtctgggaccggaaaccagctttgtctccaggtagagacaacatcctgtgactgccaggcagaaaggacagggcccaggtcagcctcagtctgctgtgcctccagactgcagagctctcagaacccagaacagagacgaaaaggctacctctcctacccaagttaagtgttc

SEQ ID NO: 11228 - DNA, 569 bp, Homo sapiens
  SIMILAR (8)..(568): 931254mologous to Homo sapiens (R)-3-hydroxybutyrate dehydrogenase,accession number M93107,Smith-Waterman Score=881.
ggcacgagagcatctgcattcaaaaggcttccttgtgtttgctggctgcttgatgaaggacaaaggccatgatggggtcaaggagctggacagcctaaacagtgaccgattgagaaccgtccagctcaatgtctgcagcagcgaagaggtggagaaagtggtggagattgtccgctcgagcctgaaggaccctgagaaaggcatgtggggcctcgttaacaatgccggcatctcaacgttcggggaggtggagttcaccagcctggagacctacaagcaggtggcagaagtgaacctttggggcacagtgcggatgacgaaatcctttctccccctcatccgaagggccaaaggccgcgtcgtcaatatcagcagcatgctgggccgcatggccaacccggcccgctccccgtactgcatcaccaagttcggggtagaggctttctcggactgcctgcgctatgagatgtaccccctgggcgtgaaggtcagcgtggtggagcccggcaacttcatcgctgccaccagcctttacagccctgagagcattcaggccatcgccaagaaga

SEQ ID NO: 11229 - DNA, 990 bp, Homo sapiens
  SIMILAR (2770)..(3423): 871254mologous to Escherichia coli O157:H7 putative transport system permease protein,accession number AE005655,Smith-Waterman Score=914.
atgattgatcttgacctccagttcctagcacagtgccggaacacgataggggcccaagaaatgtttgccgagcgagtgacgcctttctcctgtttagcagtacctgaatttgtgtggtgctttagactctttaacaggcttcttacaaatccatttccttactccattaatctgagcaggtcaggacaggacaaaggccatgatggggtcaaggagctggacagcctaaacagtgaccgattgagaaccgtccagctcaatgtctgcagcagcgaagaggtggagaaagtggtggagattgtccgctcgagcctgaaggaccctgagaaagtctggccactggctcaggccacagcggacaccctgttcacagcctgcatcaccctcctgagacagaaccttctccaagtgtttgcctttgggcaggtcccaaggtaccacctggagctgctggaaaggtgtccactggagcaagaaggggaggctctcacctctttgctttctgttatgtcttccatcgtccatagggcagtgaccctcatggcttggccacaagaaaagcaggcatcttctctaaactatggaagaaatcatgaggctctttcacctaaggatgtaaataaaaatggattttccactggaaacaggtcaaatgacttaatacagccacagacaattcggagcaagctggtcaggaggcccaaattcagcaaggctcagcaacttgcttcttcaacctcaacaccagagtctgtcattctcctcactgcttcccactccctcactgaaaagcctgcatccaaagcccattactggctccagggtgtggaccttgcagggaagaactgtgtaaggacaagacaaagagcagggctgagtgccgagtgcccgcatcccgagaccctaggcgacctggctgctgtctacctctcccacaatgagcttctcttccttcaggctcaacaccacatggaagctgccaagtcttag

SEQ ID NO: 11230 - DNA, 255 bp, Homo sapiens
  SIMILAR (75)..(4): 951254mologous to Oryza sativa similar to RING-H2 finger protein RHA1a (AF078683),accession number AP000616,Smith-Waterman Score=137.
atggagcataaaaaagaagaagaagaagaagaagaagaagaagaagaagaagaagaagaagaagaagaagaagaagaagaagaagaaactaagtttcagaaaattttaataaagtgggtctttgattcacttggctgcgacactcatttcatctatttatgcaattgcacgttcatatgtacgaaagccagctcagatttttcttcctccaaagtcctccttcaaggacttctcagagccttaagtaaaggctaa

SEQ ID NO: 11231 - DNA, 174 bp, Homo sapiens; identical to SEQ ID NO: 3961
  SIMILAR (28)..(156): 741254mologous to Homo sapiens Human secreted protein HCHPF68, SEQ ID NO:163,accession number Y86248,Smith-Waterman Score =148.

SEQ ID NO: 11232 - DNA, 379 bp, Homo sapiens
  SIMILAR (1)..(366): 1001254mologous to Escherichia coli ATP-dependent RNA helicase,accession number L02123,Smith-Waterman Score=612.
ggcgtatttcagtagatattagatacatcacccatgagatggacacaaaaaaatttttcaatgattttggcgcagcccgagcaacagtgcaagactctgtctcaaaacaaaaacaaagacagaagaataaagaagaaggaggagaagaagaagaagaagaagaagaagaagaagaagaagaagaagaagaagaagaagaagaagaagaagaagaagaagtaggagaaggagaaggagaaggagaaggagaagaagaaggagaaggaggaggagaagaagaagaagaagaagaagaagaagaagaagaagaagaagaagaagaagaagaagaagaagaagaagaagaagaagaagaagaagaagaaagaagaagaagaag

SEQ ID NO: 11233 - DNA, 252 bp, Homo sapiens; identical to SEQ ID NO: 3917
  SIMILAR (100)..(219): 851254mologous to Homo sapiens Human secreted protein HCHPF68, SEQ ID NO:163,accession number Y86248,Smith-Waterman Score =171.

SEQ ID NO: 11234 - DNA, 353 bp, Homo sapiens; identical to SEQ ID NO: 3958
  SIMILAR (193)..(351): 861254mologous to Arabidopsis thaliana putative protein,accession number AL162506,Smith-Waterman Score=230.

SEQ ID NO: 11235 - DNA, 847 bp, Homo sapiens
  SIMILAR (1)..(1104): 981254mologous to Escherichia coli o588,accession number L10328,Smith-Waterman Score=1906.
gaagtaaaagatctgtatgataaaactttcaagtctctgaagaaagaaattaaagaagatctcagaagatggaaagatctcccatgctcatggattggcaggatcaacattgtaaaaatggctatcttgccaaaagcaatctacagattcaatgcaatccccatcaaaattccaactcaattcttcaacgaattagaaggagcaatttgcaaattcatctggaataacaaaaaacctaggatagcaaaaactcttctcaaggataaaagaacctctggtggaatcaccatgcctgacctaaagctttactacagggcaattgtgataaaaactgcatggtactggtatagagacagacaagtagaccaatggaatagaattgaagacccagaaatgaacccacacacctatggtcacttgatcttcgacaagggagctaaaaccatccagtggaagaaagacagcattttcaacaattggtgctggcacaactggttgttatcatgtagaagaatgcgaatcgatccatacttatctccttgtactaaggtcaaatctaagtggatcaaggaacttcacataaaaccagagacactgaaacttatagaggagaaagtggggaaaagccttgaagatatgggtacaggggaaagattcctgaacaggacagcaatggcttgctctaagaagaaagagaagaaggaggaggaggaggacgaggaggagaaggagaaggagaaggagaaggaggagaaggagaaggaagaagaagaagaagaagaagaagaagaagaagaagaagaagaagaagaagaagaagaagaagaagaagaagaagaagaagaag

SEQ ID NO: 11236 - DNA, 224 bp, Homo sapiens
  SIMILAR (96)..(188): 801254mologous to Ovis aries CENP-B protein,accession number U35655,Smith-Waterman Score=123.
tgcaggagaaaaagagaaggaaagagaagaagaagagaggaagaagaagaagaagaagaagaagaggaggaagaggaggaggaggaggaggaggaggagaagaagaagaagaagaagaagaagaagaagaagaagaagaagaagaagaagaagaagaagaagaagaagaagaagaagaaaggaaggaaaactgaccttgctgtggatccggtcgtgggaagcag

SEQ ID NO: 11237 - DNA, 417 bp, Homo sapiens
  SIMILAR (247)..(369): 1001254mologous to Arabidopsis thaliana putative protein,accession number AL162506,Smith-Waterman Score=206.
atatggcagggctgtaactgccaagaaagtgactccttaagacttccaaaacttgtacataaagggttatacaacttctttctggtcctcttggaacactggctcctggaacgtagtccctatgccataaggaagctgaaggaggccatggaaaggcccatgtggaaggaaagagagccccctccaatctgcaaccctcggccccagctgagctttcaggaaacaatagcattagctttcaatcatgaggaggaggaggaggaggaggaggaagaggaggaggaggaggaggaggaggaggaagaagaagaagaagaagaagaagaagaagaagaagaagaagaagaagaagaagaagaagaagaagatttattatataatttcatttatataatattctcaaaaatgccaactaag

SEQ ID NO: 11238 - DNA, 1317 bp, Homo sapiens; identical to SEQ ID NO: 6319
  SIMILAR (439)..(729): 791254mologous to synthetic construct Pax3-forkhead fusion protein,accession number AF178854,Smith-Waterman Score=407.

SEQ ID NO: 11239 - DNA, 159 bp, Homo sapiens; identical to SEQ ID NO: 2961
  SIMILAR (54)..(113): 601254mologous to Oryza sativa similar to RING-H2 finger protein RHA1a (AF078683),accession number AP000616,Smith-Waterman Score=62.

SEQ ID NO: 11240 - DNA, 939 bp, Homo sapiens
  SIMILAR (39)..(263): 401254mologous to Homo sapiens bA42M11.1 (alpha thalassemia/mental retardation syndrome X-linked (RAD54 (S. cerevisiae) homolog)),accession number AL121874,Smith-Waterman Score=138.
atgacacctgtcttcgggggcctgggggctgtgggccggaataagtcaagacgacggaacggacgaacgaccgacgaacggacgaacgaaggagaagagcatacgacggaacggacgagcgaacgacggaacgaacgacggaacgacggatacgaacgacggaagaccggaagaagaagaggaagaggaagaggaagaaagaagaagaagaagaagaagaagaagaagaagaagaagaagaagaagaagaagaagaagaagagtaacatatttttggaattccaagaggagttggagcaagtctataaggtctactgtgccagctacgaccaggccttgctactggtggacacgtaccggaaggagccggagctgcagcggcacatccagggcatcgttgaggcggtggtcgattggtgttttatccgctactggcgcctaacgcctaactggcagcgcttcagaagggttgggcgtacggagcgggccacaacgcataatcgcctgcaggcgtttgggggttgcacccacgagcgcacaccagaaccgtcccagccgcaaacccggtatccagaccgccaaacacccaacgggttgcgaggcgcaaacactatgcactcgcagatggatacactgaacggagatggacgaacgcaccttgcagggcagagagctcgttccccccgaactgcccgtccggagcgccaataccggattcatacgacaagtgtgatcagctcgaggatcaccaggtacccactgctgctgcagaaaatcctggagaacacagtccctgatgccagtgcctatcctgtccttcagagggctgtctctgccctccaggacgtgaacaccaatatcaatgagtacaagatgcgcaaggaagtgggtgctatgcctgaaatttctgcagttttggtagatgccatcaagggttaa

SEQ ID NO: 11241 - DNA, 1239 bp, Homo sapiens; identical to SEQ ID NO: 7299
  SIMILAR (1398)..(226): 961254mologous to Escherichia coli formylglycineamide ribonucleotide synthetase (EC 6.3.5.3),accession number M19501,Smith-Waterman Score=1966.

SEQ ID NO: 11242 - DNA, 391 bp, Homo sapiens
  SIMILAR (1)..(186): 981254mologous to Homo sapiens phosphoinositol 3-phosphate- binding protein-2,accession number AF302150,Smith-Waterman Score= 310.
gaaaatacaaagaacagtgttgacgaacaggaagaaactgttattccttacgaatcaactcctgaggtttctagaggaaatcaaacaatggcagtgaaaagtctgtccccatctcctgagtcctcggcatcgccagtcccatccactcagccgcagctcacagaaggctcacatttcatgtgtgtgtagtcttagaagaactatactgacttctgttgaaaccattcaaagctaaagacatggaccttcagcagtgtaagacgatattgtacagtatatttcaaatctatgaaattcatagctctgatgcttttggtcacagaggattcatttttatcacttctgggaaaattgtttatttccaaaaacagcttttaattggcccatatgg

SEQ ID NO: 11243 - DNA, 582 bp, Homo sapiens
  SIMILAR (1078)..(1422): 1001254mologous to Plasmid F Protein D,accession number M12987,Smith-Waterman Score=584.
atggcacagaagaaggaggaggaggaggagaagaaagaagaagaagaagaagaagaagaagaagaagaagaagaagaagaagaagaagaagaagaagaaaagaagaaaaaaaaagaagagaaaagagaaagaagtaaaaaatataaacaacaacaacaacaaaacaccaaaagaaacaagaacctaaccagccctcaagatgaaacacagaccgcaaatcataaaccagaagagcatcctgaagaaaatacaaagaacagtgttgacgaacaggaagaaactgttatttcttacgaatcaactcctgaggtttctagaggaaatcaaacaatggcagaagtaacacagctatcacaagaagcacagagaatagttgagaaacttgaaaagtccacaaagcctattgtggctgccatcaatggatcctgcctgggaggaggacttgaggcacttggagtacagcaggacattcagggtgaacaaaaacgacaaagatccctgtcttggtggagcttacattccaggtcagcaggggatatgatatctgggaagaatcagttcctactcagtgaagataaatga

SEQ ID NO: 11244 - DNA, 673 bp, Homo sapiens
  SIMILAR (32)..(664): 811254mologous to Homo sapiens enoyl-CoA hydratase/3- hydroxyacyl-CoA dehydrogenase alpha-subunit of trifunctional protein,accession number D16480,Smith-Waterman Score=843.
  misc_feature (1)...(673): n = a,t,c or g
tcgcaattcccgggtcgacgatttcgtcaagatggtggcctgccgggcgattggcatcctcagccgcctttctgccttcaggatcctccgctcccgaggttatatatgccgcaattttacagggtcttctgctttgctgaccagaacccatattaactatggagtcaaaggggatgtggcagttgttcgaattaactctcccaattcaaaggtaaatacactgagtaaagagctacattcagagttctcagaagttatgaatgaaatctgggctagtgatcaaatcagaagtgccgtccttatctcatcaaagccaggctgctttattgcaggtgctgatatcaacatgttagccgcttgcaaagacccttcaagaagtaacacagctatcacaagaaagcacagagaatagttgagaaacttgaaaaagtccacaaagccctattgtgggctgccatccaatggatcctgcctgggaggaggacttgaggttgccatttcatgccaatacagaatagcaacaaaagacagaaaaacagtattaggtacccctgaagttttgctgggggccttaccaggngcaggnggcacacanaggctgccccnantnggnggtgtgcctgctncttttgacangntnctnnctggtaggagnatttgtgcaggncagggc

SEQ ID NO: 11245 - DNA, 358 bp, Homo sapiens
  SIMILAR (1)..(357): 801254mologous to Homo sapiens Sp140 protein,accession number U63420,Smith-Waterman Score=554.
aaatggttcacccccatggaatttgaaatcaaaggaggctacgcatgatcaaagaactggaggctgagtgtgcgctgtggcgggtggcccctacgacggctgatggaggaaggatctctacctaatccttcaagaatatattacaggaacaaactgagaatactgaagtctcaaaacaatagctcagttgacccttgtatgagaaacttggatgagtgtgaggtgtgccgtgacggatgggagctgttctgttgcgacacttgttcaagagtcttccatgacgactgccacatcccacctgtggaaagtgagaagatgaaggagtctgcgggaagccaacagtgttgtcaggaatctc

SEQ ID NO: 11246 - DNA, 924 bp, Homo sapiens
  SIMILAR (1)..(588): 981254mologous to Cloning vector pZC320 SopB,accession number U26464,Smith-Waterman Score=962.
atgggggctgcgctcaggaacagaggaaacagccagtggctgtggaggatgagaaacttggatgagtgtgaggtgtgccgggacggaggggagctgttctgttgcgacacttgttcaagagtcttccatgaggactgccacatcccacctgtggaaagtgagaaggaccttccacctgccatgcgcactctccagcagaatgtctgcttgtgtctagatggggaaggagcaggttcatcgggtactgggacccagcagtgtgatccagagagcagtgggagacgctggcagcaggagaaatgtgagttcctcctcttgaaagtctattgctgttctgagagctccttttttgccaagattccatactattattatattagagaggcgtgtcaaggcctgaaggagcccatgtggttggataaaatcaagaaaaggctgaatgagcacggttacccccaagtggaggggtttgtacaagacatgcgcctcatcttccagaaccacagggcctcttacaaggtcttttcatccccagctgctgagtggtggctgctgatgccagcagtccccagagtattacccttcgttaaatggaatcagcttcacctggaagtgacgccccgtggcctgaggccggcccctttgcctcaaagcaggaccaagggtgtggactacaagtacaaaaataaaagtagagaaaaggaggatgaggtgcataacatggggagagcgtggctctgttatgtgtcaaatgtgattattggagcagtgtctagtgaactagaaaatcacccaatgaatgaagaaggagaatcagaagagcttgcttctagcctgctatatgataatgtaccagatactgtggatattgcaaacaactccactttgggaaaacccaagaggaaaagaagtaagaataaataa

SEQ ID NO: 11247 - DNA, 3252 bp, Homo sapiens
  SIMILAR (117)..(2762): 1001254mologous to Homo sapiens LYSP100-B,accession number U36500,Smith-Waterman Score=4721.
tcttttccttttcctctttgactgagcaccgaggggcagttggcagcttcacctcagagctgcaggaaggaacggggcagtgaaaatcgaatcgggtgtgatcctaggccaagctcatggcccagcagggccagcaggggcagatggcaagtggagacagcaatctcaacttcaggatggtcgcagagatccagaacgtagagggtcagaacctgcaggagcaggtttgccctgagcccattttcaggttcttcagagaaaacaaggtggagattgcaagtgcaataacaaggccatttcctttccttatgggcctccgagaccgctccttcatctccgagcagatgtatgaacattttcaagaagcttttagaaacctggtcccagtgacaagagtgatgtattgtgtactcagtgaactggagaagacatttggctggtcacatctggaagcattgttcagcaggattaacctgatggcctatcctgatttaaacgagatttacagaagcttccagaatgtatgctatgaacactcacctctccaaatgaataatgtaaacgatttagaagatagacccagattactaccatatggtaaacaagagaacagcaatgcctgtcatgaaatggatgatatagcagtgcctcaggaagccttgagctcctcggcaaggtgtgagccaggtttctcttcagagtcttgtgagcagttagctctcccaaaggctggtggaggagatgctgaagatgcacccagcctactaccaggtgggggagtgtcctgtaaacttgctatacaaatagatgaaggagaatcagaagaaatgcccaagttactgccttatgatacagaagttctagaaagcaacgggatgatagatgcggcaaggacatacagcacagcaccaggggagaaacagggagaggaggaaggcaggaacagtcccagaaaaagaaaccaagacaaggagaagtaccaagagagtccagagggaagagacaaagagacctttgatctaaaaactccccaagtcactaatgaaggagaaccagagaaggggctctgtctactaccaggtgaaggagaagagggcagtgatgactgttcagaaatgtgtgatggagaagagccccaggaagcctctagctccctagcaagatgtgggtcagtttcttgtttctctacagagacctttgatctaaagactccccaagtcactaatgaaggagaaccagagaaggagctcagtctactaccaggtgaaggagaagagggcagtgatgactgttcggaaatgtgtgatggagaagagcgccaggaagcctctagctccctagcaagacgtgggtcagtgtctagtgaactagaaaatcacccaatgaatgaagaaggagaatcagaagagcttgcttctagcctgctatatgataatgtaccaggagcggagcaatcagcatatgaaaatgagaagtgttcctgtgtcatgtgtttctcagaagaggtgccaggaagcccagaagcaaggacggaaagtgatcaagcgtgtggcacaatggatactgtggatattgcaaacaactccactttgggaaaacccaagaggaaaagaagaaaaaagagggggcatggctggagcagaatgagaatgagaaggcagaaaaacagccaacaaaatgataatagcaaagccgacggccaggtggtctccagtgaaaagaaggcgaacgtgaatctgaaagacctttccaagattagggggagaaagagaggcaaacctggaacccgcttcactcagagtgacagagctgcacagaaaagagtccgatcaagagcttcaagaaagcacaaagatgaaactgtggattttaaggctcctttgcttccagtgacctgtggtggggtgaagggaattttacataagaagaaattgcagcaaggaatcttggtgaagtgtatacagactgaggatggaaaatggttcacccccacggaatttgaaatcaaaggaggccatgcaagatcaaagaactggaggctgagtgtgcgctgtggcgggtggcccctacgatggctgatggagaatggatttctgcctgatcctccaagaatacgttacaggaaaaaaaagagaatactgaagtctcaaaacaatagctcagttgacccttgtatgagaaacctggatgagtgtgaggtgtgccgggacggaggggagctgttctgttgcgacacttgttcaagagtcttccatgaggactgtcacatcccgcctgtggaagctgagaggaccccgtggaattgcatcttctgcaggatgaaggagtctccgggaagccaacagtgttgtcaggaatctgaggtcctggagaggcagatgtgtcctgaggaacagttgaaatgtgagttcctcctcttgaaagtctattgctgttctgagagctccttttttgccaagattccatactattattatattagagaggcgtgtcaaggcctgaaggagcccatgtggttggataaaatcaagaaaaggctgaatgagcacggttacccccaagtggaggggtttgtacaagacatgcgcctcatcttccagaaccacagggcctcttacaagtacaagggttttggccaaatgggatttagactggaggctgagtttgagaagaatttcaaggaagtgtttgctattcagggaaacaaatgggaacaattgactggattagtggatgctgaaagcattcagcaaatggcaccctaaaatatgccgctggtttgccactgacttcaaaatgaggtcacttgggcacagcacatgcagggaggggcttttctctgagcctccttcatctgcccaaagacaaatcctcaaaaggaaattcaatcatcatgaatcacaaccccaagtatctcatcagccagggaagagtaagtgggatcacagggaaggatgttggcagcgacaccatcccatacaggctcttacctcttctcctgagggctgctccagacaacatttattacccagaagaccttttgtctgaaaaccagccaagctttattcaggacacacttcttgccttcactttcccacttccgtggccacctccatgcagaagccctaagcccacattctttcgatagctcacggtggtgcatgagtgtccatcatctgactcttctcggagtctcatattttgtgggactcctgtgcaaacatatgttattaaaatttttttcctcctgtt

SEQ ID NO: 11248 - DNA, 2911 bp, Homo sapiens
  SIMILAR (1027)..(1896): 1001254mologous to Cloning vector pZC320 SopA,accession number U26464,Smith-Waterman Score=1519.
gtgctctttgactgagcaccgaggggcagttggcagcttcacctcagagctgcaggaaggaacggggcagtgaaaatcgaatcgggtgtgatcctaggccaagctcatggcccagcagggccagcaggggcaaatggcaagtggagacagcaatctcaacttcaggatggtcgcagagatccagaacgtagagggtcagaacctgcaggagcaggtttgccctgagcccattttcaggttcttcagagaaaacaaggtggagattgcaagtgcaataacaaggccatttcctttccttatgggcctccgagaccgctccttcatctccgagcagatgtatgaacattttcaagaagcttttagaaacctggtcccagtgacaagagtgatgtattgtgtactcagtgaactggagaagacatttggctggtcacatctggaagcattgttcagcaggattaacctgatggcctatcctgatttaaacgagatttacagaagcttccagaatgtatgctatgaacactcacctctccaaatgaataatgtaaacgatttagaagatagacccagattactaccatatggtaaacaagagaacagcaatgcctgtcatgaaatggatgatatagcagtgcctcaggaagccttgagctcctcggcaaggtgtgagccaggtttctcttcagagtcttgtgagcagttagctctcccaaaggctggtggaggagatgctgaagatgcacccagcctactaccagtgtcctgtaaacttgctatacaaatagatgaaggagaatcagaagaaatgcccaagttactgccttatgatacagaagagacctttgatctaaaaactccccaagtcactaatgaaggagaaccagagaaggggctctgtctactaccaggtgaaggagaagagggcagtgatgactgttcggaaatgtgtgatggagaagagcgccaggaagcctctagctccctagcaagacgtgggtcagtgtctagtgaactagaaaatcacccaatgaatgaagaaggagaatcagaagagcttgcttctagcctgctatatgataatgtaccaggagcggagcaatcagcatatgaaaatgagaagtgttcctgtgtcatgtgtttctcagaagaggtgccaggaagcccagaagcaaggacggaaagtgatcaagcgtgtggcacaatggatactgtggatattgcaaacaactccactttgggaaaacccaagaggaaaagaagaaaaaagagggggcatggctggagcagaatgagaatgagaaggcagaaaaacagccaacaaaatgataatagcaaagccgacggccaggtggtctccagtgaaaagaaggcgaacgtgaatctgaaagacctttccaagattagggggagaaagagaggcaaacctggaacccgcttcactcagagtgacagagctgcacagaaaagagtccgatcaagagcttcaagaaagcacaaagatgaaactgtggattttaaggctcctttgcttccagtgacctgtggtggggtgaagggaattttacataagaagaaattgcagcaaggaatcttggtgaagtgtatacagactgaggatggaaaatggttcacccccacggaatttgaaatcaaaggaggccatgcaagatcaaagaactggaggctgagtgtgcgctgtggcgggtggcccctacgatggctgatggagaatggatttctgcctgatcctccaagaatacgttacaggaaaaaaaagagaatactgaagtctcaaaacaatagctcagttgacccttgtatgagaaacctggatgagtgtgaggtgtgccgggacggaggggagctgttctgttgcgacacttgttcaagagtcttccatgaggactgtcacatcccgcctgtggaagctgagaggaccccgtggaattgcatcttctgcaggatgaaggagtctccgggaagccaacagtgttgtcaggaatctgaggtcctggagaggcagatgtgtcctgaggaacagttgaaatgtgagttcctcctcttgaaagtctattgctgttctgagagctccttttttgccaagattccatactattattatattagagaggcgtgtcaaggcctgaaggagcccatgtggttggataaaatcaagaaaaggcttatatgatcacggttacccccaagtgggaggggtttgtacaagacatgcgcctcatcttccagaaccacagggcctcttacaagtacaaggattttgggccaaatggggatttagactggaggctgagttttgagaagaatttcaaggaagtgtttgctattcaggaaacaaatgggaacaattgactggattagtggatgctgaaagcattcagcaaatggcaccctaaaatatgccgctggtttgccactgacttcaaaatgaggtcacttgggaaatagcacatgcagggagaggcttttctctgagcctccctcatctgcccaaaaacaaatcctcaaaaggaaattcaatcatcatgaatcacaaccccaagtatctcatcagccagggaagagtaagtgggatcacagggaaggatgttggcagcgacaccatcccatacaggctcttacctcttctcctgagggctgctccagacaacatttattacccagaagaccttttgtctgaaaaccagccaagctttattcaggacacacttcttgccttcactttcccacttccgtggccacctccatgcagaagccctaagcccacattctttcaatagctcacggtggtgcatgagtgtccatcatctgactcttctcggagtctcatattttgtgggactcctgtgcaaacatatgttattaaaatttttttcctcctgtaaaggaa

SEQ ID NO: 11249 - DNA, 1210 bp, Homo sapiens
  SIMILAR (586)..(1056): 791254mologous to Homo sapiens LYSP100-B,accession number U36500,Smith-Waterman Score=615.
atgaaagcattcctgggttggtggctggcagcccgtgccaggcccaggccagcatctggtgcaggggtgatgttggctcaagttcctcctgtggccccaaggctcagggatggcttggggcaccccctctcctggcttgtgaccctgcctgggggaaacctccaggaccggattgcctccccagtctcagctgctgaaagcaccaggcacagcagtcactctaactcggggcagatcctagggacacggcctctggcggccctttgttcagcctcctgtgaggggcgggaacctggcgctgtgggcaggacccacggccagcgcctgcacctcactgcagccagcttcatggcagcagccacttcagactgcctgccgctgccgtcagtagtgggattgctggatgaaatgggatgggcttcccgagagccaaactgctgtgattgttattgctcttctgggtctagccacccagaagagctactgggttctgggctggtactggggagtatctgcaaagggtcctgtgatgtgatctgtcttcagttctcccagtcatgggtaccagcacgtgctccagtggagatgagaaacctggatgagtgtgaggtgtgccgggacggaggggagctgttctgttgcgacacttgttcaagagtcttccatgaggactgtcacatcccgcctgtggaagctgagagggatcttccacctgccatgcgcactctccagcagagtgccggcttgtgtctagatggggaaagagcaggttcatcgggtactgggacccagcagtgtgatccagagagcagtgggagacgctggcagcaggagaaatgtgagttcctcctcttgaaagtctattgctgttctgagagctccttttttgccaagattccatactattattatattagagaggcgtgtcaaggcctgaaggagcccatgtggttggataaaatcaagaaaaggctgaatgagcacggttacccccaagtggaggggtttgtacaagacatgcgcctcatcttccagaaccacagggcctcttacaaggtcttttcatccccaactgctgagtggtggctgctaattaatgccagtagtccccagaatattacccggggtcaagtggaaccagcttcacctggaagtgacaccccgtggcctgaggccggcccctttgcctcaaagcaggaccaagggtgtg

SEQ ID NO: 11250 - DNA, 774 bp, Homo sapiens
  SIMILAR (311)..(409): 451254mologous to Homo sapiens Extended human secreted protein sequence, SEQ ID NO. 468,accession number Y36083,Smith- Waterman Score=69.
atgagatacaagaaggaacagcctcttttcctacctaaatatgacttgggggctgatgctgccatcttgcaaccacaagaggaagactgtggatcaactcaagtcagaggaggacaccaccgcaccaaaacggaggaaacagggctcttggtaacgtcattgaaccagggaattaaacctcacgactctgtcaccaaacttctatctccccagaggtcatcagtgctgttcttactactgatcacctcaggagtccacactgactcttctaaggcagtgctggaaagccggaggtctctggggtatgaggcctcctttcttgagtactttcagtccttctacaaattgtttcctgtggataggctctatgcttggcactgcagtgaccacaggaacaccacagtcactgccatcaacacagacagaccaggattgctgaccctgtcactgacagttacaattgggcaagggagtaaaaaagcacccagtgggttctcacatatttctcctgctcccacggtgaaacagcagcccattctctgcgatgatcgggatttctctcctagttcgttcccttctactaacacaccatcccaattcgcaactaatgaagtgttaacaacaggaccaccacctggtgcaggggctgtcagtactccactatcaccagaaaaacaggccctaattgccaggcaggtggctgccctggaggagcaagaccagcgaaatggcttcgcagctgaagctgatgctggagctgatactggctgctag

SEQ ID NO: 11251 - DNA, 626 bp, Homo sapiens
  SIMILAR (362)..(454): 671254mologous to Mus musculus F-box protein FBX13,accession number AF176529,Smith-Waterman Score=102.
atggaggctcagaaagaccagtcagtggccccagatactctggcaagacttcatgccgggtctttggagtctgtatccagtgcgctggcacaacccagggggcagtctgtggccacggggactgcttcccttgaaaaggggttgcgtgctgcaggtcgcactctagagggaccccaattcgcaactatgaaagtgttaacaacaggaccaccacctggtgcaggggctgtcagtatccacctatcaccagaaaaacaggccctaattgccaggcaggtggaggaacaaggcgagggctcttcgtgtccagtgagccagctgcagcacatcagtgagcgtgggcagcggcgtggtgtggtggtctctgtgcgtgatggtgactcttctttgtttgcaggtcaacgaagtgacggtggaacagctggtgcagcagtacccccacattactttcagcactgtcctgcaggactgcaagaggaccttgtagagagcctatcatatgggctggacccccaacatgtctggcgcctcctcctagtgctcctgcctcgcctagtccactgggatcattcagcagagcagaggagaattgtacatttggggagctgatctctcggaaggtttaa

SEQ ID NO: 11252 - DNA, 246 bp, Homo sapiens; identical to SEQ ID NO: 3956
  SIMILAR (3)..(116): 941254mologous to Homo sapiens dJ1022E24.3 (KIAA0835, similar to myelin transcription factor 1 (MYT1)),accession number AL121581,Smith-Waterman Score=183.

SEQ ID NO: 11253 - DNA, 289 bp, Homo sapiens
  SIMILAR (1)..(189): 761254mologous to Homo sapiens bA145L22.2 (novel KRAB box containing C2H2 type zinc finger protein),accession number AL050328,Smith-Waterman Score=240.
aagccagtcacctttgaggatgtggcagtgaatttcacccaggaagagtgggactgtctagatgccagccagagggtcctttaccaggatgttatgtcggaaacctttaagaatctaacatctgtggcctgggtccgaaaaaaagaagaagaagaagaagaagaagaagaagaagaagaagaagaagaagaagaagaagaggaagaggaagaagaagaggaagaggaagaggaagaggaagaggaagagggagaggaagaagaagaagaagaagaagaaggagagaaca

SEQ ID NO: 11254 - DNA, 402 bp, Homo sapiens
  SIMILAR (130)..(351): 771254mologous to Homo sapiens Human follicle stimulating hormone GPR N-terminal sequence,accession number W03627,Smith- Waterman Score=285.
atgggccaaagtaaagggatgggttgggctagttatctgcaggaggatcatgtccttaaggcacagatcgttcatgctattgtttgtggtttaagaatgcctttaagcggttttccaccctgggtgggccaggtgttccttgccctcattcagcctaggcgacagagcaagactccatcaaaaaagaaagaagaagaagaagaagaagaagaagaagaagaagaagaagaagaagaggaagaggaagaggaagaggaagaggaagaggaagaggaagaggaagaagaagaggaagaggaagaggaagaagaagaagaagaagaagaggaagaggaagaagaagaagaagaaggatctaaaatcaataatttaagcttctaccattggaaattagtaaaataa

SEQ ID NO: 11255 - DNA, 259 bp, Homo sapiens; identical to SEQ ID NO: 4378
  SIMILAR (259)..(1617): 921254mologous to Homo sapiens Mi-2 protein,accession number X86691,Smith-Waterman Score=2180.

SEQ ID NO: 11256 - DNA, 372 bp, Homo sapiens
  SIMILAR (2)..(640): 1001254mologous to Escherichia coli K12 adenylylating enzyme for glutamine synthetase,accession number AE000387,Smith-Waterman Score=1108.
atgccagctacctgggaggctgaagcaagagaatcccataaacgggagttcgagactcacctaggcaacatagcgaaaccccatctgaaaaagaagaagaaagaagaagaagaagaagaagaagaagaagaagaagaagaagaagaagaagaagaagaagaagaagaggaagaagaagaggaagaagaagaggaagaagaagaagaaggagaagaagaagaagaagaagaagaagaagaagaagaagaagaagaagaagaagaagaaggggaggaggaggaggaagaggaagaggaagaagaagaagaagaagatgaggaggaggaggaggaggaagaggaagaggaagaagaagaagaagaactgctctag

SEQ ID NO: 11257 - DNA, 441 bp, Homo sapiens
  SIMILAR (1)..(750): 961254mologous to Escherichia coli K12 putative oxidoreductase,accession number AE000389,Smith-Waterman Score=1215.
atggggttctctttcattttgaatgatgatgagatgacttacgataacaagtctgacttcaaagtgagcgagacactgtcgaagaagaagaaggagaagagggagaagaagaagaagaagaagaagaagaagaagaagaagaagaagaagaagaagaagaagaagaagaagaagaaggaggaggaggaggaggaggaggaggaggaggaggaggaggaggaggaggaggaggagaagaagaagaagaagaagaagaggaagaggaagaggaagaagaagaagaggaagaggaagaggaagaggaagaagaagaagaagaagaagaagaagaagaaggagaagaagaagaaggggaaggggaaggggaggaagaggaaaaagaagaagaaggaaattctgccattttcgacaacatggatggagctggaaacattatactaa

SEQ ID NO: 11258 - DNA, 267 bp, Homo sapiens
  SIMILAR (4)..(120): 941254mologous to Arabidopsis thaliana putative protein,accession number AL162506,Smith-Waterman Score=188.
cttgaagaagaagaagaagaagaagaagaagaagaagaagaagaggaagaggaagaagaggaggaggaggaagaggaagagaaggaagaggaagaggaagaagaagatgaagaagaagaagggcaacttctacaacactgcgccccaaaaagcatgattaatcagcgtatctcaatatctcctgctacaagcttccaaaaagcagaagtattatcatttcacttgactaatgaggaagcagtaaatggaggaggagataggtgtggg

SEQ ID NO: 11259 - DNA, 234 bp, Homo sapiens
  SIMILAR (7)..(210): 831254mologous to Homo sapiens Human thyrotropin GPR N- terminal sequence,accession number W03626,Smith-Waterman Score=298.
atgctgaagaagaagaagaaggagaaggagaaggaagaagaagaagaagaagaagaagaagaggaagaagaagaagaagaagaagaagaagaagaagaagaagaagaagaagaagaagaagaggaagaggaagaggaagaggaagaggagaaggaagaagaagaagaagaagaagaagaggaagaggaagaggaagaggaagaccatttgcacctagctgttttctcctattaa

SEQ ID NO: 11260 - DNA, 2502 bp, Homo sapiens
  SIMILAR (877)..(1593): 891254mologous to Escherichia coli adenylyl- transferase,accession number Z21844,Smith-Waterman Score=1102.
atggtgagaccctttctctacaaaaaaataaaagaagaagaagaagaagaagaagaagaagaagaagaagaagaagaagaaggagaagaagaagaagaagaagaagaagaggaagaggaagaggaagaggaagaggaagacaaagacgacgaagaagaaagaagaagaaagaagaagaagaagaagaagaagaagaagaagaagaagaggaagaagaagaagaagaagaggaagaagaagaagaagaagaagaaaaaaaacattctttataggatccagatctgggagagaaagaaaacaaaggacaaaggaaaagaaaacttgcccgtgggacttcccagccatccctttcacctggaggctccgatcccctgggcgcttgataattctctgaggtcatggagatcagatacatggacactcatccaccaacaaaggctttcagacacaaaccaagctgcctcccagagtacagaggtagcaactctgctcatcactacagaggcactgatgtcactcggtgtccctctggaggagcaaatggacccacaaccccactgctttgctccccaccagctcctcccacacgctggtcctaacgctttgctgagcacacagtggactctccacgaacacttgctgcttgatcccttcagccttgcaaatgccgccatccgcctggacagcccaaagaggttatgtgccccttttcccctcctggtcctggaagactgcactgttaacaccatctccacagggttaacgagaattacatgccagactttagataaagcatcaaaagactctcttcaagcatctcacaatgaaactctgagcatttgcagcttacctcttacatggccccattctgagaaagctgaaagaaaccctcagtgtggcaagaagcactgtttaaaaacccctgcccactccactgcctcttggggtacaaagcccttgcagagaatcaacaatagcaagaccctggaagaaggaggaggaggagaagggcggggggaggagggggaggaggaaggggaaagggaagcggaaggggaaggggaaggggaaggggaaggagaaggagaaggaaaaggggaaggagaagtaggagaaggagaaggaggggaaaactatcctaccgttttctgcagtggctacaccattcccaacagtaacgatatcaacttgtcttcatgctccacaagaggcactcaatcactaaaggctatgactaatgatagcacagtggcccagactgaagaaatggggcaaaagaaaaactgtggcaaagaggatgtagctaaaaggacaaattcaaggtggacatgcatcccagagtgtggagatcatcttggcaacactaagggacaagcacgaagcattccattgttcctgggaatgtatgtccctgggaccaattactgccaacgcatgtgtgtggaagtgatggtgtcacttctgggtcaaagtgtggctcccccatctctctgctgctggctggatgacgctctccaaagttctaagggatggcagagccataagagagggggagcctgggatcctgaatcccccccaagaaagaaagatacccatggaccagcttcttggctgctgggtgagaatgggttgcagacctgcaggggcacatctgaagcagagatgcagggggaaggccacaaagggcagtcaggcctggagagggaggaactcttcagaaggcggatgattggaagtgagaagcgggcagcagagaggtggcagcaaggatcatacaggggattctggcttggccattggggaggtggaggtgttgtttaccaagatgcagagccccagagcaggaagggttttgtgaaggaagatgctcagttagggacgcagtgggccagaggacaggcacttcaaaccttagaaccaaataacggtttgggagcaatgcgagaagaggaagcaaggaagaggggattggagaagaagaaagagggggaggaagacagaggagaagaagaggaagggaagagaaagaaaaggagaaagaagagaaggaggaggagaaggaagcaaaattggaagctatcagcattaaaaatgatgatccataaagaagctctatcaaaaatcaacacagaaaacatcactctgcagccagcggtaattcctgaaccggagaacctcacacaggagaaatccaaaaaatacaggctagccagagttccaagtgtgaaggggggaactaaagcagtcctattttcacatcatcaactgctcagctggattgtagcagttaaacatgagaagtttcaggtgaagcccacagcagctgtcctacaaagtcatagctctgtttcacatgagcagaggcatttgttcctggagtccaagttggaggccatcttggtctggactccctcaaaagcaaagcctgtgatatggactggggtacagatcgtttatttgggaggtgatcctcggtacagggatgaggcagtaggaaagtga

SEQ ID NO: 11261 - DNA, 657 bp, Homo sapiens; identical to SEQ ID NO: 5049
  SIMILAR (115)..(582): 951254mologous to Homo sapiens dJ1153D9.1 (A novel protein (protein X 0001)),accession number AL109806,Smith-Waterman Score= 754.

SEQ ID NO: 11262 - DNA, 501 bp, Homo sapiens
  SIMILAR (79)..(585): 671254mologous to Mus musculus glycoprotein gC1qBP,accession number AJ001101,Smith-Waterman Score=568.
attaagcagagccacatgactagatctggccaatgtgtttctggaaccaataacttatttacttgcagaagaccgtccagcaccctccaccaagaagatgcccaagtagggttggtgcctaggccctatggttgcggctcaattcgtgcaacctcagttaccagggggtcccggggccagcgcggaattcgcggaattcaccaagccgcagctgcctgccgctgaatgcgaagagggcgcaggagactggcaggtacgctgcaaggctaaggcggaatacagatccgtgttaggcttttgacaaacagcccagggggcggggtagggtcgtgaaggaggaggttttgaaaaaaaaaaaaaaagaagaagaaaaagaagaagaaggagaagaagaagaagaagaagaagaagaagaagaagaagaagaaaagaagacgaagaagaagaagaagaagaagaagaagaagaagaagaagaagaagaagaagaagaagaagaaga

SEQ ID NO: 11263 - DNA, 966 bp, Homo sapiens; identical to SEQ ID NO: 5359
  SIMILAR (25)..(672): 911254mologous to Homo sapiens FKSG32,accession number AF325689,Smith-Waterman Score=992.

SEQ ID NO: 11264 - DNA, 400 bp, Homo sapiens
  SIMILAR (594)..(274): 711254mologous to Homo sapiens G protein-coupled receptor protein 8,accession number Y92368,Smith-Waterman Score=350.
  misc_feature (1)...(400): n = a,t,c or g
atggctgctgcactccagctgggagacagagcaaaaccctgttttaaaaaagaaaaagaaagaagacagagaagaaagaaaagaaaagaaagagagaaaggaaggaaggagaaggagaaggagaagaagaaagaagaagaagaagaagaagaagaagaagaagaagaagaagaagaagaagaagaagaagaagaagaagaagaagaagaagaagaagaggaagaagaggaagaagaagaggaagaggaagaagaagaagaagaagaagaagaagaagaagaagaanaagaagaagaagaagaagaagaagaagaagaagggaaagacactgagttaacagggctgccccagggctcagacaggaccagaatagacctggaggatccacaagctggccaag

SEQ ID NO: 11265 - DNA, 708 bp, Homo sapiens; identical to SEQ ID NO: 5351
  SIMILAR (866)..(1618): 721254mologous to Homo sapiens G protein-coupled receptor protein 8,accession number Y92368,Smith-Waterman Score=825.

SEQ ID NO: 11266 - DNA, 420 bp, Homo sapiens
  SIMILAR (190)..(699): 801254mologous to Homo sapiens p40,accession number U93566,Smith-Waterman Score=663.
atgcccttagaaggaggagtcatcccagaggagggggatgaccaagtgggcaggagaccgagccaagaaagcctgaccatcccaagtgttagtgaggatgcaatggaaagcagtaaaagcaccttgcaaaacagtttgacaattacttcagaaattaaaaacacacctaacttacggcccagacagtccatgcctatgaatctattggcagagaagctatctcctctctgcagctggttatccatcatctgctcagctctggctgagcccagggcttttatagacctcagagtggaagaagtgcatgctgattcatccatgggcagccatgggcagtcctggaaaaggcaccacaagttccaaatacagtccatgggactggtagcccagctcccagccttcaggtcctccctggcctga

SEQ ID NO: 11267 - DNA, 642 bp, Homo sapiens; identical to SEQ ID NO: 6956
  SIMILAR (268)..(1257): 831254mologous to Homo sapiens p40,accession number U93567,Smith-Waterman Score=1399.

SEQ ID NO: 11268 - DNA, 2347 bp, Homo sapiens
  SIMILAR (250)..(759): 921254mologous to Homo sapiens p40,accession number U93564,Smith-Waterman Score=805.
tctaatgctggtggttatattcaatgggactgagagaatagaggatcttaggaaacctccatcctttgatgccattcttggtggggggcttagagtcctcttcttccagaacgaagcacatccccctttcgccagctggcgtaataacgaagaggcccgcaccgatcgcccttcccaacagttgcgcagcctgaatggcaaatggcgcctgatgcggtattttctccttacgcatctgtgcgaaacgctggtgaaagtaaaagatgctgaagatcagttgggtgcacgagtgggttacatcgaactggatctcaacagcggtaagatccttgagagttttcgccccgaagaacgttttccaatgatgagcacttttaaaggtctgctatgtggcgcggtattatcccgtattgacgccgggcaagagcaactcggtcgccgcatacactattctcagaatgacttgggtgagtactcaccagtcacagaaaagcatcttacggatggcatgacagtaagagaattatgcagtgctgccataaccatgagtgataacactgcggccaacttacttctgacaacgatcggaggacccaacgagctaaccgcttttttgcacaacatgggggatcatgtaactcgccttgatcgttcggaacccgagctgaatgaagccataccaaacgacgagcgtgacacccgatgcctgggacaatggcaacaacgttcgcaaactattaactggccaactactactctagctcccggcaccattaataactggatggaagcggataaagtctcacatccaggtcatgctgatataagaggtgggttcacagtcttgggcagctctgcccttgtggctttgcaagaaatacaaaaaactgtcagagactattatgaacacttctatgcatgcgagctagacaacatagtagaaatggaaaaattcctggaaacatacaaccacacaagattgaaccgagaagagattgaatccctgaacagaccaataacaagttccaaaattgaatcattaataaaaaccctacaaactagaaataacccaggaccagatgaatttacagccaaattctaccagatgtataaggaagagctgggcaatgaacagcatttatcaattctctcttccaaagagaaagaagagctaaaccatggcaaatctccaaatacaacctcctcaggagtaggaggagcagaaggagaaggagaagaagaagaagaagaagaagaagaagaagaagaagaagaagaagaagaggaagaagaggaagaagaagaagaagaagaagaagaagaagaagaagaagaagaagaagaagaaagaagaaagaagaaagaagaaagaagaaagaagaagaaagaagaagaaagaagaagaaagaagaagaaaagaagaagaaaattagccgggtctgtgggtcagacctcagcaggtggtgcctcgtgtgaggaacgctgcagcggcctggtgattgtgacgtatcccttgacatcgaaggtgaaaagggctgtgcagtcatcttcacaaccggcagaccaggagactccctctggtgcctatgctaccagggccctgggtttcaagcacaaaactgggcagccttttggggaagccactgagctagctgcagaaggatcacaactccttgcagcaagggaacaaaactggatgaacaatgagtttgatgaattggaagaagtaggcttcagaagaataaccagtttagagaagaacataaatgacctgatggagctgaaaaacacagcaagaaaacttcatgaagcatacacaagttgcaacagccaaatcgatcaagcagaagaaaggatatcagagattgaagatcaactcaatgaaataaagcaagaagacaagattagagaaaaaagagtgaaaagaaatgaacaaagtctccaagaaatgtgggactatgtgaaaataccaaatctaggtttgattgttgtacctgaaaatgatggggagaatggaaccaaattggaaaacactctgcaggatattatccaggagaacttccccaacctaacaaggcggatcaacattcaaattcaggaaaaacagagaacaccacaaagatactcctcgagaagagcaaacccaagacacataattgtcagattcaccaaggttgaaaagaaggcaaaaatgttaagggcagccagagagaaaggtcgggttacccacaaaaggaagcccatcagactaatgatggatctcttggcagaagagggtggggaccaatattcaacattcttaaagaaaagaattttcagtcgagaatttcatatccagccaacctaa

SEQ ID NO: 11269 - DNA, 338 bp, Homo sapiens
  SIMILAR (271)..(489): 1001254mologous to Cloning vector pEH1 lac repressor,accession number AJ007659,Smith-Waterman Score=349.
tccagctgggcttctgtagcacctgccgttctccactttgtgttatgagtgttgatatagctgtctcatgtttcctcaagatggggagtaactggagaaggaagaagaagaagaagaagaagaagaagaagaagaagaagaagaagaagaagaagaagaagaagaagaagaagaagaagaagaagaagaagaagaagaagaagaagaagaagaagaggaggaggaggaggaggaggagaactagaatgtggaaagatataagaaggaagggcaatggtaaaagcaaaggaggcaagaaaaagggctcatccttccagacggtgtcggctctccaccgg

SEQ ID NO: 11270 - DNA, 567 bp, Homo sapiens
  SIMILAR (221)..(3): 891254mologous to Homo sapiens Human secreted protein HLYES38, SEQ ID NO:220,accession number Y86305,Smith-Waterman Score =347.
atgaagcatcagcattttgcccttcttgttccagagaaatttttaatagcacaaagcacagcctcccgtgttgatcggagacagatctggagggatgtgtcctcggagcggggtgagatttcacaatgtttgaaggtaggaacatctcttaatagcactgacgtgagtgcagttgaagctgtcagagccacggttctgggaagtggcacgctcacccccacagtcctccggagtaatgctgggccatatactcgcatttccactgtcccagcttgcctgctgggccaagaagaagaagaagaagaagaagaagaagaagaagaagaagaagaggaagaggaagaggaagaggaaggaggaggaggaggaggaggagaaggagaagaagaaaagaagaagaagaagaagaagaagaagaagaagaagaagaagaagaagaagaagaagaagaagaagaagaagaagaagaagaaggagaagaagaagaaagaagaaagtcataaattattttcaaagcagggcatctggagtccgatcagcattgccacagatggacccagagcctga

SEQ ID NO: 11271 - DNA, 654 bp, Homo sapiens; identical to SEQ ID NO: 5357
  SIMILAR (139)..(309): 361254mologous to Bombyx mori ecdysone receptor A isoform specific region,accession number D87118,Smith-Waterman Score=65.

SEQ ID NO: 11272 - DNA, 2187 bp, Homo sapiens
  SIMILAR (595)..(2109): 891254mologous to Homo sapiens putative p150,accession number U93563,Smith-Waterman Score=2297.
atgaacattgatgcaaatatccccaataaaatactggaaaatcgaatccagcagcacatcaaaaagcttatccaccatgatcaagtgggcttcatccctgggatgcaaggctggttcaatatacgcaaatcaataaatgtaatccagcatataaacagaaccaaagacaaaaactgcatgattatctcaatagatgcagaaaaggcctttgacaaaattcaacaatgcttcatgctggaaactctcaataaattaggtattggtgggacgtatctcaaaataataagagctatctatgacaaacccacagccaatatcatactgaatgggcaaaaactggaagcattccctttgaaaactggcacaaggcagggatgccctctctcaccactcctattcaacatagtgttggaagttctggccagggcaattaggcaggagaaggaaataaaaggtgttcaattaggaaaagaggaagtgaaattgtccctgtttgcagacgacatgattgtatatctagaaaaccccattgtctcagcccaacatctccttaagctgataagcaacttcagcaaagtctcaggatacaaaatcaatgtacaaaaatcacaagcattcttatacaccaataacagacaaacagaaaaccaaatcatgagtgaactcccattcacaattgcttcaaagagaataaaataccgaggaatccaacttacaagggacctgaaggacctcttcaaggagaacgacaaaccactgctcaaggaaataaaagaggatacaaagaaatggaagaacattccatgctcatgggtaggaagaatcaatatcgtgaaaatagccatgctgcccaagaattggaaaaaaactactttaaagttcatatggaaccaaaaaagagcccgcattaccaagtcaatcctaagccaaaagaacaaagcgggaggcatcatgttacctgacttcaaactatactacaaggctacagtaaccaaaacagcatggtactggtaccaaaacagacatatagatcaatggaacagaacagatccctcagaaataatgccacatatctacaactatctgatctttgacaaacccaagaaaaacaagcaatggggaaaggattccctatttaataaatggtgctgggaaaactggctagccatatgtagaagcctgaaactggatcccttccttacaccttatacaaaaatcaattcaaggtggattaacgacttaaacgttagacctaaaaccataaaaaccagagaagaaaacctaggcattaccattcaggacatcggcatgggcaaggacttcatgtctaaaacaccaaaatcaatggtaacaaaaaccaaaattgacaaatgggatctaattaaactaaagagcttctgcacagcaaaagaaactaccgtcagagtgatcaggcaacctacaaaatgggagaaaattttcacaacctactcatccgacaaagggctaatatccagaatgtacaatgaactcaaacaaatttacaagaaaaaaacaaacaaccccatcaaaaagtgggtgaaggacatgaacagacacttctcaaaagaagacatttgtgtagtcaaaaaacacatgaaaaaatactcaccatcactggccatcagagaaatgcaaatcaaaaccacaatgagataccatctcacaccagttagaatggcaatcattaaaaagtcaggaaacagcagaaagcatatccagaaaaaagaagaagaagaagaagaagaagaagcagaagaagaagaagaagaagaagaagaagaagaagaagaagaagaagaagaagaagaagaagaagaagaagaagaggaagaggaagaagaagaagaagaagaagaagaagaagaagaagaagaagaagaagaagaagaagaagaagaaaagtgctcactgaagcacactgaagctccctgtgtaaaaggaatagaaactattttctggaacaaattctcactgtgtgacatcacaaagagttatttatctggggtccaaaaacttgaggaacgtgcacacaaagtgaagttagcactgaagtttaagaaggaaattaaaatggctctccacggtggaaacccaatttggttgtccagtgtcaccctggtgtttggggtcctcatgtactgggagatggaagaatgtgatgattga

SEQ ID NO: 11273 - DNA, 873 bp, Homo sapiens; identical to SEQ ID NO: 5048
  SIMILAR (361)..(948): 871254mologous to Homo sapiens putative p150,accession number U93563,Smith-Waterman Score=845.

SEQ ID NO: 11274 - DNA, 443 bp, Homo sapiens
  SIMILAR (886)..(1491): 901254mologous to Homo sapiens p40,accession number U93570,Smith-Waterman Score=917.
cgggtcgacgatttcgtgtgctcggtgcgctgagctccgcggctccgcgagccggttccgtccccttcccgccgccgccatgaagtggatgttcaaggaggaccactcgctggaacacagatgcgtggagtccgcgaagattcgagcgaaatatcccgacagggttccgcctaactatgggacagctttacgagaaggaaaaagatgaagatggattcttatgtgtggcctacagcggagagaacacttttggcttctgagggccattgctgggctaggtgcaccgtaactgcttgtgtatcttgtaaatagccagccattttcagttattataccagaacctcttcacatagacctattagtgcatttgtaactggatttatttcttaatatattggaaggttttggttccttagactagtaaattatcatacagagttcta

SEQ ID NO: 11275 - DNA, 989 bp, Homo sapiens
  SIMILAR (128)..(400): 531254mologous to Homo sapiens GEF-2 protein,accession number AJ010569,Smith-Waterman Score=183.
  misc_feature (1)...(989): n = a,t,c or g
ggctgccgctgccgctgccgccgtcgttgttgttgtgctcggtgcgctgagctccgcggctccgcgagccggttccgtccccttcccgccgccgccatgaagtggatgttcaaggaggaccgctggcgtggaacacagatgcgtggagtccgcgaagaattcgagcgaaatatcccgacagggttccggtgattgtggaaaaggttctcagggctctcagattgttgacattgacaaacggaagtactttggtcccctcggacatcactgtgggctcagttcatgtggatcatcaggaaaaggatccagcttccttctgaaaaggccgatcttcctgtttgtggataagacagtcccacagtccagcctaactatgggacagctttacgagaaggaaaaaagatgaagatggattcttgtatgtggccctacagcgggagaggaacactttttggcttctgagggccaattggtgggctaggtgcacccgtaactgcttgtgtattcttgttaaattagccagccattttcagttattataccaaaacctcttcacataaacctattaggtgcatttggaacctggatttatttcttaatacattgaaagggtttgtttccttagactagtaaaattnatccatacagagttttattttgaagttttgtctttttgtgcattgtcctccatgcctggtattctcccaggaaacttgtcccttctggaaatcataatgaatgatatttctatatcgaagtgaggtaggtgcggtattaaagtgaaagggaaggtgatgcatttattctgggttatgcttgaagtgttagatggctaagtattaaaattatccaaattaaatccttagcagtcagaacacttgcttcactagaatatgccaactgccaatcatgttggactgagctaatttgttcctctttctgaaacaattaaggtaaataattaacaataaaaattctacttataaagg

SEQ ID NO: 11276 - DNA, 969 bp, Homo sapiens
  SIMILAR (329)..(499): 801254mologous to Homo sapiens Human secreted protein HLYES38, SEQ ID NO:220,accession number Y86305,Smith-Waterman Score =223.
atggtcgtgctttcggtccccgccgaagtcaccgtgatcctgttagatatcgaaggtaccacaaccccgatagctttcgtgaaggttggtgaaggaggaccaaagaaacagaaatacccaacagggagaaaaagagcaggggaaacaggaaacgaacgccagacagcgggggaaaaaaaccaaactaaggacgcgagagggaacacccaagagcacggggaagggaagagaaccccagggggcagggcaagtaggagaaacagagaaagggaaagcctagacaagaacaggagcaaaagtggccatcgagctccccacaaagagttgggcaatggaaagaaaccaagcagaagtcgccagcgccgggcgcagacagccaccatccggagcagactggccacggagctagtcggaagcagcggccgccgcagcggctccgcactggcgaaccgagggcagaaaaaggcggggttgacggctttttgggattttgccgagttcggaaccaccatcaaacaggattttcgcctgctggggcaaaccagcgtggaccgcttgctgcaactctctcagggccaggcggtgaagggcaatcagctgttgcccgtctcactggtgaaaagaaaaaccaccctggcgcccaatacgcaaaccgcctctccccgcgcgttggccgattcattaatgcagctggcacgacaggtttcccgactggaaagcgggcaggattttgccgatggcggaaccaccatcaaacaggattttcgccagctggggcaaaccagcgtggaccgcatgctgcaactctctcagggccaggcggtgaagggcaatcagctgttgcccgtctcactggtgaaaagaaaaaccaccctggcgcccaatacgcaaaccgcctctccccgcgcgttggccgattcattaatgcagctggcacgacaggtttcccgactggaaagcgggcagtga

SEQ ID NO: 11277 - DNA, 2082 bp, Homo sapiens
  SIMILAR (714)..(2588): 921254mologous to Homo sapiens putative p150,accession number U93569,Smith-Waterman Score=2974.
  misc_feature (1)...(2082): n = a,t,c or g
cggccgccttttccagttccaggtgtgcagaagtgtcctctccccacgcgcggcgggctgcacattggtcgctggctccgagatcgcgcggggccgccggaagcccaagacggtaccgggggccgcagccgcagccggcgccgccctccagccctccccaacagcaggccgagtcccgtagcatccggtagggaaatggtcgtgctttcggtccccgccgaagtcacccgtgatcctgttagatatccgaaggtaccacaaccaccgattgctttcgtgaaaggagcattttatttccttacatcgaaagaaaaatgttaaaagatgtatctgcagacacattggggaagaagaggagttccaagcaggatgtcagtctttttgaaggaaacaaggcttgaagaggacgcccacctggatgggggctgttcctatccctggcaagcatctgggaattggagttggatgattctgcaacagatgattccaagccgtggtagataatgtgtgctggcagatgtcccttgatcgaaagaccactgcactcaaaacagctgcagggccacaatgtggagggcggcattcacagctgggcgcatgaaaagcagagttctttgcagatgtagttccagcaagtcaggtaagtggagagaggccggaaatgaaggtgtacatctattcctcagggagtgtggaggcacagaaactgttattcgggcattctacggagggagatattcttgagcttgtttgatggtcacttttgataccaagattggacacaaacgtngacgagtgaaagttacccgaaagacttgcagacagcattgcggtgctcaaccaaacaaacattttgttttctggacagatgttacttcgaggagggccagtgctggcttgagggaagcaggatgttgcacgttagctgtggtgggtgagaccagggcaacgcagggattaacagatgattgaggaagacttactacagcctcatcacatcctttcagtggaactattacctgccttcctcaacctaggagaagggtttgtttaagggcagaccgccctgttccccagagttgtccctgtagtgtctaggtttattctaatggtaaaagtaacttacttaaaaaacatatgtacacatatgtatgcaaggtatgtatatatgtgtatgctccagattaacttccataggtacataagtgaaaggaagtcttcagtttcagtgaacacaaaactttatttaaagatgctttataatgtagaaattggtttcaaatcatactctaacccttagtgagggcaaagtgtagttggtaaaagaaattgctaaatacctatctaatgtgctatgttcatcaaatcgtgtactaaaatggaaagctagttttgagaaattattcacaagccttgttattttaaaaatgaaatatttcaaagactgaatattttcaaagaaaaggaataattcattgcccttgtgatttagaagattataacagctgtatttcatatttgcctccttatatatatcaaagaccaaggtatttccttccggcttcaaaaggaaccaaaattgggaaagaaaactccacttgagtcttgatcaaaccaagtgtccttttacttaaggaaggaaacttgggtaaatcaattgtgggcaccccacagccaagccagttgcccttacccagtgaaaaaaggtggcactggaggtaacatcttaaaaccagagatgtggttcttaaatgtttaacagaacagttcctaatcctgcccacggtgttatcattagtagattttatagttgccctttcctaacctacttaggcacagtttgaggaatacggttaattggctatttacctatttaaaaagttttactgaaattcagtcccataacctttagggtggggccctaatatgtaaagattttcctctgggaatgggatgtgagaaatcgtaaattttgataacagcagtatttatcctggtttaattctaatacggatgtcatgttaatttcatgttgtgattaataaaagcattttttcttccctcaaaaaaaaaaaaaaaaaa

SEQ ID NO: 11278 - DNA, 858 bp, Homo sapiens
  SIMILAR (198)..(79): 601254mologous to Homo sapiens HDCGC21P,accession number AF067801,Smith-Waterman Score=122.
aagaccttgggaataaaggacaaccttacaggcttagtcctcctgttcttccactgtgctccttaaaggaaattcaattgtctactgataaatttttcagaatggaaccatctgaaattaccaatggttgttttctttctattttaacaagggagtaaatgcttctttaattgcagcgggacccttctgagacagtgtctgtgaatgatgttttggcccgagctgcagccaagggtctgctggatgggattgagttgggtaaatcatcaaaacgggagaagaagaagaaaaaatcaaaaacatcattgacaaaaggtgccactactgataatggcatccaaatgaaaattgcttgagttcctgaatcgagaaactaaagccagtgctaatctatcagagactgtaacaaaaccacctcttccccagaaaaatactgctcaagtgggggcttcctcacagaccagaaaacccaacaagctggccccccatcctgcagtgcctgcatttgtgaagaacacttgtccctccagaccgcgtgaacggcagacacacttcttaagacctcggccagaagacagaatggttgctctgaaacccatcaagattgttctgcctccagtctttatgccattttcaagtccccaagggatcagatctcggatgccaactcaacatttgtactgtcgttgggttgcacccaaggcacttgtgcccacctgccttcccacacactcactatccagaaaagaggaaaagcctaaaagaatggacacacctttcctcccttactccaggcctccctcgggcgaatggcttttgattgtcttgtggttttttaataggagccaaagaagcagg

SEQ ID NO: 11279 - DNA, 237 bp, Homo sapiens
  SIMILAR (109)..(207): 901254mologous to Homo sapiens extraneuronal monoamine transporter,accession number AJ001417,Smith-Waterman Score=148.
atggagaccagcagcttaaggatcaccccagacctgctgaacgctagagctaccgaaagagaaagtcctaaggtggggccaataattggtgttttaccaagacctccaggtaccctggcatccatctgtggtggcctcgtgatgcttttgcctgaaatcacgggtattgccttgccagaaacagtggatgatgtagaaaaacttggcaggcattgtccaaaattcaatgcaccctaa

SEQ ID NO: 11280 - DNA, 3229 bp, Homo sapiens
  SIMILAR (456)..(932): 981254mologous to Homo sapiens KIAA0039,accession number D26018,Smith-Waterman Score=795.
  misc_feature (1)...(3229): n = a,t,c or g
ctgcgggcggcgggcggcgggcgcaccatgccctccttcgacgaggcgctgcagcgggtgggcgagttcgggcgcttccagaggcgcgtgtttttgctgctgtgcctgacgggcgtcaccttcgccttcctcttcgtcggcgtggtcttcctgggcacgcagcccgaccactactggtgccgcgggccaagtgccgcggcgctggccgagcgctgcggctggagcccggaggaggagtggaaccgcacggcgcccgcctcccgcggcccagagccccccgagcgccgcggccgctgccagcgctacctcctggaggcggccaacgacagcgcctccgccactagcgctctcagctgcgcggacccactcgccgccttccccaaccgttcggctccccttgtgccgtgccgcggcggctggcgctacgcccaggcccactccaccatcgtcagcgagtttgaccttgtctgtgtcaatgcgtggatgctggacctcacccaagccatcctgaacctcggcttcctgactggagcattcaccttaggctatgcagcagacaggtatggcaggatcgtcatttacttgctatcctgccttggtgttggcgtcactggggttgtggtggcctttgcaccaaacttccctgtgtttgtgatcttccgcttcctgcaaggtgtatttggaaaggggacgtggatgacttgctacgtgattgtgacagaaatagtaggttcgaaacaaaggaggattgtgggaatcgtgattcaaatgttctttacccttggaatcataattctccctggaattgcctacttcatccccaactggcaaggaatccagttagccatcacgctgcccagctttctcttcctcctttattactgggtggtccctgagtctccccgttggctgattactcggaagaaaggagataaagcattacagatcctgagacgcattgctaagtgcaatgggaaatacctctcatcaaattactcagagatcactgttacagatgaggaagttagtaatccatcctttttagatctggtgagaactccccaaatgaggaaatgcacacttattcttatgtttgcttggttcacaagcgcagtggtgtatcaaggacttgtcatgcgcctgggaattatagggggcaacctctatatagactttttcatctcgggcgtggtggaactgccaggagctctcttgatcttactaaccattgagcgccttggacgacgcctcccctttgcggcaagcaatatagtggcaggggtggcatgccttgtcactgcgttcttaccagaaggaatagcatggttgaggaccacagtggctacattgggaagactagggataaccatggcctttgaaattgtttatttggtaaattcagaattgtacccaacaacattacgaaatttcggagtttcgctctgttcaggtctgtgtgattttgggggaatcatagccccatttctgctctttcggctagcagccgtgtggctagaactacctctgatcatctttggtatcctggcatccatctgtggtggccttgtgatgcttttgcctgaaaccaagggtattgccttgccagagacagtggatgatgtagaaaaacttggcagtccacattcctgtaaatgtggcaggaataagaaaaccccagtttcccgctctcacctttgaggcccccgacaaagacagaaagaaggagctatccagggagctgatcctccttgcaaagctgtgccttgcaggagatgcacgtgtgcatttcagcttacattcatgccgcgctgtttgttaatactgtattaaaggaccttcaattctattccagagttatttttnattattaatgttgggatgagttaggatttgtaatgctgttgaagtttctgggaacacataatatgtagccagtttaacaaagaagctgtcaggtgcacagcccttcctgggtttttttcttgtgttccctgtggtctctgacccattaggctaaagagagacaagagaagcccccaacctgattctcatgacagctccatcaagaatgtgggatgtgccgaccaaggatttgagaaagttgtacagaaatgtgttcatcaaatctggtcaagggactaagctcctagctgaccattcattctgaagattgcatggaggatgaacatctgggaatcctgttaatgagaaggctgaatcacaggcacctgggccaaagggtgtgagcattcatgttctctgctcaccttggtttccgcacaccttcgcaatgtgaacaggtcaggagtccctcccgtccacctcctctgtaacagctggggttccaggcatggtttaggccctgttccagcaataagaaccaatctgctgtacaatctgaggacttggctgtgttatttacaaaatgatgctgtggttctgagattatttgggacatttttggctctcctttagtggacacctagagccacagattcccttctttactaaacaaatcccatggattctgatttctgggtcttaggattttaaaagtgaagggatatttttcttatatttgtgagttcagttccgatggtgcccgtggtcaaaagcgaaaaacatggacaattcctattcattcttagcactttgacatgtcttggggaaaagctttacattttaatttaaaagaaagatcaattatatccatgcttaacaggatcagcaggagctttataaatgactttacagagactaataagggattgatctttctttttttgttatcgaggcttttgaaatgtggaacttgtgtgttctgctttatatgttatattcaatatcttttcagatgcagtctatattttatgctgagttttaaaaatgaaatactttatgcaaacaggcaaaattggtaccaaagggaaacattaaccatgaggaagagcatttttctaaggagaacaggtgacaatatacacatgtcgcgtaatcgtaaaatgagcatcttagtctttaaaacacatcagaattgaatacgaataatctatttgtcgatgaaataaacacaactctttgaggatttgagactacattcaccctttattcacagtcacttgcagttttgcttttctctccatttctctgctgtaagatgactgttgcattgttgaattgtattttgagtggatatttttgtttggtaacaattaaaattttaaatcgt

SEQ ID NO: 11281 - DNA, 237 bp, Homo sapiens; identical to SEQ ID NO: 11279
  SIMILAR (109)..(207): 901254mologous to Homo sapiens extraneuronal monoamine transporter,accession number AJ001417,Smith-Waterman Score=148.

SEQ ID NO: 11282 - DNA, 3229 bp, Homo sapiens; identical to SEQ ID NO: 11280
  misc_feature (1)...(3229): n = a,t,c or g

SEQ ID NO: 11283 - DNA, 277 bp, Homo sapiens
  SIMILAR (10)..(237): 711254mologous to Homo sapiens Human secreted protein, SEQ ID NO: 4718,accession number G00637,Smith-Waterman Score=280.
cgtcgacttttttttttttttttgagacagagtcttgctctgtcacccaggctggagtgcagtggcgcgatctcagctcactgcaagctccacctcccaggttcatgccattgtcctgcctcagcctcccaagtagctgggactacaggcacccgccaccacgcctggctaatttttttgtacacttttagcagagatggggtttcagcatagcccggatggtctcaatctcctgactcacggtcgaccgggggctaatttagtagtagtagtagta

SEQ ID NO: 11284 - DNA, 420 bp, Homo sapiens
  SIMILAR (31)..(219): 681254mologous to Sus scrofa M130 of smooth muscle myosin phosphatase,accession number D89496,Smith-Waterman Score=208.
atgagccacgcgcagtggcgggtgcctgtagtcccagctactggggaggctgaggcaggagaatggcatgaacctgggaggtttttgattggtcaaggagcacatgtaggggctgtcaacagtgaaggagatacacctttagatattgcggaggaggaggcaatggaagagctacttcaaaatgaagttaatcggcaaggcacacagtgcaaggtgtcagtggatctgtcattctggggtctggaagacggtggccctcttctcatggctgcgctaggcagtaccccagtggggattctgtgtggggtctctgacctcacatttcccttccacactgccctagcagaagttctccatgagggctctacctctgcagcagacttctgcctggacatccaggcctttccatacaccctctga

SEQ ID NO: 11285 - DNA, 1458 bp, Homo sapiens
  SIMILAR (118)..(603): 591254mologous to Homo sapiens G16,accession number U89336,Smith-Waterman Score=452.
atgggtgtgcagaagtcaagaactgaggtttgggaagctctgcctagatttcagagggtgtatggaaaggcctggatgtccaggcagaagtctgctgcagaggtagagccctcatggagaacttctgctagggcagtgtggaagggaaatgtgaggtcagagaccccacacagaatccccactggggtactgcctagcgcagccatgagaagagggccaccgtcttccagaccccagaatgacagatccactgacaccttgcactgtgtgcctagaaaagacagagacactcaacactggcccatgaaagaagccaggagtggggctgtaccctgcaaagctacagaggcagagctgtccaaggctgtgggagcccacctcttacatcagcatgacctggatgtatttattcgcgataagctcatggagcggcgtaaccgtcgcacaggaaggacagagaaagcgcggatctgggaagtgacggacagaacggtcaggacctggattggggaggcggttgccgccgctgctgctgacggtgtgacgttctctgttccggtcacaccacatacgttccgccattcctatgcgatgcacatgctgtatgccggtataccgctgaaagttctgcaaagcctgatgggacataagtccatcagttcaacggaagtctacacgaaggtttttgcgctggatgcggctgcccggcaccgggcaggctatgatgttaatattaaagactatgatggctggacacctcttcatgctgcagctcattggggtaaagaagaagcatgtcgaattttagtggacaatctgtgtgatatggagatggtcaacaaagtggcttgcattgatgacaatgttgatatggtgaagtttctggtagaaaatggagcaaatattaatcaacctgataatgaaggctggataccactacatgcagcagcttcctgtggatatcttgatattgcagagtttttgattggtcaaggagcacatgtaggggctgtcaacagtgaaggagatacacctttatatattgcggaggaggaggcaatggaagagctacttcaaaatgaagttaatcggcaaggggttgatatagaagcagctcgaaaggaagaagaacggatcatgcttagagatgccaggcagtggctaaatagtggtcatataaatgatgtccggcatgcaaaatctggaggtacagcacttcacgttgcagctgctaaaggctatacggaagttttaaaacttttaatacaggcaggctatgatgttaatattaaagactatgatggctggacacctcttcatgctgcagctcattggggtaaagaagaagcatgtcgaattttagtggacaatctgtgtgatatggagatggtcaacaaagtgggccaaacagcctttgatgtagcagatgaagacattttaggatatttagaagagttg

SEQ ID NO: 11286 - DNA, 549 bp, Homo sapiens
  SIMILAR (912)..(703): 981254mologous to Homo sapiens Human GTPase associated protein-23,accession number Y99672,Smith-Waterman Score=381.
ttttttttttttttgtagagcctgggtcttgctatgttgaccagactggtcaagctaactcctggactcaagtgatcctcccacctcggcctctcaaagtgttcagattacaggcgtgagcatgctcagccaacataaactttttaggtcactccaaaaaaggggaactttaactttctgatacagagaatgcctgttttttgtttgtttgtttttgagaccgagtctcgctctgttgcccaggctggagtacagtggcacgatcttggctcactgcaagctctgcctcccaggttcatgccattctcctgcctcagcctcccgagtagctgggactacaggcacccgccaccgcgcctgggataatgttttttgtatttgtagtagagatggggtttcaccacgttgggccagggatggtcttgatctcctgacctggtgatccgcctgcctcggcttcccaaagtgctgggattacaggcgtgaaccaccgtgcccggccaagattctttataaagcattaattacatggccacctccttttaaccc

SEQ ID NO: 11287 - DNA, 451 bp, Homo sapiens
  SIMILAR (362)..(433): 501254mologous to Pseudomonas syringae pv. syringae putative lipoprotein,accession number AF051694,Smith-Waterman Score=60.
tttcgtgggaatctttatcttctcgtctagttctccgaggttgaaggctcggcctgctcagagaaggaaactgaggtccaccgagttggagaaacctactcaacaccaggactaacttcttcagtgcttagagtgtgagaaaaatggcaaatatgaatagtgattctaggcatcttggcacctctgaggtagatcatgaaagagatcctggacctatgaatatccagtttgagccatcggatctaagatccaaaaggcctttctgtatagagcccacaaacatcgtgaatgtgaatcatgtcattcagagggttagtgaccatgcctctgccatgaacaagagaattcattactacagccggctcaccactcctgcagacaaggcactgattgccccagaccatgtagttccagctccaaaagagtgctatgggtatagtccatttgggct

SEQ ID NO: 11288 - DNA, 996 bp, Homo sapiens
  SIMILAR (536)..(772): 391254mologous to Hydra sp. mini-collagen,accession number X61048,Smith-Waterman Score=115.
atgaatacagggaagctgcagcttagtgtgcacctggaagccttgggccagccccaccatctggggaccagtgatgtcagcttcccaggcctcaccacccacacagctaatgaaggtgtttcaaggctacctctggtgtcctcaaacgaccccctttacaggcccattgtcactgccaccaccccgatacatgggtacatgtggtgtaccaatatggagatgaatactctgaaggtcatggcatttgttgcccaaaattttttagacaacttccctagcagtgacaccctgtccttcattgcaaggatattcctgctgttccagatgatgactgtatacccactcttaggctacctggctcgtgtccagcttttgggccatatcttcggtgacatttatcctaggcgcctccagattggccgcttgcttaaagtttttcgtgtctttttctggactttgtcctccggtattttggggaattggcatacaggtcgaggggagtgtttcgcccatgggtttgcactccttgtaaacgcactacaagtcgcccgaaatcttgccaacattcgcgccgctcgtacgcgcgttcggaccatccgaacgtctgcaagtaccgttttcttggccccatacacacagggagatatacaaaagacaaaaatttgcatagatgccgtttcttccaaggtcgcgtccacttcgaaagttctaactgtgtctttcacactattgcgatcgcctgcgcccctggaacgtcatttggcaaattcccaggaaccgttgttttatgtagtccacggacaagtctttagcctattgtttctagagatcgtctataatgagtataatattaagttaatatggcctttctgtatagagcccacaaacatcgtgaatgtgaatcatgtcattcagagggttagtgaccatgcctctgccatgaacaagagaattcattactacagccggctcaccactcctgcagacaaggcactg

SEQ ID NO: 11289 - DNA, 1005 bp, Homo sapiens
  SIMILAR (602)..(844): 981254mologous to Homo sapiens cell recognition molecule Caspr2,accession number AF193613,Smith-Waterman Score=428.
atggcccggctgtggggcgcgctgagtctttggccactgtgggcggccgtgccgtggggcggggcggcagccgtcggtgtccgggcttgcagctccacggccgccccggacggcgtcgagggcccggcgctgcggcgctcctattggcgccacctgaggcgtctggtgctgggtcctcccgaaccgccgttctcgcacgtgtgccaagtcggggacccggtgctgcgcggcgtggcggccccggtggagcgggcgcagctaggcgggcccgagctgcagcggctgacgcaacggctggtccaggtgatgcggcggcggcgctgcgtgggccttagcgcgccgcagctgggggtgccgcggcaggtgctggcgctggagctccccgaggcgctgtgtcgggagtgcccgccccgccagcgcgcgctccgccaaatggagcccttccccctgcgcgtgttcgtgaaccccagcctgcgagtgcttgacagccgcctggtcacctttcccgagggctgcgagagcgtcgccggcttcctggcctgcgtgccccgcttccaggcggtgcagatctcagggctggaccccaatggagaacaggtggtgtggcaggcgagcgggtgggcagcccgcatcatccagcacgagatggaccacctgcagggctgcctgtttattgacaaaatggacagcaggacgttcacaaacgtctattggatgaaggtgaatgactaaagctttgctactggggctgaggattccggataccaagacgcaaacactttcactttgagctgggcaaatcttacttggcatcaacttggatggctcgcatatgacaggaaactggattgccaaggcatggcagactgagctggaggaagatgtcagaaatgtttgccctgaaatcagttacggacaaaatgttggctacaacttgaggagaaaaatcacccccaaaggagtggacatttcctaacaattctgtatggaggaaggtggggtaag

SEQ ID NO: 11290 - DNA, 542 bp, Homo sapiens
  SIMILAR (3)..(146): 1001254mologous to Homo sapiens peptide deformylase-like protein,accession number AF239156,Smith-Waterman Score=269.
ggctggaccccaatggagaacaggtggtgtggcaggcgagcgggtgggcagcccgcatcatccagcacgagatggaccacctgcagggctgcctgtttattgacaaaatggacagcaggacgttcacaaacgtctattggatgaaggacggcacacaaaaggtgcagaacaatatcctttcacatgtggcgatactacaactttgcccggatgaggaaaatggctgactttttccttatccaatcaaactataactacgtgaactggtggtcgacagcccagagccttgttattattctttctgggatcctgcaactgtatttcttgaagcgtctcttcaatgttccaacaactacagatacaaagaagccaagatgctaagctaaggtgactatagcaccctggctgttttcttctggggcttagtcgaatcagctttgtaatgttatgggacaaaaatcaattatctcattaatgttttagtctgctgcacacatctaaaaaagcaaaatggcaataaaatcataacagtgaaaaagttc

SEQ ID NO: 11291 - DNA, 759 bp, Homo sapiens
  SIMILAR (190)..(756): 711254mologous to Mus musculus transcription factor S- II,accession number M18210,Smith-Waterman Score=671.
atggtgcaggagaagaacacggccggagcactgggtttgttaacagagcttcagaatgttctggaattactgcggtccacaggaactggaatgttacttaatgttagtctcaagcagagtgcagatgaagaagttacatctttagcaaagtctctcgtcaaatcctggaaaaagttaccagataagccatcaagtgagaaagaccctaaagaaaagcaaatagaacctgcaatgacatcgcagaatagcaaaagaaacacttctgattctgtgcggatgaagtacagggagatgcttcctgcagcccttcgaacaggagatgactgcattgaaatgggaactgatgaggaagaattaggatctcgaactgaggaagcaatagatccagaaagagggaatacaggcatgaagtacaaaaatagagtccaaagtaagatatcaaatcttacagatgcaaagaatccagatttaaggaaaaatgcaccgtgtgggaatattcctcctgacttacttgctagaatgacagcagaagaaatggctagtgatgagctcaaagagatgcacaaaaacttgaggaaagaagccatcagagagcatcagatggccaagacaggtggaacccagcctgattcgctcacatgtgccaaatgtaaaaagaagaattgcacttccacacaggtacaagcctgcagtgctggtgaaccaatgacaacgtttgttgactgtaatgaatgtggaaatcaacagaagttctgttga

SEQ ID NO: 11292 - DNA, 228 bp, Homo sapiens
  SIMILAR (40)..(126): 441254mologous to Treponema pallidum alginate O-acetylation protein (algI),accession number AE001232,Smith-Waterman Score=79.
agccctttggataccagacagtcctcacggctgacaacattaccgatggagaggactaaaactcaaggttggaactgttcctgtccagctccactaccagcaaaaacactctgcatcccattattcaagcataattggataagcattctttgcctccttctgcagtagtctttgctttcttctcccaccttaagaggcatatctctcattcccgtcacaaatctttgg

SEQ ID NO: 11293 - DNA, 484 bp, Homo sapiens
  SIMILAR (224)..(1435): 991254mologous to Homo sapiens JNK3 alpha2 protein kinase,accession number U34819,Smith-Waterman Score=2119.
gtacctgcttactcctgcttggcacgaggcggcacgaggctggaggaccctgtcgccctgaaggcctgtttgctgcacatctgcctgcagagccaaacctcagggcccggtgcagtgtccagcctggtatctggcatcccagtagcttccatgttctgtgtatgggggtggggtgccccttcctcccactgtttgaattcactgaaaagcccccatgtctctccaactggctccccacagaccacttctgaagggctcacctgttgtcactccctcctgctccctcagtcccgtgtcatgagaatggacggtgtccagggcttccggtggggtctcaggagatgcccatgctggccctgcccgagctggctttctcggcctgggttaacagatcaaatccatctctacgctgggcgaggagcagacagcagtgggactccatggttctggatacctttcctggggtccctgtggaggcaaccag

SEQ ID NO: 11294 - DNA, 1248 bp, Homo sapiens
  SIMILAR (229)..(357): 651254mologous to Gallus gallus protein phosphatase 1M regulatory subunit,accession number S74622,Smith-Waterman Score= 132.
atggttaagaaccacagccctttggataccagacagtcctcacggctgacaacattaccgatggagaggactaaaactcaagtcatgagaaaactcacagtgattgtaggaacactcagtatcgcaaagctcattatgtatgtcaacacacttccacatctgttacctcctgtgagccttgcagagtccctaccatacgagagagtaggacagggactgttgttcttacggaagtacaaaaatggaaatgcagagaaggcgagtgatctgcctaaagtgttaacagaactgaaatccgacaaccagaggctgaaagatgaaaatggtgccctcatcagagtcatcagcaaactgtccaattcagagcatgggatttctagaatctcacatctggggcagcctcttctgattttacatcttatcattggtgggggcctcgcccaccagcctcctacaactcctgtccacatagaggccccttccccagggacagccacaggaccccaggaaaggtatccagaaccatggagtcccactgctgtctgctcctcgcccagcgtagagatggagctgaactgtgaacccaggccgagaaagccagctcgggcagggccagcatgggcatctcctgagaccccaccggaagccctggacaccgtccattctcatgacacgggactgagggagcaggagggagtgacaacagctacgtcagccctcaggtatggaaaacacacaagcagaagcatgttcccaccaagcccatggaccaagacagatgccatccactacgtggcatatcaggaccagctgggacctgaggaaggcactgctccccacacccacactggctccacactggtgtcaacgttcaaaatcactcagcaacctgtccccacccctcaaggctcctcactagcagtgggctcagaggaatgcaaatcttgggctttggaagggctgaatgaagttcatgaatggaaaagaatccaggtggtagaagatgaattgggaaagggcaaaggagtaaaggaagctgaagtggcccagatggggcaggatagagatgctgccatttgtgctgggaaagagagatactcaggcttctggagaagccatgagttttctgtggtgaaaaaatggcaagggcctgagggcttcatggatggaaaagagaggtcaaaggaaggcaggcaaggagggctggcctctggccacaaggggacctcactctgttgtccaggctga

SEQ ID NO: 11295 - DNA, 1467 bp, Homo sapiens
  SIMILAR (104)..(538): 681254mologous to Homo sapiens Deleted in Colorectal Carcinomas,accession number R13144,Smith-Waterman Score=455.
atgccaagcgaaatttataatgaacagattgaagaaaaagagcgacagaaagttcaggatatcaaagaagtcaagcaaaacatccatcttatccgagcctcttttgcaggcaaagggaagcagttggaagagaaaatgcagcctttggagccagaggctattatgttaagtgaactaatgcaggaacagaaaaccaaatgccgtatgttctcacttataagtggaaaacatggagtacacatggattcaaagacaggagcaacagacagtggggcctacttgagggtagaggaaatacaaactaccatcagagaatactacaaacacctctacgcaaataaactagaaaatctagaagaaatggataaattcctcgacaaatacactctcccaagactaaaccaggaagaagttgaatctctgaatagaccaataacaggagctgaaattctggcaataatcagtagcctaccaaccaaaaagagtccaggaccagatggattcacagctgaattctacctgaggtacaaggaggaactggtaccattccttctgaaactatcccaatcaatagaaagagagggaatcctccctaactcattttatgaggccagcatcatcctgataccaaagccgggcagagacacaaccaaaaaagagaattttagaccaatatccttgatgaacattgatgcaaaaatcctcaataaaatactggcaaaccgaatccagcagcacatcaaaaagcttatccaccacgatcaagtgggcttcatccctgggatgcaaggctggttcaatttacgcaaatcaataaatgtaatccagcatataaacagagccaaagacaaaaaccacatgattatctcaatacatgaagaaaaggcctttgacaaaattcaacaacccttcatgctaaaaactctcaataaattaggtattgatgggacgtatctcaaaataataagagctatctatgacaaaccaacagccaatatcatactgaatggacaaaaactggaagcattccctttgaaaactggcacaagacagggatgccctctctcaccactcctattcaacatagtgttggaagttctggccagggcaatcaggcaggagaaggaaataaagggtattcatttaggaaaagaggaagtcacattgtccctgtttgcagacgacatgattgtatatctagaaaaccccatcgtctcagcccaaaatctccttaagctgataagcaacttcagcaaagtctcaggatacaaaatcaatgtacaaaaatcacaagcattcttatacaccaataacagacaaacagagagccaaatcatgagtgaactcccattcacaattgcttcaaggagaataaaatacctaggaatccaacttacaagggacatgaaggacctcttcaaggagaactacaaaccactgctcagtgaaatagtaacagtcttttag

SEQ ID NO: 11296 - DNA, 1074 bp, Homo sapiens
  SIMILAR (68)..(556): 971254mologous to Homo sapiens 60S ribosomal protein L30 isolog,accession number AF201949,Smith-Waterman Score=847.
  misc_feature (1)...(1074): n = a,t,c or g
ccgaaacacgcggtccgatcacgcgtgggcttggcgttagcttggcggggttacacgcgggttcaacatgcgtatcgaaaagtgttatttctgtggggggcccatgtatcctggacacggaatgatgttcgtccgcaacgattgcaaggggttcagattttgcaaatctaaatgtcataaaaactttaaaaagaagcgcaatcctcgcaaagttaggtggaccaaagcattccggaaagcagctggtaaagagcttacaggggataattcatttgaatttgaaaaacgtagaaatgaacctatcaaataccagcgagagctatggaataaaactattgatgcgatgaagagagttgaagaaatcaaacagaagcgccaagctaaatttataatgaacagattgaagaaaaataaagagctacagaaagttcaggatatcaaagaagtcaagcaaaacatccatcttatccgagcccctcttgcaggcaaagggaaacagttggaagagaaaatggtacagcagttacaagaggatgtggacatggaagatgctccttaaaaatctctgtaaccatttcttttatgtacatttgaaaatgccctttggatacttggaactgctaaattcttagtttattttttacataaggtcactcaaatgaaaagccgattaaaagacatctttccctgcattgccatctacataatatcaggatattacggatgttagatttgcatctcagtgttaaatctttactgatagatgtacttaagtaaatcatgaaaattctacttgtaactatagaagtgaattgtggacgtaaaatggttgtgctatttggataatggcactaggcagcatttgtatagtaactaatggcaaaaattcatggctagtgatgtataaataaaatattctttgcagtaaaatattcccttgttaatgttatagaangggggatccaaaaggactaacaattgtatggcagtgnagatattttatttgtaattccggtttggttattgcacctagaaggcctatggcatgttgtgagcccatagcgganggttgac

SEQ ID NO: 11297 - DNA, 370 bp, Homo sapiens
  SIMILAR (373)..(453): 1001254mologous to Mus musculus JNK3,accession number AB005665,Smith-Waterman Score=136.
  misc_feature (1)...(370): n = a,t,c or g
cgccagatgatgaagactggggtgaattaagtccacacatttatttcaagttgttaaagagtatgtgggcctcgcaatggtccctcgcatgcaagaagtcaaagagctcctccgtgcaatcctcttctgtatgtgatcgagaggatacacgctcatcacagagctctagccgctcccgggcctttacacatttctccaactgctcgcattgctctctcactgttgttaggggatccactaattcctcctnnnnnnnnnnnnnnnnnnnnnnnnnnnnnnnnnnnnnnnnnnnnnnnnnnnnnnnnnnnnnnnnnnnnnnnnnnnnnnnnnnnnnnnnnnnnnnnnnnnnnnnnnnnnnnnnnnaacccag

SEQ ID NO: 11298 - DNA, 281 bp, Homo sapiens
  SIMILAR (3)..(209): 1001254mologous to Homo sapiens Similar to ubiquinol- cytochrome c reductase hinge protein,accession number BC001426,Smith-Waterman Score=369.
gagaggaggaattagtggatcccctaacaacagtgagagagcaatgcgagcagttggagaaatgtgtaaaggcccgggagcggctagagctctgtgatgagcgtgtatcctctcgatcacatacagaagaggattgcacggaggagctctttgacttcttgcatgcgagggaccattgcgtggcccacaaactctttaacaacttgaaataaatgtgtggacttaattcaccccagtcttcatcatctgggcatcagaatatttccttatggatttggatg

SEQ ID NO: 11299 - DNA, 712 bp, Homo sapiens
  SIMILAR (2596)..(3216): 971254mologous to Homo sapiens hBAT1,accession number AB033548,Smith-Waterman Score=995.
gggttaggtgccgctgttgctgctcgtgttgaatctagaaccgtagccagacatgggactggaggacgagcaaaagatgcttaccgaatccggagatcctgaggaggaggaagaggaagaggaggaattagtgataggactgaggctttcagtgcatactggcaaccttggaaggccaggaatgtgaaactttcccctactacttagcatccagaattgaatgggagacccgcattctgccatttctggcggccagtgtggctctgccagctggccttctgcacggatccccctacaacaagtgagagagcaatgccgagccagttggaagaaatgtgtaaaaggcccgggagcggctagagctcctgtgatgagcggtgtatcctctcgatcacatacagaagaggattgcaccggaggagctctttgacttctttgcatgcgaagggaccattgccgtggcccacaaacttctttaacaactttgaaataaatgtgtggacttaattcaccccagtcttcatcatctgggcatcagaaatattttccttatgggttttggatgtaccatttgtttcctatttgtgtaactgtaagttcacatgaacctcatgggttttggcttaggctggtagcttctatgtaattcgcaatgattccatctaaataaaagttctatgatctgcaaaaaaaaataaaaaaaaaaaaaaaa

SEQ ID NO: 11300 - DNA, 2616 bp, Homo sapiens
  SIMILAR (1)..(1500): 991254mologous to Homo sapiens leucocyte immunoglobulin-like receptor-3; LIR-3,accession number AF025533,Smith-Waterman Score= 2669.
atgaagcacctgaagcggtggtggtcggccggcggcggcctcctgcacctcaccctcctgctgagcttggcggggctccgcgtagacctagatctttacctgctgctgccgccgcccaccctgctgcaggacgagctgctgttcctgggcggcccggccagctccgcctacgcgctcagccccttctcggcctcgggagggtgggggcgcgcgggccacttgcaccccaagggccgggagctggaccctgccgcgccgcccgagggccagctgctccgggaggtgcgcgcgctcggggtccccttcgtccctcgcaccagcgtggatgcatggctggtgcacagcgtggctgccgggagcgcggacgaggcccacgggctgctcggcgccgccgccgcctcgtccaccggaggagccggcgccagcgtggacggcggcagccaggctgtgcaggggggcggcggggacccccgagcggctcggagtggccccttggacgccggggaagaggagaaggcacccgcggaaccgacggctcaggtgccggacgctggcggatgtgcgagcgaggagaatggggtactaagagaaaagcacgaagctgtggatcatagttcccagcatgaggaaaatgaagaaagggtgtcagcccagaaggagaactcacttcagcagaatgatgatgatgaaaacaaaatagcagagaaacctgactgggaggcagaaaagaccactgaatctagaaatgagagacatctgaatgggacagatacttctttctctctggaagacttattccagttgctttcatcacagcctgaaaattcactggagggcatctcattgggagatattcctcttccaggcagtatcagtgatggcatgaattcttcagcacattatcatgtaaacttcagccaggctataagtcaggatgtgaatcttcatgaggccatcttgctttgtcccaacaatacatttagaagagatccaacagcaaggacttcacagtcacaagaaccatttctgcagttaaattctcataccaccaatcctgagcaaacccttcctggaactaatttgacaggatttctttcaccggttgacaatcatatgaggaatctaacaagccaagacctactgtatgaccttgacataaatatatttgatgagataaacttaatgtcattggccacagaagacaactttgatccaatcgatgtttctcagctttttgatgaaccagattctgattctggcctttctttagattcaagtcacaataatacctctgtcatcaagtctaattcctctcactctgtgtgtgatgaaggtgctataggttattgcactgaccatgaatctagttcccatcatgacttagaaggtgctgtaggtggctactacccagaacccagtaagctttgtcacttggatcaaagtgattctgatttccatggagatcttacatttcaacacgtatttcataaccacacttaccacttacagccaactgcaccagaatctacttctgaaccttttccgtggcctgggaagtcacagaagataaggagtagataccttgaagacacagatagaaacttgagccgtgatgaacagcgtgctaaagctttgcatatccctttttctgtagatgaaattgtcggcatgcctgttgattctttcaatagcatgttaagtagatattatctgacagacctacaagtctcacttatccgtgacatcagacgaagagggaaaaataaagttgctgcgcagaactgtcgtaaacgcaaattggacataattttgaatttagaagatgatgtatgtaacttgcaagcaaagaaggaaactcttaagagagagcaagcacaatgtaacaaagctattaacataatgaaacagaaactgcatgacctttatcatgatatttttagtagattaagagatgaccaaggtaggccagtcaatcccaaccactatgctctccagtgtacccatgatggaagtatcttgatagtacccaaagaactggtggcctcaggccacaaaaaggaaacccaaaagggaaagagaaagtgagaagaaactgaagatggactctattatgtgaagtagtaatgttcagaaactgattatttggatcagaaaccattgaaactgcttcaggaattgtatctttaagtactgctacttgaataactcagttaaggctctgttttgaagcttacatggacaaatgtttaggacttcaagatccacacttgtggggcaatctggggggagccacaactttttcatggaagtgcattgtattacaaaattccttagttattgttccaaaggattaggttaacatgaaaacccagtaaggctttccctcttgggcagccttcctttttaagagtaagttggttacttcaaaaagagcaaacactggggatcaaattattttaagaggtatttcagttttaaatgcaaaatagccttattttcatttagtttgttagcactatagtgagcttttcaaacactattttaatctttatatttaacttataaattttgctttctatggaaataaattttgtatttgtattaaaaaaaaaaaaa

SEQ ID NO: 11301 - DNA, 2016 bp, Homo sapiens
  SIMILAR (832)..(1464): 961254mologous to Homo sapiens BB1=malignant cell expression- enhanced gene/tumor progression-enhanced gene,accession number S82470,Smith-Waterman Score=1103.
atgaagcacctgaagcggtggtggtcggccggcggcggcctcctgcacctcaccctcctgctgagcttggcggggctccgcgtagacctagatctttacctgctgctgccgccgcccaccctgctgcaggacgagctgctgttcctgggcggcccggccagctccgcctacgcgctcagccccttctcggcctcgggagggtgggggcgcgcgggccacttgcaccccaagggccgggagctggaccctgccgcgccgcccgagggccagctgctccgggaggtgcgcgcgctcggggtccccttcgtccctcgcaccagcgtggatgcatggctggtgcacagcgtggctgccgggagcgcggacgaggcccacgggctgctcggcgccgccgccgcctcgtccaccggaggagccggcgccagcgtggacggcggcagccaggctgtgcaggggggcggcggggacccccgagcggctcggagtggccccttggacgccggggaagaggagaaggcacccgcggaaccgacggctcaggtgccggacgctggcggatgtgcgagcgaggagaatggggtactaagagaaaagcacgaagctgtggatcatagttcccagcatgaggaaaatgaagaaagggtgtcagcccagaaggagaactcacttcagcagaatgatgatgatgaaaacaaaatagcagagaaacctgactgggaggcagaaaagaccactgaatctagaaatgagggcatctcattgggagatattcctcttccaggcagtatcagtgatggcatgaattcttcagcacattatcatgtaaacttcagccaggctataagtcaggatgtgaatcttcatgaggccatcttgctttgtcccaacaatacatttagaagagatccaacagcaaggacttcacagtcacaagaaccatttctgcagttaaattctcataccaccaatcctgagcaaacccttcctggaactaatttgacaggatttctttcaccggttgacaatcatatgaggaatctaacaagccaagacctactgtatgaccttgacataaatatatttgatgagataaacttaatgtcattggccacagaagacaactttgataccaatcgatgtttctcacctttttgatgaaccagattctgattctggccttactttagattcaagtcacaataatacctctgacatcaagtctaattcctctcactctgtgtgtgatgaaggtgctataggttattgcactgaccatgaaatctagttcccatcatgacttagaaggtgctgtaggtggctactacccagaacccagtaagctttgtcacttggatcaaagtgattctgatttccatggagatcttacatttcaacacgtatttcataaccacacttaccacttacagccaactgcaccaggaatctacttctggaaccttttccgtgggcctgggggaaggtcacaggaaggattaagggagtaggataccttgaaagacacagatagaaacttgagccgtgatgaacagcgtgctaaagctttgcatatcccttttttctgtagatgaaattgtcggcatgcctgttgattctttcaatagcatgttaagtagatattatctgacagacctacaagtctcacttatccgtgacatcagacgaagagggaaaaataaagttgctgcgcagaactgtcgtaaacgcaaattggacataattttgaatttagaagatgatgtatgtaacttgcaagcaaagaaggaaactcttaagagagagcaagcacaatgtaacaaagctattaacataatgaaacagaaactgcatgacctttatcatgatatttttagtagattaagagatgaccaaggtaggccagtcaatcccaaccactatgctctccagtgtacccatgatggaagtatcttgatagtacccaaagaactggtggcctcaggccacaaaaaggaaacccaaaagggaaagagaaagtga

SEQ ID NO: 11302 - DNA, 255 bp, Homo sapiens
  SIMILAR (23)..(607): 301254mologous to Homo sapiens GAC-1,accession number AF317425,Smith-Waterman Score=202.
gagcctatgcacccaccatcaatggctttctcaaagtgtgtagtcacagggccacaccatttcatgtcggttctgaagacgtgaattcctgccctcaagcctgggagcgtgctagcccctccctaagatggtggacagcttacctcccccattccaggtcttcaaactcccatttcgagaacttcttgtgtttaattgctttccacctaacagtaaattcgctacttgcaaaaccacttggtcaatcaaatctcg

SEQ ID NO: 11303 - DNA, 2184 bp, Homo sapiens
  SIMILAR (645)..(1106): 981254mologous to Homo sapiens hnRNP G protein,accession number Z23064,Smith-Waterman Score=838.
atgaaggcagctcaccggctgaccttggagggaggccacctggattggcgggtgggccatgtgatcacaggggccttcagtgtggagggagggccagaagcagagctccatcgaagggggacatggctgcggaagctgcaaacagaagcaggccacctccactgtgtggctccccatgtctacgtccagcccggatctcgctctgcagctgcagacacaggcctcgctcatggctcacccccggctgtgtcctcctgcctgcagcatggagatggggtcgctggacgcagcaaacaagggcctcctcctggtgagaacagcgacgtggcgcaggactccagcgccgcccctcctggggaggatgaagggaacttcctcccgggtggaagagatgagctattgcaggtggatacagacttggcgcaggtccacacccaaggattggcaggacctgtgcacactacagactcggcacaggtccacacccaaggaatggcaggagctccgtacacgctggggtgtaagcgggatctgggagctgggacctgggacctgcgtctcaccaatagcatccaccaaggcaatggcactgcttccttgacagccttgcataagatcataactggttgtgctgctgtgtgtgagctggccctgggagagggcctgtggccaggaaaaatcaaccccactttgccaaagaggaaactgaggcacaacaagtctctggccaacagccagcaaggaatcgaatactgccaacatcctgtccctgctttccagtgtgaaagctgtcagaatcaaaatggagacacttgtcttaaacaaaacaaaacaaaaccccaaccaatagagctgggaacagccctgacggtattccccataaaaccatcacagaagacagcaaacaccacaatcgtctgtctcgttggaaaatccagaacatacccttcctccagagaagcttccgtggatgaaaagaggactcagtacattaagagcaggcggggctgccctgtaagcccacctggctgggagctttccccttctccacgctgggttgctgctggcagtgctggtcactgtgacggtcagcaagctctggacgccagggtcggagaaaaggctgagcgtgtgaggaactgtgccgccctgccacgagattttattgaccaagtggttttgcaagtagcgaatttactgttaggtggaaagcaattaaacacaagaagttctcgaaatgggagtttgaagacctggaatgggggagagagcctatctctggcagaagtagccaacgagctggacacggagaccctgcggaggctgaagcgggagtgtgggggcctgcagacgctgctccggaacagccaccaggtgttccaagttgtgaatgggagagttcacatccgcgactggcgagaggagacactgtggaagacaaagcaaccggaagcgaaacagagactgctctctgaagcctgcaaaacccgcctctgctggttcttcatgcatcaccctgatggctgcgctctgtccacggactgctgcccgtttgcccatgggcctgcggagctgcggccaccccggaccaccccgaggaagaagatttcatgagctgcatccttgccagccgaggccctggttggggaggccaaaccaaggaagagcttccccagcagtcgtcagtgctgtggtctctgctctggctgtgtttcagcccacctcctcccagctttctccacatcctcacagtgatgaaccgtatttcataaacatcacacgccagagaagccacagttactcggaagcccccagctgactgcctggcttgtttcagaatgcagccgcttgaaacgtgcgcagcatcttcatatcataaagattgtgcacggatccttacaatgtctcctgggggagagcggctgaggctgccttgcacaggcccttcccagggcgctgtccgacgcctgcccccccatgtccacatctgtgaaaaggatggggctcctcgagaagtaagaccgtatctgccagcgtttctcaccacactggagagcagctgctttggagcagggatcccccagattggtatttttaaaaaaggtgtcaggcttgctatgttgaggttgtttttagagttacagagaataaaaacactcataatttcctgaaaaaaaaaaaaaa

SEQ ID NO: 11304 - DNA, 483 bp, Homo sapiens
  SIMILAR (327)..(97): 671254mologous to Homo sapiens Human low density lipoprotein binding protein LBP-2,accession number W49041,Smith-Waterman Score= 282.
tgtattctgtttacaaagtttcattacatgaaactaaattatgtcattatgtatttttttgaggtcgaagaccccaatttgactgtactatgaagagttgttctttaaatgctttgtctgcagaggttttacatgatattcgtagattttcagagcaggccccaattttaactgaagtcctgtcaacacatcatttcttgtcatcaatagcagggattttccatcaatttcctgttcctgaaaagcactagcttgctcctcaaatcccacggttcggaaataattgacgacatccatcacggcccagtctgcaggatcaggtggtctcccattttccatggaattttttacaccgacagagccattttccttgttttccatgtcaacagatagcatgggaaggctgcagggttcctttacttcagcaactcacattctcaacgaaagcctcaaaaacctcgtggcgaattcctgcaggctctc

SEQ ID NO: 11305 - DNA, 669 bp, Homo sapiens
  SIMILAR (166)..(255): 1001254mologous to Oryctolagus cuniculus uricase (AA 1- 300),accession number X14522,Smith-Waterman Score=154.
atgactgaagtgctagaaaaagggatggtttgtgcaggggcagctcttggtgtgggttccatggaaaatgggagaccacctgatcctgcagactgggccgtgatggatgtcgtcaattatttccgaaccgtgggatttgaggagcaagctagtgcttttcaggaacagatagaagatatggaaatcagcctgccaaacattcactacttcaacatagacatgtccaaaatgggtctgatcaacaaggaagaggtaagaggttttccctgtatgactcttataaggacactggtcactagatttggggcccacctggataaccttaagacaagatcctcaagatccttaatgacatctgcaaagatcttttttccacgtaaggtcacatttgcaggttctgacagtgaaggcatggtctctgttttgagacccattcaacccaatacaccaagtaagagggtctcagtcagcaccactatccaagggcttacagaattccacataacgtcactcagaccaagggacaaagagaccctctttaaagtaaaggcaagctgtagaacatgtggatctggtaaccaagatgtagaaataagaatggtcccacttgctatcactcccagtgatctaccaaggaaatctgtgcttcccctaccccctgaactctaa

SEQ ID NO: 11306 - DNA, 1257 bp, Homo sapiens
  SIMILAR (430)..(1254): 991254mologous to Homo sapiens EF-1 alpha (aa 1- 463),accession number X03558,Smith-Waterman Score=1427.
atgggaaaggaaaagactcatatcaacattgtcgtcattggacacgtagattcaggcaagtccaccactactggccatctgatctataaatgcggtggcatcgacaaaagaaccattgaaaaatttgagaaggaggctgctgagatgggaaagggctccttcaagtatgcctgggtcttggataaactgaaagctgagcgtgaacgtggtatcaccattgatatctccttgtggaaatttgagaccagcaagtactatgtgactatcattgatgccccaggacacagggacttcatcaaaaacatgattacagggacatctcaggctgactgtgctgtcctgattgttgctgctggtgttggtgaatttgaagctggtatctccaagaatgggcagacccgagagcatgcccttctggcttacacactggtagcatttgtgccaatttctggttggaatggtgacaacatgctggagccaagtgctaacatgccttggttcaagggatggaaagtcacccgtaaggatggcaatgccagtggaaccacgctgcttgaggctctggactgcatcctaccaccaactcatccaactgacaagcccttgcgcctgcctctccaggatgtctacaaaattggtggtattggtactgttcctgttggccgagtggagactggtgttctcaaacccggtatggtggtcacctttgctccagtcaacgttacaacggaagtaaaatctgtcgaaatgcaccatgaagctttgagtgaagctcttcctggggacaatgtgggcttcaatgtcaagaatgtgtctgtcaaggatgttcgtcgtggcaacgtcgctggtgacagcaaaaatgacccaccaatggaagcagcgggcttcactgctcaggtgattatcctgaaccatccaggccaaataagcaccggctatgcccctgtattggattgccacacggctcacattgcatgcaagtttgctgagctgaaggaaaagattgatcgccgttctggtaaaaagctggaagatggccctaaattcttgaagtctggtgatgctgccattgttgatatggttcctggcaagcccatgtgtgttgagagcttctcagactatccacctttgggtcgctttgctgttcgtgatatgagacagacagttgcggtgggtgtcatcaaagcagtggacaagaaggctgctggagctggcaaggtcaccaagtctgcccagaaagctcagaaggctaaatga

SEQ ID NO: 11307 - DNA, 1793 bp, Homo sapiens
  SIMILAR (184)..(1176): 911254mologous to Homo sapiens Human secreted protein clone rb649_3 protein sequence SEQ ID NO:18,accession number Y94906,Smith -Waterman Score=1498.
acgggtttgccgccagaacacaggtgtcgtgaaaactacccctaaaagccaaaatgggaaaggaaaagactcatatcaacattgtcgtcattggacacgtagattcgggcaagtccaccactactggccatctgatctataaatgcggtggcatcgacaaaagaaccattgaaaaatttgagaaggaggctgctgagatgggaaagggctccttcaagtatgcctgggtcttggataaactgaaagctgagcgtgaacgtggtatcaccattgatatctccttgtggaaatttgagaccagcaagtactatgtgactatcattgatgccccaggacacagagactttatcaaaaacatgattacagggacatctcaggctgactgtgctgtcctgattgttgctgctggtgttggtgaatttgaagctggtatctccaagaatgggcagacccgagagcatgcccttctggcttacacactgggtgtgaaacaactaattgtcggtgttaacaaaatggattccactgagccaccctacagccagaagagatatgaggaaattgttaaggaagtcagcacttacattaagaaaattggctacaaccccgacacagtagcatttgtgccaatttctggttggaatggtgacaacatgctggagccaagtgctaacatgccttggttcaagggatggaaagtcacccgtaaggatggcaatgccagtggaaccacgctgcttgaggctctggactgcatcctaccaccaactcgtccaactgacaagcccttgcgcctgcctctccaggatgtctacaaaattggtggtattggtactgttcctgttggccgagtggagactggtgttctcaaacccggtatgtgtggtcactctttgctccagacaacgttacaacggaagtataatctgtcgaaatgcaccatgaagctttgagtgaagctcttcctggggacaatgtggggctttcaatgtcaagaatgtgtctgtcaaggatgttcgtcgtggcaacgttgctggtgacagcaaaaatgacccaccaatggaagcagctggcttcactgctcaggtgattatcctgaaccatccaggccaaataagcgccggctatgccccttgtattggattgccacacgggctcacattgcatgcaagttttgctgagctgaagaaaaagatttgatcgccgtttttggtaaaaagctggaagatcggccctaaaattctggaagtctggtgatgctgccattgttgatatggttccctggcaagccccatgtgtgttgagagcttctcagactatccacctttgggtccctttgctgttcatgatatgagacagacaggttgcggggggtgcgcatcaaaagcaggtggacaagaaaggctgctggagcctggcaaggtcaccaaagtctgcccagaaagctcagaaaggctaaatggattattatccctaaatacctggccaccccactctttatcaggtgtgggaagaacggtctcagaactggttgtttcaattggccatttaaagtttagctgttaaaagactggtttaatgataacaatggcatcgtaaaaacctttcaaaggaaagggagaatgttttgtgggccccttttgggtttatttttttggcgcggggccgttttaaagttattaagttttttaaaatcccgacttttttaatgggaaccaacttgaccaaaaaatttgtcacaaaaattttgggaacccattaaaaaagttaaatgagaaaaaaaaaaaaaaaaa

SEQ ID NO: 11308 - DNA, 955 bp, Homo sapiens
  SIMILAR (492)..(926): 871254mologous to Homo sapiens DAP-1 beta,accession number AB000276,Smith-Waterman Score=684.
atggccagcaacgttaccaacaagatggatcctcactccatgaactcccgtgtgttcattgggaatctcaacactcttgttgtcaagaaatcggatgtggaggcgatcttttccaagtatggcaaaattgcgggctgctctgttcataagggctttgccttcgttcaatatgataaggagaaaaatgcccgggctgctgtagcaggagaggatggcagaatgattgctagccaggttgtagatattaacctggctgcagagccaaaagtgaaccgaggaaacgcaggtgtgaaacgatcagcagcggagatgtacggctcctcttttgacttggactatggctttcaacgggattattatgatggaatgtacagtttcccagcacgtgtacctcctcctcctcccattgctctggctgtagtgccctcgaaacgtcaacgtctatcaggaaacacctcacgaaggggcaaaagtggcttcaattctaagagtggaaagcggggatcttccaagtctggaaagttgaaaggtgatgaccttcaggccattaagcaggagttgacccagataaaacagaaagtggattctctcctggaaaacctggaaaaaattgaaaaggaacagagcaaacaagaggtagaggtgaaaaatgctaagtcagaagaggagcagagcagtagctccatgaagaaagatgagactcatgtgaagatggagtctgaggggggtgcagaagactctgctgaggagggggacccactggatgatgatgttaatgaagatcagggggatgaccagctggagttgatcaaggatgatgaaaaagaggctgaggaaggagaggatgacagagacagcaccaatggccaggatgactcttaagcacatagtggggttgagaaatcttatcccattgtttctttacctaggagcttgtctaacaacaaatttttca

SEQ ID NO: 11309 - DNA, 3023 bp, Homo sapiens
  SIMILAR (26)..(430): 1001254mologous to Homo sapiens 30 kDa protein,accession number AF157321,Smith-Waterman Score=696.
atgaagcgtgcgcctgttattccaaaacatacgctcaatactcaaccggttgaagatacttcgttatcgacaccagctgccccgatggtggattcgttaattgcgcgcgtaggagtaatggctcgcggtaatgccattactttgcctgtatgtggtcgggatgtgaagtttactcttgaagtgctccggggtgatagtgttgagaagacctctcgggtatggtcaggtaatgaacgtgaccaggagctgcttactgaggacgcactggatgatctcatcccttcttttctactgactggtcaacagacaccggcgttcggtcgaagagtatctggtgtcatagaaattgccgatgggagtcgccgtcgtaaagctgctgcacttaccgaaagtgattatcgtgttctggttggcgagctggatgatgagcagatggctgcattatccagattgggtaacgattatcgcccaacaagtgcttatgaacgtgtgaactcttgttccaaactggaacaacactcaaccctatctcgggctattcttttgatttataagggattttgccgatttcggaaccaccatcaaacaggattttcgcctgctggggcaaaccagcgtggaccgcttgctgcaactctctcagggccaggcggtgaagggcaatcagctgttgcccgtctcactggtgaaaagaaaaaccaccctggcgcccaatacgcaaaccgcctctccccgcgcgttggccgattcattaatgcagctggcacgacaggtttcccgactggaaagcgggcacctttgaagagagtagtggctctccagccacccagtggagatctgagaatggtcagcctgcctcctcaagtgggtccctgccccctgaagagcctaattggagggcaccccccagaggggcagcctaacacctcacatggcgggaccccccctgagccgaagctttcagaggaatgtcagggcagcaacatttgctgttcagcaatattcgctgttctgcagcctctgctgccgatactcaggcaaacagggtctggagtggacctccagcatactccaacaggcctgcagtggaggatcctgactgttagaaggaaaactaacaaacagaaaggacatccacaccaaaaccccatctgtacgtcaccatcatcaaaaaccaaagtccaaaagcaaggcatgcaagccctaagttttggttattgtggtatgaatgttgggaattacacggaggccgaaaggcgcaaagaaaaaggggggccaagaagacgcgggcagaagaacatgaaaagaaacggaggcgcaaaggaagagacttcgaagaaacgaaccggaggaacaagaaatccgtacaagaaaaacgaggagtccacaaacgccggaccagcaaacgtacaagaaggggagaaacgagagactctgcgggatatcccaacccaccaaagaacccaccagagggggattttgccgatttcggaacccaccatcaaacaggattttcgcctgttggggcaaaccagcgtggaccgcttgctgcaactctctcagggccaggcgtatgttaatggagagaaatgcccgggctgctggtagcaggaagaggatgggcagaatggattgctgggccagggttttagatatttaacctggctgcagaagccaaaagtgaacccgagaaaaaagcaggtgtgaaacggatctgcaagcggagatgtacgggctcctcttttgacttgggactattgacttttcaacggggactattatgataggatgtacagttaccccagcacgtgtacctcctcctcctcctattgctcgggctgtagtgcccctcgaaacgtcagcgtgtatcaggaaacacttcacgaaggggcaaaagtggcttcaattctaagagtggacagcggggatcttccaagtctggaaagttgaaaggagatgacccttcaggccattaaggaaggagctgacgccagataaaacgaaaaagtggatttctcttcctgggaaaaacctgggaaaaaattgaaaaggaacagagcaaacaagcagtagagatgaagaaatgataaagtcagaaagaggagcagagcagccagctccggtgaaagaaagatgagacttaatgttgaagattggaagtcttgaaggggggtgcagatggactctgcctgaggagggggacctactggatgatgatgataatgaagatcggggggatgaccagctggagttgatcaaggatgatgaaaaagaaggctgaggaagaagaggatgacagagaccagcgccaatgggaggggatgactccttaagcacatagttggggtttagaaatcttatcccattatttcctttacctaggcgcttgtctaagattcaaatttttcaccagatcctctcccctagtatcttcagcacatgcttcacttgttctccccatccttgtccttcccatgttcattaattcatattggccccgcgcctaagtcccaattttcacttcctttgacgctcctacgtagttttgttaagtcttaccctgtaatttttgcttttaattttgatacctctttatgacttaacaataaaaaggatgtatggtttttatcaactgtctccaaaataatctcttgttatgcagggagtacagttcttttcattcatacataagttcagtagttgcttccctaactgcaaaggcaatctcatttagttgagtagctcttgaaagcagctttgagttagaagtatgtgtgttacaccctcacattagtgtgctgtgtggggcagttcaacacaaatgtaacaatgtatttttgtgaatgagagttggcatgtcaaatgcatcctctagaaaaataattagtgttatagtcttaagatttgttttctaaagttgatactgtgggttatttttgtgaacagcctgatgtttgggaccttttttcctcaaaataaacaagtccttattaccccaggaatttggagaaaaaaaaaaaaaa

SEQ ID NO: 11310 - DNA, 1480 bp, Homo sapiens
  SIMILAR (879)..(1334): 941254mologous to Homo sapiens DAP-1 alpha,accession number AB000277,Smith-Waterman Score=774.
  misc_feature (1)...(1480): n = a,t,c or g
tcgaagactgagcggttgtggccgcgttgccgacctccagcagcagtcggcattctctaacgcagaaacccgggagtaggagactcagaatcgaatctcttctccctccccttcttgtgagatttttttgatcttcagctacattttccggctttgtgagaaaccttaccatcaaacacgatcggccagcaacgttaccaacaagacagatcctcgctccatgaactccccgtgtattcattgggaatctcaacactcttgtggtcaagaaatctgatgtggaggcaatcttttcgaagtatggcaaaatttgtgggctgctctgttcataagggctttgccttatcgttcagtatgttaatgaagagaaatgcccgggctgctgtagcaggaagaggatggcagaatgattgctggccaggttttagatattaacctggctgcagagccaaaagtgaaccgaggaaaagcaggtgtgaaacgatctgcagcggagatgtacggggtcagtaacagaacacccttctccgtcccctctacttcagctcctcttttgacttggactatgactttcaacgggactattatgataggatgtacagttacccagcacgtgtacctcctcctcctcctattgctcgggctgtagtgccctcgaaacgtcagcgtgtatcaggaaacacttcacgaaggggcaaaaagtggcttcaattctaaggagtggaacagcggggtatcttccaagttctggaaaaggtgaaagggagatgaccttcagggccattaaggaagagctgaccccagataaaacaaaaagtggattctctccctggaaaacctggaaaaaattgaaaaggaacagagcaaacaagcagtagagatgaagaatgataagtcagaagaggagccagagcagcagctcccgtgaagaaagatgagactaaatttgaagatggagtctgaaggggggtgcagattgactctgcctgaggaaggggaccctactggattgatgatatgatgaataatgaagatccggggggaatgacccagctggaagttgatcaaaggatgatgaaaaaagaggctgaggaaaggagaggatgacagagactagcgccaatggcggaggatgactcttaaggcacatagtggggtttagaaatcttatccccaattatttctttaccttaggcgcttgtcctaagattcaaatttttcaccagattcctctcccctggtatccttcagcacatgctcactggttctccccatcccttgtccttccccatgttcattaattccatattgccccgnggcctaagtcccattttcactcctttgggaggctccctagtagttttggttaagtcttaccctgtaatttttgcttttaattttgatacttctttatgacttaacttattataaaggatgtatggtttttaaaaaaaaaaaaaaaaaaaaaagggcggccgct

SEQ ID NO: 11311 - DNA, 1137 bp, Homo sapiens
  SIMILAR (1)..(312): 811254mologous to Homo sapiens acidic ribosomal phosphoprotein (P1),accession number M17886,Smith-Waterman Score= 432.
atggacagagctggaccaggcaagtccacctacaggtccctggtaacaagcacaggccttgccaccttggaacaggtaggatgcattggcaaaaggactacaataaatccaaccatcctcgtgccccatctagtggcctatgggcgcatggcaggagacaaggacagtttccattccgtcggccaacttattctaaaggataaatttatcacccaatcagcagctgacattaggagaaaagtccaaaagcctgctttaggcacagaacaaaatttggagacattattaaacctggtaacctcggtgttctataacagggaccaagaggaacagaccaaaagggaaaagcaatcactggaaggtccactgccccagaggatgaaggacctctggacaagaagcgcccaaccagatgattcagcaacaggactgagggtgcccggggcaagcaccagctcatgccatcacccacacagagccccggggagggtcatattagtcaaagctggagctattatctacatgaatgtggggaacaaattacccatttgttgtcccctacttgaagaaggaatcaactctgaagtctggaacttggaaggacaatttggaagggcgaaaactccccatcccgttcaaatcaggctaaaagaccccatcgcttttccttatcaaaggcaatatcccttaaggcctgaagctcacaaaggattacaggatattgttagacatttaaaagctcaaggcttagtaagaagatgtagcagtccttgcaacacctcaatcctaggaatacaaaaaccaaatggtcagtggagactagtgcaagacctcagaatcatcaatgaggcaataattcctttatatcctgctgtacccaacccctatacactgctctctcagataccagaggaagcagaatggttcactgttctggacctcaaagatgccttcttctgcattcccctgcactctgactcccagttcctctttgcctttgaggatcctacagaccacacgtcccagcttatgtggatggtcttgccccaaggatttagagatagccctcatctgttcggtcaggcattggcccaagacctaggccaattctcaagtccaggcactctggtcctctaa

SEQ ID NO: 11312 - DNA, 645 bp, Homo sapiens
  SIMILAR (133)..(642): 871254mologous to Homo sapiens v-fos transformation effector protein,accession number M84711,Smith-Waterman Score=763.
atggcggttggcaagaacaagcgccttacgaaaggcggcaaaaagggagccaagaagaaagtggttgatccattttctaagaaagattggtatgatgtgaaagcacctgctatgttcagtataagaaatattggaaagacgctcgtcaccaggacccaaggaaccaaaattgcatctgatggtctcaagggtcgtgtgtttgaaacaatgattgaagctcacgttgatgtcaagactaccgatggttacttgcttcgtctgttctgtgttggttttactaaaaaacgcaacaatcagatacggaagacctcttatgctcagcaccaacaggtccgccaaatccggaagaagatgatcgaaatcatgacccgagaggtgcagacaaatgacttgaaagaagtggtcaataaattgattccagacagcattggaaaagacatagaaaaggcttgccagtctatttatcctctccatgatgtcttcgttagaaaagtaaaaatgctgaagaagcccaagtttgaattgggaaagctcatggagcttcatggtgaaggcagtagttctggaaaagccactggggacgagacaggtgctaaagttgaacgagctgatggatatgaaccaccagtccaagaatctgtttaa

SEQ ID NO: 11313 - DNA, 916 bp, Homo sapiens
  SIMILAR (236)..(532): 461254mologous to Homo sapiens acidic ribosomal phosphoprotein (P1),accession number M17886,Smith-Waterman Score= 147.
atggcggttggcaagaacaagcgccttacgaaaggcggcaaaaagggagccaagaagaaagtggttgatccatttcctaggcaaagattggtattgacgtcgaaagcaccctcttatgttccattataagaattattggaaagacggctcgtcacccaggaccccaaggaacccaaaattgcaatctgatggtctccaagggttcgtgtgtttgaaagtgagtcctgctgaattgccagaatgattgaagttgcatctaggaaattccaggctgatactgaaagatgtttcaggggtaaaaacttgccctgacttaacttcccatggggcatgggatctttacccgtgacaaaattgttgttccatggtccaaaaaatgggcagaccaatgattgaagcctcacgttgaatgttcaagacttaccgattggttacttgctttcgtctgttctgtgttgggttttacctaaaaaaccgcaacatatcagatcacggaagaccctcttatgcttcagccacccaaccaggtcccgcccaaatcccggaaggaagatgatggaaatacatgacccgcagaggttgcagaccaatggccttgaaggaagtggccaattaattggtttccggaccaccatttggaaaggacataggaaagggcttcccaatctattattcctctcccagaggtttttcgttagaaaagtaaaaatgctgaagaagcccaagtttgaattgggaaagctcatggagcttcatggtgaaggcagtagttctggaaaagccactggggacgagacaggtgctaaagttgaacgagctgatggatatggaccaccagtccaagaatctgttggaaagttcagacttcaaatagtggcaaataaaaagtgctacctgtgaaaaaaaaaaaaaaaaa

SEQ ID NO: 11314 - DNA, 666 bp, Homo sapiens
  SIMILAR (120)..(494): 421254mologous to Rattus rattus ribosomal protein L35 (AA 1- 123),accession number X51705,Smith-Waterman Score=170.
atggcctttaccctgtactcactgctgcaggcagccctgctctgcgtcaacgccatcgcagtgctgcacgaggagcgattcctcaagaacagtgagtgggaccgcggggcgcgggctggggcggcggcggagtccccgggggcgcgtaacctaatggggccgcgtgaggggacaccaagggccgggacagaagaacagcggaaggctcggcttggagtggaagccgagcctttcctctcatcaggtttgggctcaacagccgggagaatattcaacagacacccgctgtgcagggcccagggggttggggtggagggatatagaagtcagtcagggacgcctctgcttgcgattacttcaggtgaagctgagcttgttcttcagtggtttgaaattcttcagttcttcagtatctgtagccttcaatataaacttcaacactctcatgtgatttacaagcctaccataagggtactctgtgaagttcaggaagtgattactttgcatacttgctctgaaataacatctaaaattcaacgtgttctaactcagccttttattaatgctgtgaaagataaagccagatactacttaaactgcttgcagacggcatattgcgggaccttgtgtgagttaatatcctataaacgacaaaggattggttga

SEQ ID NO: 11315 - DNA, 662 bp, Homo sapiens
  SIMILAR (226)..(396): 801254mologous to Homo sapiens HSPC039 protein,accession number AF125100,Smith-Waterman Score=182.
cccacgcgtccgcccacgcgtccggctgggattgcaggcataagctaccatgctgggcctgaacataatttcaagaaaatggttttataaatcctccgagaaatcgcttggacttcggggcggcctcggacggccattggcatttaccctgtactcactgctgcaggcagccctgctctgcgtcaacgccatcgcagtgctgcacgaaggagacgaatttcctcaaagaacatatgtgctgggggaacaagaaccataggaattggttggatttgggagaaagagccgggaattaaatcacagctaatgaaccttattcgatctgtaagaaccgagatgagagtgccattgataatagtaaactcaattgcaattgtgttacttttattatttggatgaatattcagtggagaaaatggagactcagaagaggacatgccagtaagaagttattactttggtcattattggaatattcatagcttagcctggctgaccttgcacttgttcaaaaatgtaaagctgaaaataaaaccagggtttctatttatctgttttttttttttaatgttgcacttgtagtttcattacaaaagatcagatcatgaaaggcagtaactctccaggactggaatatctgattgctcagtgttaatagtagt

SEQ ID NO: 11316 - DNA, 900 bp, Homo sapiens
  SIMILAR (72)..(362): 1001254mologous to Mus musculus voltage dependent anion channel 3,accession number U30839,Smith-Waterman Score=530.
caggtttgtactacagaaagtgccagttaatttccaaggaagatgttactcatgatacgaggcttttctgtttgatgctgccaccaagcactcatcttcaagtgcccattgcgaacatgtttacctcaagctacctattacaggtacagaaatagtaaagccatatacacctgtatctggttccttactctcagagttcaaggaaccagttcttcccaacaataaatacatctactttttgataaaaatctatcccactggactcttcacaccagagcttgatcgtcttcagattggagattttgtttctgtaagcagtcctgagggcaattttaaaatatccaagttccaagaattagaagatctctttttgttggcagctggaacaggcttcacaccaatggttaaaatactgaattatgctttgactgatatacccagtctcaggaaagtgaagctgatgttcttcaataaaacagaagatgatataatttggagaagccaattggagaaattagcatttaaagataaaagactggatgttgaatttgttctctcagcacctatttctgaatggaatggcaaacagggacatatttcaccagctcttctttctgaattttggaaaaggaatttggacaaatccaaagttctcgtctgcatttgtggaccagtgccatttacagaacaaggagtaaggttgctgcatgatctcaacttttccaaaaatgagatccatagttttacagcataatgaagagctgtcattgtcctttattcaactagtttatctaaatttgtgattgcttagggttttttaagagaacatttttgtacataacaaaaggttaactagaatccagccttcagtttcttaaatgaaatcaaatgttccttcag

SEQ ID NO: 11317 - DNA, 1788 bp, Homo sapiens
  SIMILAR (2)..(169): 921254mologous to Mus musculus voltage dependent anion channel 3,accession number U30839,Smith-Waterman Score=280.
ggtacaattattggtggaggctgcgatgaagttttgctggttactaggaccccaggtaggtggtgtggcatgggtggtgacggtggcagtcgcaggatgacctctgggtcccaggtggtacacgcttatgttggtggaggctgttatgggctgcgcaggccagtctctaaccctgcagatggcatgtgcaaggaggtgctagctgtggtgatagcagccaggttggttcatcgttgggtcaattatgaatccatgctgaaagaatgcctggttggcagaatggccattaaacctgctgttctgaaaggtacagaaatagtaaagccatatacacctgtatctggttccttactctcagagttcaaggaaccagttcttcccaacaataaatacatctactttttgataaaaatctatcccactggactcttcacaccagagcttgatcgtcttcagattggtcaccaacagcaaagaccaaaggtagataaatccacgaagttgaggaaaaacctatgcaaaaaggctgaaaatgccaacaaccagaatgcctcttctcctccaaaggatcacaactcctcactagcaagggaacataactggatggataatgaatttgacaaattgacagaagtaggcttcagaagaactgatgacaaaaaccacgtgatgatctcaatagatgcagaaaaggccttcaataaaattcaacaccccttcatgctaaaaacactcaaactaggtattgatggaacatatcttaaagtaataagagcagtttatgacaaacccacatctgatatcatgctgaatgggcaaaagctggaagcattccctttgaaaactggcacaagacaaggatatcccctctcaccactcctattcaacatagtattgcaagttctggccagggcagtcagactggatgttgaatttgttctctcagcacctatttctgaatggaatggcaaacagggacatatttcaccagctcttctttctgaatttttgaaaagaaatttggacaaatccaaagttctcgtctgcatttgtggaccagtgccatttacagaacaaggagtaagctggaaaaatgaggaacattctgccttgaatggttcttcccctggttggctgctttctccacaactggtggttcagcaggaagccctcttaggttcttgcatgtgggcaacttattttctcttcctgctgctttgtgcaactgtcaaatactttcacagattcagatcagcaaagggtatcaaggatagtcattccaattccaccatcatcattattcacaaagacaggaatctagctgtcctggactggtactgttccctggtagccactccggccatggctgaaaggggccaacatgaagctcaggccatggcttcagagggtgaaagccttaagccttggcaacttccatgtgatgttgagcatgtgggtgcacagaagtcaagaaatggggtttgggaacctctgtctagatttcagaagatgtatggaaatgcctggatgcccaggcagaagtttgctgcaggggcggggctctcatggagaacctcggctagggcagtgcagaagggaaatgtggggttggagccccctcacagagtccctactgggacaccgcctagtggagctgtgagaagaggaccactgtcctccagaccccagaatggtagatcgacttacagcttgtaccaggtgcctggaaaagctgcagatactcaacaccagcccatgaaagcagccaggatggaggctgtaccctga

SEQ ID NO: 11318 - DNA, 369 bp, Homo sapiens
  SIMILAR (369)..(301): 951254mologous to Homo sapiens Human secreted protein, SEQ ID NO: 6699,accession number G02618,Smith-Waterman Score=118.
tcagagaataagtctttgattgataatttttctatttatttctgccaaggcgactgaaaacacgaaagccttttcatcagacaggttagcatagatgtcaatttccttttcctgtttctctttttcaaaggataaaccaaaggcgcgctcctccagtggccgggacacagcaagaaggggcttggccgtctggccgccgccaggtggacgctggcgggccacggccccgggcttttcccgggaaacccctcggtgcagcccgaccggccccggatccccgccgccgccggcgggccccaggatctgttggtcgcactcggggcatgatttggtggccatcttcactttcttggctcgagttgcagacat

SEQ ID NO: 11319 - DNA, 728 bp, Homo sapiens
  SIMILAR (616)..(440): 1001254mologous to Homo sapiens Human secreted protein, SEQ ID NO: 6699,accession number G02618,Smith-Waterman Score=319.
gcacaggctaaacgacaggcgagaaagaaacaatcgatggcccttattgatgcagtcagaatgctcctgagagtccataactgtttgagaatttgctgatgttatcctgacagaagtttcagcagattttgcaaacaagtatcagagaataagtctttgattgataatttttctatttatttctgccaaggcgactgaaaacacgaaaagcccttttccatccagaccaggttaagcatagatgtcaatttccttttccctgtttcctctctttcttcctcatggttttttggcagatgcacttataggtcttcctcttcctcgtctgatatgatctgaatggctgttacttcgagacctctttctgttttctaaatctttatctactgtagaatttatcttctctctcctaactctctctggttggcttcttcttggcctcatgcttgttttctgtagaaggtggtgatttctctgagtgttttgcatttaaaagttttctgctaataaatatgtaaccacaaggacatgatttacatgcaacaggaacctgttggtcgcactcggggcatgatttggtggccatcttcactttcttggctcgagttgcagacatgctcctctcccttagcggcggcagcagcgacggctcgggctcctcccctcacacttcggcagcccggcaaagccggcccagtaaccggacgcatcgtgtccaggaatcacgt

SEQ ID NO: 11320 - DNA, 1816 bp, Homo sapiens
  SIMILAR (811)..(1227): 771254mologous to Rattus norvegicus mitochondrial voltage dependent anion channel,accession number AB039664,Smith-Waterman Score=509.
  misc_feature (1)...(1816): n = a,t,c or g
tttttttttattttttgtgacacagtgtctagctctgtcactcaggctggagtggagtggagtgatcttggctcactgcaacctctgctggttaccatttaaataaagtaggaaaaaatgttgaccttttttctttgaggaggtgatgggagatgcaggatgaagtctgaaattgataatgttacggctaaaattgaaagggagattctcttaaaagggggctaaatctaactgatgactatcttctgtaagaaggctttaaaaggatttctaaacagattgggggaagagcgactgaaaataaggggagtgattaccaagtttgaatatgttaatcattaaattgatatgccaaaatgcaaaagcatttaatataaatcaactataaacgattatgacttaacactagaaaaattaagaatttaaatatatttcacaaacttcaccagaacaaaaaacttttatcacactatttaatctacttagtttcaatattaaggtttattttttcttccagaattgaaagtaacaatttaaataattatcaggatatagaaacaaatatccattcagataaaacattactgcttaaaagtggctaagaaatattttgcatgtaataaatatatttcatgtttaggttaacaggcaccatcttgagagcagtttgtttttttttttttagctaataaataaattacattcaagaaaacaaggggtttatatctgagtatatcattaaatgtttttcttcatatagcacccaaacttcaaactgtctaggaaagtatctcctaaaatataactcataccttaagtaataaaaataaaggcccagaaaaacaaatcaattgaagacaaaatgtacagtttatattcttaattccccattcaataaaatatcgattgccaatttaataaaagtgaatgaactgtatatatgcaatctgttagcactgaaaatctgaaatatatatttttaaaaatcactctttctgacagtatttaaaatattgcatctctggtggacaaacctgaaaacaattaagcatcttattaccctagttttccataccctaccccccataccccaatccactttttatcctttaacatccatccagcatttttgttggtttttttttgttgttggcaaatacacttacttatatcccaaacacaaaacactgacaatactccttggtaaacaaggaaatcccagaacagtccaagcctacacagctttgctcccgaagtgtggcacaggctaaacgacaggcgagaaagaaacaatcgatggcccttattgatgcagtcagaatgctcctgagagtccataactgtttgagaatttgctgatgttatcctgacagaagtttcagcagattttgcaaacaagtatcagagaataagtctttgattgataatttttctatttatttctgccaaggcgactgaaaacacgaaagccttttcatcagacaggttagcatagatgtcaatttccttttcctgtttctctgtagaaggtggtgatttctctgagtgttttgcatttaaaagttttctgctaataaatatgtaaccacaaggacatgatttacatgcaacaggaacctgttggtcgcactcggggcatgatttggtggccatcttcactttcttggctcgagttgcagacatgctcctctcccttagcggcggcagcagcgacggctcgggctcctcccctcacacttcggcagcccggcctccgcccgcccagtcnccggaattccacaacgtgatctatggtctcgatttcccnnaccctcct

SEQ ID NO: 11321 - DNA, 780 bp, Homo sapiens
  SIMILAR (157)..(444): 521254mologous to Homo sapiens hypothetical protein,accession number AJ272204,Smith-Waterman Score=246.
atgacctcaggtcctcagaccaaccagcccaagaaacatctcaccaatttcaaatccgcctcagtgttcccatctgtaaagggggcctttctcatcaagctggccatgaaggttgatggagtcggttctcatgaagcccctagctggtgccgcatcctcgccagccagcgctcgactaaaatccacggagtcgggtttgtgaaaatccatgccccctggaacgtgctgtgcagagaggccgagtttctgaaactgaagatgccgacgaagaagatgtaccacattaatgagacccgtggcctcctgaaaaaaatcaactctgtgctccagaaaatcacagatcccatccagcccaaagtggctgagcacaggccccagaccatgaagagactctcctatcccttctcccgggagaagcagcatctccagcaaagccatgacacttgccccctgccttttggggaaagggcagaagagatcatcgacaaagaaatgatggcaaacaagaagatgaagaagctcatccgctacctgaagctgaagcagcagagcccccctgaccacgaggagtgtgtgaagaggaaacagcggtacgaggtggattacaacctggagcccttcgcgggcctcaccccagagtacatggaaatgaggacttcaacccccaatggattcggccttggccgcctgctagctgtgtttccatcaccccccaagtactcggagccagccgtggtcatgttacaaatgaccctgccctcgtccagcccaacagcttga

SEQ ID NO: 11322 - DNA, 707 bp, Homo sapiens
  SIMILAR (1249)..(1530): 1001254mologous to Cloning vector pZC320 SopA,accession number U26464,Smith-Waterman Score=485.
tcccaaccccaagtgtcgctgagtctttccagtcttccttttctacagacccatctgacctttcccctcctccccagcctgctcatcgccaggccgagctaagtcccaattcttcctcagcctccactcctccaccctataatcctcctaccacctcccctcctcacacccggtccggcttacagtttagttccgcaactagctcttccccacctgcccaacaatttcctcttagagaggtggctggagctgaaggcatagtcaacgcacatgtacctttttctctatcagacctctctcagatcagtcagcatttaggctctttctcatcagaccccactaaatatatacaggaattccgatatctaactctgtcctacaacttaacctggagtgacctaaatgtcatcctgacttctaccctctccccagatgaacgggaaagagtttttcctgtatcccaatctcacgctgataaccgtcggcttcatgagccagacctccaggaaggcattagagcagttccccgagaggatcccccagtggaactaccaggcaaattccccaggaaaaaacttcaaaaattagaatctggccctcaaaccccacaacaggaattaatcaaccttgccttcaacgtgtacaataatagagaggaagcagccagacggcaatgcatttctgagttacaattacttgcctccact

SEQ ID NO: 11323 - DNA, 339 bp, Homo sapiens
  SIMILAR (22)..(225): 341254mologous to Acanthokara kaputensis ultrabithorax,accession number AF011282,Smith-Waterman Score=84.
actgctcctcttcaggtcgctccccgccaagctaaatcaggctccgattcttccttggcctctgctcctccaccctataatccttctatcacctcccctgtgcacacctggttcagcttacagtttcattctgagactagccctcccccacctgcccaacaatttcctcttagagcggtggctggaactgaaggcatagtcaggatgaatgggaaagagttttttctccagcccaatctcacgctgataactgccggcttcaagagccagacctccaggaaggcattagagcagttccccgagaggatccccaatggaactatcaggcagattccccag

SEQ ID NO: 11324 - DNA, 996 bp, Homo sapiens
  SIMILAR (43)..(540): 951254mologous to unidentified cloning vector 29kD protein essential for the replication of mini F plasmid,accession number AB015619,Smith-Waterman Score=843.
atggggatgactgtggaggtcagagtcagagagatgtgtgaagatgttacagagctgcctttgaagacggaagaggaccatcagccaaggaatcccaggtcggcccagcgctgggcgcagcgcctggcaatgcgggcccgcgggatccgaggacacgatgaacgggaaagagttttttctctagcccaatctcacgctgataaccgccggcttcatgaacttgacctccaggaaggcagtagagcagttccccgagaggacccccaatggaactatcaggcagattccccaggtacagctaggcgagattacatgatttcctgcctagttgaagggcttaaaaaggcagcttacaaagctggtaattctgacaaacttagagaaactacccgaggtaaagacgaaaacccagcccaggtcatggcccgcttggcagcgacccttacacgctttaccgccctagacccagaggggccagaaggccgccttattcttaatatgcattttatcacccaatccactcctgacattaggaaaaaacttcaaaaattagaatctggccctcaaaccccacaacaggaattcatcaacctcgccttcaaggtgtacagtaatagagaggaagcagccagacggcaacgcatgtctgagttacaattacttgcctctgctgtgagacaaaacccagccacacctccagcacacaagaacttcaaaatgcctaagccgcacacacctaagccgcagcagtcaagcattcctacaagacttcctccatcaggatcttgcttcaagtgccagaaatccggccactgggccaaggaatgcccgcagcccaggatttctcccaagccatgtcccatctgtggaaggacccactggaaggcagactgcccagctcgcccggcagccactcctagagcccctaaagctctagcccaaggctgtctgactgactccttctcagatctgctcggcttagcgactgaagattga

SEQ ID NO: 11325 - DNA, 1962 bp, Homo sapiens
  SIMILAR (915)..(1): 451254mologous to Homo sapiens HSPC169,accession number AF161518,Smith-Waterman Score=467.
agacaaaggagacacgttttatccatggacccaaaactccggcaccggtcacggactgggaaggcagccttcccttggtgtttaatcattgcagggatgcctctctgattatacactcacgtttcaagggtgtcagaccacacagggacacctgccttggtccttcacccttagcggcaagtcccgcttttctggggaagggacaagctgctcattgccaggccgagctaagtcccaattcttcctcagcctccactcctccaccctataatccttctatcacctcccctcctcacacccggtccggcttacagtttagttccgcgactagctcttccccacctgcccaacaatttcctcttagagaggtggctggagctgaaggcatagtcagggtacatgtacctttttctctatcagacctttctcagatcagtcaatgtttaggctctttctcatcagaccccactaaatatacacaggaattccaatgtctaactctgtcctacaacttaacctggagtgacttaaatgtcatcctgacttctaccctctccccagatgaatgggaaagagtttcttctctagcccaatctcatgctgataaccgccggcttcacgagccagacctccaggaaggcattagagcagttccccgagaggatccccaatggaaccatcaggcaaattccccaggtatagctaggcgagattacatggtttcctgcctagttgaagggcttaaaaaagcagcttacaaagctgttaattatgacaaacttaaagaaactacccaaggtgaagatgaaaacccagcccaggtcgtggcccgcttagcagcaacccttagacgctttaccgccctagacccagaggggccagaaggccgccttattctcaatatgcattttatcacccagtcagctcctgacattacaaaaaaacttcaaaaattagaatctggccctcaaaccccacaacaggaattaatcaacctcaccttcaaggtgcacaataatggagaggagactgacgctgcccgatcgccttggaagccccctggaccatcacggacaccgagcttcagggcctgtttcccttgcccccataacttttgtgggtattgacggccaagcttcaaaacaccttaaagctcccctactttggtgccaacttggacaaccttcttttaagcactcttttttagttatccccacctgcccagttcctttattaggccgagacattttaaccaaattatctgcttccctgactattcctggactacagccacatctcattgccactcttcttcccaacccaaagcttcctttgcgtcttcctcttgtatccccctaccttgacccacaagtatgggacatctttactccctccctggcaaccgatcacatgcccattaccatcccattaaaacctaatcacccttaccctgctcaacgccagtatcccatcccacagcacgctttaaagggattaaagcctgttatcactcgcctgttacagcatgggcttctaaaacctataaactctccttacaattcccccatttcacctgtccaaaaacctcacaagtcttacagattagttgaggatctgtgccttatcaaccaaattgttttgcttatctaccctgtggtgcccaacccatacactcttttgtcctcaatacattcctccacaactcactattccattcttgatcttaaagatgcttttttcactattctcctgtacccctcatcccagcctctctttgctttcacttggactgaccctgacacccatcagtcccagcagcttacctgggctgtgctgccgcagggtttcagggacagctctcattacttcagtcaagcccaaacttcgtcttcatctgttacctatcttggcataattcttaatgaaaacaatgtgctctccctgctgatcgtgtccagctaa

SEQ ID NO: 11326 - DNA, 1350 bp, Homo sapiens
  SIMILAR (2491)..(2928): 981254mologous to Shigella dysenteriae RepE,accession number AF239690,Smith-Waterman Score=760.
ctaggtaatgaccacatccacgacgtcatcgtcacagcccatgcattcgttataatctttttcatagtaatacccatcataatcggaggggccgccacagcagaaggcgtagaagggagatgcattcatcttctgcagctgcgtagaaatctccgtgagtttagcggcttgagaacgcagacgtgtacttatatctggaatgagcggctggggccggatgcccatgggccgggtgtggagggaatatggcccggtgacgctggtgacgctgcgcctgtcaggctcctcgggtttgacagggaggagcgggcttgaaggagccccctttgctccagccgggacctggcccaactccaggggcaggggtctgcggggcgccagaaatcgcctggcagcattgcgtatctggggctcacagatgaccagaggcccagtgtccacgctcaggagcacccagtggggcttctctgtgacagaccaggtgtccgcagaatccacagactccacagaccagtgtccccaagtcacagccctgggtgtgggagagttgtcaccaaacccaggaacagagctgtccagcaggggccgactcaggccgggagggtgacgctgagccccaaggaggggcgtcggggaagcgcccactcgcccactctcccgctcgcccttgggggttctgtggggcttggcctctcctacttgaaggccagacccgacttccaggctcagggcacgatgcactgagttgtgggaccgcactgatgaggatgaggacagggacctgtgcctgggggctctggctcgatggtccccccgggcagcagaggctcgggtaccaaggaacatgtggccagtggtggaacggctggatccccggatcttggctctgacctgagcgaagctctcagtcctggaattggctgtgaatccaggttctccatcgggcagcatttgtgcagctgggcccttcccggcatcaaccaccaggcccgagtgtggggcccgagttgctggctgccctgagtgccctggtccctggggcccccatgggagatcaaggggctcaggagagggcatgggactcaggaggtcccggggcagctcccccttcaggcagatcagggctgcttttcgcttcacatattgggcctcgtttatcccagtgcatgtccactccccactgtggacctcagcgtgtgcctgcagggaacgccccttggtgtaatcacctaatgatgtgatacaaccatctagcgggcagtccatttcccattcttgtccactgtcccagtaatgttccttcccacccaagggtgcagtgcaggagcacgcgtggaatttaaccgtcat

SEQ ID NO: 11327 - DNA, 1555 bp, Homo sapiens
  SIMILAR (1)..(432): 1001254mologous to Cloning vector pZC320 SopA,accession number U26464,Smith-Waterman Score=733.
atgttcgccgaccgttgactattctctacaacccaccagagtcatcgtaccactatacctatttattcggcgcatgagctggcgtcctcgccacagcctctaagcctccttattcgagccgagctgggccagccaggcaaccttctaggtaacgaccacatctacaacgttatcgtcacagcccatgcatttgtaataatcttcttcatagtaatacccatcataatcggaggctttggcaactgactagttcccctaataatcggtgcccccgatatggcgtttccccgcataaacaacataagcttctgactcttacctccctctctcctactcctgctcgcatcgtgctatagtggaaggccggagcaggaacaaggttgaacaagtcgtaccctccctttagcagggaactactcccacccttggaagcctccggtagacctaaccatcttctccttacacctagcaggtgtctcctctatcttaggggccatcaatttcatcacaacaattatcaatataaaaccccctgccataacccaataccaaacgcccctcttcgtctgatccgtcctaatcacagcagtcctacttctcctatctctcccagtcctagctgctggcatcactatactactaacagaccgcaacctcaacaccaccttcttcgaccccgccggaggaggagaccccattctataccaacacctattctgatttttcggtcaccctgaagtttatattcttatcctaccaggcttcggaataatctcccatattgttaacttactactccggaaaaaaagaaccatttggatacataggtatggtctgagctatgatatcaattggcttcctagggtttatcgtgtgagcacaccatatatttacagtaggaatagacgtagacacacgagcatatttcacctccgctaccataatcatcgctatccccaccggcgtcaaagtatttagctgactcgccacactccacggaagcaatatgaaatgatctgctgcagtgctctgagccctaggattcatctttcttttcaccgtaggtggcctgactggcattgtattagcaaactcatcactagacatcgtactacacgacacgtactacgttgtagctcacttccactatgtcctatcaataggagctgtatttgccatcataggaggcttcattcactgatttcccctattctcaggctacaccctagaccaaacctacgccaaaatccatttcgctatcatattcatcggcgtaaatctaactttcttcccacaacactttctcggcctatccggaatgccccgacgttactcggactaccccgatgcatacaccacatgaaatatcctatcatctgtaggctcattcatttctctaacagcagtaatattaataattttcatgatttgagaagccttcgcttcgaagcgaaaagtcctaatagtagaagaaccctccataaacctggagtgactatatggatgccccccaccctaccacacattcgaagaacccgtatacataaaatctaga

SEQ ID NO: 11328 - DNA, 1290 bp, Homo sapiens
  SIMILAR (952)..(1296): 1001254mologous to Plasmid F Protein D,accession number M12987,Smith-Waterman Score=584.
atgcatctgaaccagctgcctcccatcctcagcaggctgggtgcagtcggcttcttcggaagcatgaaggctcacctggtgtccgtctctcggcaggtcaggaacatccgcaaggtcctcaggaagatcgaaaagccctttggcctctaccccaacttcctcagcccagtgagtgggaactgggtgcaactacccattccaggttcggtggctgctggcgagatgcccgcttcctacccgtacaggcaccgggcccctgaggtcaggcgggtgtgcgaggccctgccccaccatgtctcagttggaggactcggggacagtttttatgaatatttgatcaaatcctggttgatgtcgggcaagacagatatggaggctaaaaatatgtactacgaagccttggaggcgatagagacctacttgctgaatgtctctcccggggggctgacctacattgccgagtggcgaggggggattctggaccacaagatggggcacctggcctgtttctccgggggcatgatcgcccttggcgccgaggatgccaaggaagaaaagagggcccactaccgagagctcgcagcccagatcaccaagacgtgtcacgagtcatacgcccgctcagacaccaaacttgggcctgaggccttctggtttaactccggcagagaggccgtggccacccagctgagcgagagctactacatcctccggccagaggtggtggagagctacatgtacctgtggcgacagacccacaaccccatctacagggagtggggctgggaggtggtgctggccttggagaaatactgtcggacagaagccggtttctctgggatccaagacgtgtacagtagcacccccaaccacgacaacaagcagcagagcttctttctagcggagacactaaacagatgcttggtgagtgcctgcaacggaccagacactgggctagaggccagggacaccgctgagagtgagacagtcataagccctgcagtcaaggggtcaagaggggagaaagcgatggtaagggaaactgacaaaccagccaaatgcattgggaagaaaagcaaaaatggaaaatctgatttaaaggcagcatccaagatggatgctcagttccgttccctctgctttgaggaggtgaccccactgtggtttgagaaagtgctagagatgaatgggccagcttcccccagcgtttcccctgggggcctgtccttggaagtatggtcattggtcatgtggcacaaagatgctcggccctctgtgactaatgcttaa

SEQ ID NO: 11329 - DNA, 584 bp, Homo sapiens; identical to SEQ ID NO: 10266
  SIMILAR (142)..(600): 961254mologous to Shigella dysenteriae RepE,accession number AF239690,Smith-Waterman Score=782.

SEQ ID NO: 11330 - DNA, 663 bp, Homo sapiens
  SIMILAR (645)..(268): 761254mologous to Homo sapiens selenoprotein N,accession number AF166125,Smith-Waterman Score=440.
cgatactaagcatatcaaaattgagaacaagtctggctggggaaggctcagtggacacgcccaaggcaagtggggtaactcggcacataaaaggcccaggagtggctgcagagatgtctgccttcattcttcctctgccaggctgagtgagccccgggtgggagtgggcggcatctgcagtcttaaatgggctgaggaccactctggctctgaggcgtggggtctgtttaataagatcccgtccaggcactctagggctggaggatggggcaagcccacggacggagtccctccatacaggaactgcatgtaagggggccgtggacgggtcttcagaggtggatgagaagctgaagagaattgctctcgatttcctcgggcttcacggaggtgatgatccaagaagtagttggcattgatgtgatggaccacggtgccattgggcaggcagatcatcatctccacggggaagctgtacttctccaggtgcaggccagccagcttctggtgggacgagttctcctggttgttctgcagttcctccagctccttcaccagggaccaggtgctgatgaagctctcgttgagcagggtgaggatgggcgaactttccaggacagtctcccggagagtccgccctgaaccgtgcttgtactgactcat

SEQ ID NO: 11331 - DNA, 1242 bp, Homo sapiens
  SIMILAR (1069)..(1239): 981254mologous to Homo sapiens selenoprotein N,accession number AF166125,Smith-Waterman Score=288.
atgcccgcttcctacccgtacaggcaccgggcccctgaggtcaggcgggtgtgcgaggccctgccccaccatgtctcagttggaggactcggggacagtttttatgaatatttgatcaaatcctggttgatgtcgggcaagacagatatggaggctaaaaatatgtactacgaagccttggagttcccctccgccctccgccttccccgactggtccatgcccatgtcccccctgctgccgaaggccaggagctgggtgagccctggtggatcatccccagtgagctgagcatgttcactggctacctgtccaacaaccgcttctatccaccgccgcccaagggcaaggaggtgttccgaataaaggccatcaggctgggagagaagctcctgccggcgttcaacacccccacgggaatcccaaagggcgtggtgagcttcaaaagcaggagtacaggacatcgggagcacggtgcagcaggagcacagggcaatgggagcacaatgcagcaggagcacaaggtgatgggagcacggtgcagtaggagcacagagcagtcttcccagaccacaaagccctctgtggtcactcctttcaccaaagcactaaagcaccctggtgagtacaagtatgtggtcgagagcctcaccctcagaagagagggcacagggagcctgggggcccccctccgccccacttgcctcacccggcccttctcccaggtccatcacatcaatgccaactacttcttggacatcacctccgtgaagcccgaggaaatcgagagcaatctcttcagcttctcatccacctttgaagacccgtccacggccacctacatgcagttcctgaaggagggactccggcccgccggcagccgcagccatggggccgggcccggccggtccaacgcgggccgcccagccccgggccctgccgtgcagcctgccgcgccagcgggccgacgcgcccgttccctggcgctgatcgataccttgctggccggcggcgctggctcccgcgtgcaattctgcgcctttcacacgcagggccaggcggatcaccaggtcgtccatcacatcagggccaactacttcttggacatcacctccgtgaagcccgaggaaatcgagagcaatctcttcagcttctcatccacctttgaagacccgtccacggccacctacatgcagttcctgaaggagggactccggcgtggcctgcccctcctccagccctag

SEQ ID NO: 11332 - DNA, 911 bp, Homo sapiens
  SIMILAR (1)..(561): 631254mologous to Pseudomonas aeruginosa transcriptional regulator RtcR,accession number AE004871,Smith-Waterman Score=529.
tttttttttttttttttttcacaagcacgtgcactttattgaatgacactgtaaacaggggtgtgggtataaactgctgtatctaggggcaggaccaagggggcaggggcaacagccccagcgttgcagggccagcattgcacagtggagtgcaaaggttgcaggctatgggcggctactagtaaccccggtttttcctgtattatctggaaccataatatgggtagactgtcacagagccgaataccagtaacagggatgaatccaatgggtcatgagggatgccccagaatcaggggcccagatgttcagggcacttgggccggtgggagggcatagggcctgggggcccccgggtcacggtcgccaaccatcttcctgtccctagacttcacggagtaggtcgaatgctatgtaagcccagacagcaccagttccaagaagaagggttttgaacagggaccacgacgacattggtcgggcaccgagggtctcgcttgtggatgtttgatcacggtgggaccttgggaaggatgggtgctgggggggtgcccccagcacaggccacctcatgttcccccttgtggatcttccgggctttggggaaggaagtgttgagtgaaggtttgagaagttgtggttttctgcgtggagctaagtggccgctgtcggtgttccggatgcttgggacggtgctcagtgagacctcctttcccctgtcgtttcagtttctcagaagtgtgtatttctcttaagtttctatttcctgctgtttgtaaattggtgaattagccagggaccaatgaggtgtggtttaacttcttgaggatcaaattacttatggcagggtgggaggaaaggctgaaggctaaggagagaggcttcctcatcagaagtgaagtcaggactag

SEQ ID NO: 11333 - DNA, 884 bp, Homo sapiens
  SIMILAR (849)..(1463): 721254mologous to Homo sapiens gag,accession number AF156961,Smith-Waterman Score=764.
tgctcccttgggctctagagaggaggcccctcttagccctcagcccctccttcctctctatcttaaagtaatttgatcctcaggaatttgttccgccctcatctggcccggccaaatcccgatttgacaaatgccaggaaaaggaaactgttgagaaaccgaaactactggggaaagggagggctcactgagtaaccatcccagtaacccgaccgccgctggtctttcgctggacaccatgaaatcacactgtccaaaccattcttctctcctgtcaacagcggcaagcccccccaaactatggagatgcttcaaggaagaacaccgagttggctgtgctgggggcgcccccaaaacccctgctccccccgacgtcccaccgtgatccaacatccgctagcgtgtacctccgtgccccgacccatgtcgtctggtccctgttcaaacaccctctttcatgaaccccctgctgcatgggcttccatcgcattcgccctactccgtgaagtctagggacaggaagattggttgcgaacgtgacccggggcccatcgcctatgcctccaccgccaaagtgcctgaacaatctgggccctgattttggggctccttcatgaccattctggctcatcgtcatcgccagtgctgatcgttccaggcctatgggatagatcaggaggcatcactggaggccaggagctctgcccatgaccttgtatcccacgtactccaacttccattcctcgccctgccccccggagccgagtctggatttaaccccttttatccttacacgcttttttacaatggcattcaataaaagtgcacgtgtttctggtaaaaaaaaaaaaaaaaaaaaaaaaaaaaaaaaaagggcggccgct

SEQ ID NO: 11334 - DNA, 1161 bp, Homo sapiens
  SIMILAR (88)..(678): 691254mologous to Homo sapiens gag,accession number AF156961,Smith-Waterman Score=694.
atgaagaatactggccagaggactgtgctgaagtttgctgctgccactggagtcagagcaattgctggccacttcactcctggaaactttactaaccagatccagggagccttccgggagccacggcttcttgtggttactgtccccagggttgaccaacagcctctcacagaggcatcttatgttaactttcccaccattgctctgtgtcacacagcttctcctctgcgctgtgtgaacattgccatcccatgcaacaacacggaagctcgctcagtgggtttgatgcagttgctgccccgggaagttctgcacatgtgtggtaccatttcccacgaacacccgtgggaggtcatgcctgatctctacttctacagggatcctgaagagactgaaaaagaagagcaggctgctgctgaaaagcctgtgaccaagcaggaatttcagggtgaacagactgctccagctcctgagttgactgctactcagcctgaggttgcagactggtctgacggcgtgcgggtgccctctgtgcctattcagctgttccctactgaagactggagcgctcagcctgccgtggaagactgggaaaagggttttggcctaaagaaaacttgtacgcgtaccttccaccccgtggtgaagactgatccacgcaaaatcgacagtgaaaaccaagagcgcgtccttaacacacccgaacggacagaaaactgctactcggcgaaaggcaacgtgaagctccaacagcggatactggacccggaaccccacagttcgctaccagccaaaaccgcggcctccgaaagtatgtttttctcctcttcaagggtcttctctctcattatacctgaagaaccccaagaatgcttcagttccatgcagctcctcaggtggcgaggtagccctgacagaggtacatcagcagccattgacactcgacgccgatccttccagccccatgacgaagacccagaatcaacagcatcttttccatactgttatatctcccctagtattgatcgaatcattccccaagccaatggtttcaagtttgaactcttagttaattctcatcatatagttcattttgcaagagcaggcaataggagagctctagatttcatgtgccacaacctggactggaaaaagatatga

SEQ ID NO: 11335 - DNA, 1234 bp, Homo sapiens
  SIMILAR (1206)..(337): 911254mologous to Homo sapiens putative p150,accession number U93563,Smith-Waterman Score=1360.
  misc_feature (1)...(1234): n = a,t,c or g
ggttcggttttgccgggccgacccacgcgtccgacctgcagaggggtccatacggcgttgttctggattcccgtcgtaacttaaagggaaatttttatcaatgtccggagtctcttgatgtcctgcaaatgaaggaggaggatgtccttaagttccttgcagcgaggaacccactgtaggtggcaccaatcttgacttaccacatggaacagtacatctataaaaggaaaagtgatggcatctatatcatatatctcatgaggacctgggagaagcttcttgctggcagctcgtgcaattgttgccattgaaaaccctgctgatgtcagtgctatatcctccaggaatactggccagagggctgtgctgaagtttgctgctgccactggagccactccaattgctggccgcttcactcctggaaccttcactaaccatatccaggcagccttccgggagctcacgggcttcttgtggttactgaccccagggctgaccaccagcctctcacggaggcatcttatgttaacctacctaccattgcgctgtgtaacacagattctcctctgcgctatgtggacattgccatcccatgcaacaacaagggagctcactcagtgggtttgatgtggtggatgctggctcgggaagttctgcgcatgcgtggcaccatttcccgtgaacacccatgggaggtcatgcctgatctgtacttctacagagatcctgaagagattgaaaaagaagagcaggctgctgctgagaaggcagtgaccaaggaggaatttcagggtgaatggactgctcccgctcctgagttcactgctactcagcctgaggttgcagactggtctgaaggtgtacaggtgccctctgtgcctattcagcaattccctactgaagactggagcgctcagcctgccacggaagactggtctgcagctcccactgctcaggccactgaatgggtaggagcaaccactgactggtcttaagctgttcttgcataggctcttaagcagcatggaaaaatggttgatggaaaataaacatcagtttctnnnnnnnnnnnnnnnnnnnctcgagggggggccttttaaaagaacccctgggggggccaaatttaaccgggggggggaaggaaaaagcttttcccttaaagggggccgaataaaaaccaccctgggaactttgggaaagaaccctatttttgggggggggaaaaaatggaaag

SEQ ID NO: 11336 - DNA, 822 bp, Homo sapiens
atggcggatgacgccggtgcagcgggggggcccggaggccctggtggccctgagatggggaaccgcggtggcttccgcggaggtttcggcagtggcatccggggccagggtcgcggccgtggacggggccggggccaaggccgcggagctcgcggaggcaaggccgaggataaggagtggatgcccgtcaccaagttgggccgcttggaatcagagatcattgatttcttcctgggggcctctctcaaggatgaggttttgaagattatgccagtgcagaagcagacccgtgccggccagcgcaccaggttcaaggcatttgttgctatcggggactacaacggccacgtcggtctgggtgttaagtgctccaaggaggtggccaccgccatccgtggggccatcatcctggccaagctctccatcgtccccgtgcgcagaggctactgggggaacaagatcggcaagccccacactgtcccttgcaaggtgacaggctgctgcggctctgtgctggtacgcctcatccctgcacccaggggcactggcatcgtctccgcacctgtgcctaagaagctgctcatgatggctggtatcgatgactgctacacctcagcccggggctgcactgccaccctgggcaacttcaccaaggccacctttgatgccatttctaagacctacagctacctaacccccgacctctggaaggagactgtatttaccaagtctccctatcaggaattcactgaccacctcgtcaagacccacaccagagtctccgtgcagcggactcaggctccagctgtggctacaacatag

SEQ ID NO: 11337 - DNA, 1035 bp, Homo sapiens; identical to SEQ ID NO: 9452
  SIMILAR (49)..(621): 271254mologous to Mus musculus cyclin K,accession number AF060517,Smith-Waterman Score=205.

SEQ ID NO: 11338 - DNA, 1050 bp, Homo sapiens
  SIMILAR (308)..(481): 671254mologous to Homo sapiens Human secreted protein clone cd205_2 protein sequence SEQ ID NO:98,accession number Y94946,Smith -Waterman Score=194.
  misc_feature (1)...(1050): n = a,t,c or g
ttgagggatactctagagcggccgccctgtgtttttttttttacacgcttaattcactttatttttcttgtataaaaaccctatgttgtagccacaagctggagctctgagtcctgctgcacggaagactctgggtgtgggtctttgacgaggtggtcaagtgaactccttgatagggaaactttggtgaatacaatcttcctttccagaggtcggggggtcaaggtagcttgtaggttcttaaaaatggcancggcatcaaagggtggcccttggccaaaattgcccaagggtggcagtgcagtccccgggctgagggtgtagcagtcatcgataccagccatcatgagcagctttttaagccacaggtgcggagacgatgccagagcccctgggtgccagggatgaaggccgtaccagcacagagccgcagcgccctgttcaccttgcaaagggacagtgttggggctttgccaatactttgttccccaaatacccttctgcgcacgggaacgatgggagagcttggctagcaatcatggcccccacggcatggccggtggccaccctcctttggagcacttaacaccccagacccgacgtgggccatttgtagtccccgatagcaacaaatggccttgaaccctgggtgccgcttgcccggcacgggttctgctcctgcacttggcataatctttcaaaaccttcatcctttgagagagggcccgccaggaaagaaaatcaatgatctcttgtttccttaaatgggccggaataagaatagatagatctccttccaggggaactttgatctttaatggtccttgaccaaagcggccccaacttggtggaaggcacatccactccctttatcctcgggcctttgctccggcagcttcgcgcncttcggccacggcccccttcaaagggcgggaaccccggcccggattgcaattgccgaaacctacgccggaaagcaacggggttttcccatccccgggccaccagggccccgggcctgcccgttggcaccggggttattcgccattt

SEQ ID NO: 11339 - DNA, 314 bp, Homo sapiens
  SIMILAR (192)..(10): 1001254mologous to Homo sapiens hypothetical protein,accession number AL133087,Smith-Waterman Score=322.
ctcacttacagctaagtggagtggactcttagtagcaccagaatctgattcttcaaatccactgtttgttctttccaaaagcaattccagacactgcctgtgcccataggcggcagcataatgtatgctattgtaaccttccttgtcccggatagatggatttgcatcattttgaagcagaaactctagacattttctatccatgtctgatgcagcggcgtaatgcaaagctgtgcgtccccagtcatctgtttcattaacgttggcccctgtggtcactaatgtctcaatacagtggaaatgacaattcgcag

SEQ ID NO: 11340 - DNA, 2377 bp, Homo sapiens
  SIMILAR (1474)..(2034): 401254mologous to Tripneustes gratilla Beta heavy chain of outer-arm axonemal dynein ATPase,accession number X59603,Smith- Waterman Score=341.
ttaacagccattttcatctacagcaagtacacaggcccctttggccagcaactcctcaactaccacctttaagccattgcgcgcagcgacgtggaggggtgtctgcagtgcattatttttttcattaataaggctctcgtcttgtatcttgtcaagtattaacaaggcacatttttcatgacctttactacaagccaaatgtaagggtgtattcaagtccttatcctttacagtcagatcagcctgggcactgttcaccaaaatatccacagcgcctgcctgcccattctcagcagccatcatcagtgctgttttccctgaattatctactgcgttcactggagcactgtgtctcagaagaagctgcaagcactccacatgatcagcaaatgctgccgcatgaaggggtgtcctgcctttgtcatctctacaactgacgatactggaatctatggccccaagcagcaatgatgcacaattcccatgatcattgattattgcacagtgcagtggagtaaagggattaccgataaatttgcgaaaacatttttgctccaaaagtacctctatacagttttcattaccattgtaacaagcccagtgcagcggcgtgtagccttggttatctttgaaacaacagtcctcctcagaaagagccatttggagcagctcgctcagccacgtggcgtggccacgagcagctgcatagtgcaagggcgtcctccctctggaatctttacagagaattgacacttcttgttccagcagcatttgcacacattcctcgtgtcctgtcataatccctctgtgtaaagctgtgcatcctaggatgtcaacagtgtctacgttggcttccttttcaagtaacaatgaaacagcgtcaatatgtccatatgctactgcaagcatcagtggtgtttgtcctttggcatctttcacatcgaccgcctccgggttgtctgcaatttctagcaacagccgtaaacacagtgtgtgaccattaattactgaggcatgaagtggggttcttttggttacattgtctttcacaaagatggatgcgccctgattgataagcgcttccacacattctgtgtgtcctttaaaggcagccagatccagagcagtgcggcctttctcatccctgatgtccaggtccaccaacgactgcagaaggacttccaaggcttgatggtgcccattgtaggcagctaagtggagtggactcttagtagcaccagaatctgattcttcaaatccactgtttgttctttccaaaagcaattccagacactgcctgtgcccataggcggcagcataatgtatgctattgtaaccttccttgtcccggatagatggatttgcatcattttgaagcagaaactctagacatagtgtggcttccttttccttcagctccctggctctttcaagttcttctgaattatcatgggcatttcctaagatagtcttatttctatccatgtctgatgcagcggcgtaatgcaaagctgtgcgtccccagtcatctgtttcattaacgttggcccctgtggtcactaatgtctcaatacagtggaaatgacaattcgcagctgcatagtgcaaaggggtcctcccacacttgtcctttttatggaaatctgctccgctgctctgcaagagttttatacattccacattacctcctgcagcagcagcatgaaggcacgttcttccaaatttatctggggtgtctatttcaaagcctgcagacagcacgtgctcattactaaacaaggatactatgctatacttttgtcccgatgataacaactttctgcagcagtcagagtgagcatttagggcagctaaatgtaaagggaacatgctatggattccacacttggctgtgtcagctccgctggttattaaggtgttaatcaaaagctcatgaccgtatcttgcagccacatggagaggagtgttgccgtccttatccacacagtcaatttcacctccattctgaatgagggtctgtgaccgtgtgaaccttccatggacagctgtcatgtgcagtggacttttgccatctttactctgaatgttaacatctgccccgttgtttactaacaattcaagacacaaagcaccatgagtggaggcagcagcaaaatgcaaaggggtgaacccattattgtttggctggttcacgttagcaccgtagtcaatcaactcgttaaccacagcatcctgtccattgtagcaggcgatgtgaagcgctgtatttccatagacattgatttcatcaatctccacccccaggttcaggagatgcttgacaacattaatctgtccattggaggctgcagcatgcagaggggtataacccctcttc

SEQ ID NO: 11341 - DNA, 777 bp, Homo sapiens
  SIMILAR (133)..(219): 311254mologous to Columba livia glutamate receptor C,accession number AF201353,Smith-Waterman Score=43.
atgcagtctgctggattgcagagaggtcgtggaggtggatctggcaattttatgggtggtagaggaaactttggagatggaggaagtaattttggctgtggtagaaactttggtggaagaagaggctatggtggtgaaggtggtggcagcagaggtagttatggaggaggtgatggtgggtgtaatggatttggaggtgatggtggcacctatgatggtggtcctggttctagtggtagagggggctatggtggtggtggaccaggatatagaaaccaagggggtagatatggtggtgggggatatggtggttacaatgaaggaggaaactttggtggtggtacctgtggtggtggtgggaacaataatgattctggaaattatagtgggcgacagcaatcaaattttggatccatgaaagggggtagttttggtggaagaagctcagacagtccctatggtggtggttgggtggggaaaccatgcacagctaagtggagtggactcttagtagcaccagaatctgattcttcaaatccactgtttgttctttccaaaagctgtggagacaaaaagcaaacaatagtacgtcattgtattgaggaagttcctgaacttccttcggtggttgaaggtaaagttgaaggctacaagaagacccaggaggctgttttgctgcataagaaacttaaaacctggagtgatatcaaaaagatctatgcctctcagcaaataagaactggcaaggacaaaatgagaaaccatcatcgtatctga

SEQ ID NO: 11342 - DNA, 478 bp, Homo sapiens
  SIMILAR (3)..(245): 981254mologous to Rattus norvegicus hnRNP protein,accession number Y16641,Smith-Waterman Score=461.
gaaaccaaggtggtggatatggtggaggtggaggatatgatggttacaatgaaggaggaaattttggcggtggtaactatggtggtggtgggaactataatgattttggaaattatagtggacaacagcaatcaaattatggacccatgaaagggggcagttttggtggaagaagctcgggcagtccctatggtggtggttatggatctggtggtggaagtggtggatatggtagcagaaggttctaaaaacagcagaaaagggttgaatgataaccctacttgcctaaatgaggaaattcttttctaaccatctaaaatacaaaggttcttggctgggtaaggtttgtagttgacagtaaaacctgatgacaccatttgtttccctgcaagtctacattacatatttcacaactttgtccctctctagtaggcacattggaaaaattcttcaactgaaaactaccttggtaccatgg

SEQ ID NO: 11343 - DNA, 619 bp, Homo sapiens
  SIMILAR (909)..(1079): 941254mologous to Homo sapiens Unknown gene product splice form-2,accession number AC002544,Smith-Waterman Score=266.
gcacgagggagctgtcttcctcttcttccgccatggcgtgtgctcgcccactgatatcggtgtactccgaaaagggggagtcatctggcaaaaatgtcactttgcctgctgtattcaaggctcctattcgaccagatattgtgaactttgttcacaccaacttgcgcaaaaacaacagacagccctatgctgtcagtgaattagcaggtcatcagactagtgctgagtcttggggtactggcagagctgtggctcgaattcccagagttcgaggtggtgggactcaccgctctggccagggtgcttttggaaacatgtgtcgtggaggccgaatgtttgcaccaaccaaaacctggcgccgttggcatcgtagagtgaacacaacccaaaaacgatacgccatctgttctgccctggctgcctcagccctaccagcactggtcatgtctaaaggtcatcgtattgaggaagttcctgaacttcctttggtagttgaagataaagttgaaggctacaagaagaccaaggaagctgttttgctccttaagaaacttaaagcctggaatgatatcaaaaaggtctatgcctttgccagctctcattcgcgtcgacgcggccg

SEQ ID NO: 11344 - DNA, 899 bp, Homo sapiens
  SIMILAR (2)..(328): 831254mologous to Homo sapiens heat shock cognate protein 54,accession number AB034951,Smith-Waterman Score=445.
gtcgtggaggtggatctggcaattttatgggtcgcggagggaactttggaggtggtggaggtaattttggccgtggtggaaactttggtggaagaggaggctatggtggtggaggtggtggcagcagaggtagttatggaggaggtgatggtggatataatggatttggaggtgatggtggcaactatggcggtggtcctggttatagtagtaaagggggctatggtggtggtggaccaggatatggaaaccaaggtggtggatatggtggaggtggaggatatgatggttacaatgaaggaggaaattttggcggtggtaactatggtggtggtgggaactataatgattttggaaattatagtggacaacagcaatcaaattatggacccatgaaagggggcagttttggtggaagaagctcgggcagtccctatggtggtggctatggatctggcggtggaagtggtggatatggtaccagaaggttctaaaaacagcagaaaagggctacagttcttagcacggagagagagcgacggagttgtcacggaaagctgcaggttactttgagacagtcgtcccaaactgcattagaggaactgtaaaaatcttgccacattaaggaacgatgatcccttagttcaggaaaagttacttgccagctttaaacagggaaacccttctttgtttcaggacttgtcatagccacagttttgcaaaaagtgcagctatttgttaattgcaatgtagtgtcaattagatgtacattcctgaggtcttttatctgttgtagctttgtctttttctttttcttttcattacatcaggtatattgccctgtaaattgtggtagtggtaccaggaataaaaaattaaggaatttttaacttttcaaa

SEQ ID NO: 11345 - DNA, 399 bp, Homo sapiens
  SIMILAR (109)..(396): 811254mologous to Homo sapiens steroid receptor RNA activator isoform 1,accession number AF293024,Smith-Waterman Score=364.
atgacgcgctgccccgctggccaagcggaagtggagatggcggagctgtacgtgaagccgggcaacaaggaacgcggctggaacgacccgccgcagttctcatacgggctgcagacccaggccggcggacccaggcgctcgctgcttaccaagagggtagccgcaccccaggatggatcccccagagagctttcaagccaccggtgggacgcagcagatgacatccaccgctccctcatggttgaccatgtgactgaggtcagtcagtggatggtaggagttaaaagattaattgcagaaaagaggagtctgttttcagaggaggcagccaatgaagagaaatctgcagccacagctgagaagaaccataccataccaggcttccagcaggcttcataa

SEQ ID NO: 11346 - DNA, 431 bp, Homo sapiens
  SIMILAR (189)..(314): 1001254mologous to Homo sapiens steroid receptor RNA activator isoform 1,accession number AF293024,Smith-Waterman Score= 229.
  misc_feature (1)...(431): n = a,t,c or g
cccacgcgtccggcggagctgtacgtgaagtctggtgagcgcagccggcgggctagggcactaggtcgtcgccccggcctaggctgggggcggttgcggcgcttaatatggaccctctgtctcccccagccccagtataagctaacagtggagttccgggctcgcttcacacatccctcgcctccgcaggcaacaaggaacgcggctggaacgacccgccgcagttctcatacgggctgcagacccaggccggcggacccaggcgctcgctgcttaccaagagggtagccgcaccccaggatggatcccccagaggtgcgtggggcccctgtgctcggagacagacggagaatnnnnnnnnnntgtaaggcataagcctgtttggaaggctttttttctctccccgagggctccttaaggagagaagtttt

SEQ ID NO: 11347 - DNA, 670 bp, Homo sapiens
  SIMILAR (4)..(927): 861254mologous to Homo sapiens 71 Kd heat shock cognate protein,accession number Y00371,Smith-Waterman Score=1315.
gtgggtcaggcccagtgggacagtcttggtggtgcatcttctactgattggtcttcaaaagtcttattaatgctcctgaaatcctgtgttcatttctttgggaaggccttagcagattctgaaggagtccgtaactctcaaaggattaagaacctgtccactgggtcagagggtctatctctgggaaccattcctgcatttggctgtggatgggagccctctctaacctctgatgtgccagagcttacccttgtgtggccacggcagtcttccaatgcctgttccaaaggtctcagcacatcctccatcagtcgagcctcagactcgactgggaaacttgtgggctccacgccagaggcaggaccactccccaacaggtggggacctgggagccttacttgaaggaggtggaggccccattgggggaggcccaggagaagtctctgatgcggggactgaaaaggtacagcaggatcaagcaacatggcttaaatgggtaagaagcttaactctaaattcaccccttctaagaagggctactctctgagacaacttattcattcaaaaatatgcatttatgaagtccccactctacgccagacaatatgctaggcattaaagattagaaaagtaaaccaggtggccgggtgtgatggctcacacctgtaat

SEQ ID NO: 11348 - DNA, 1899 bp, Homo sapiens
  SIMILAR (198)..(635): 751254mologous to Homo sapiens heat shock cognate protein 54,accession number AB034951,Smith-Waterman Score=491.
atggttcccaggaggggacatctgggggatccacggctcctcccgcctcgccgaatgctctccccacaccactccacactgttgaggcagttgacaggagccgcagaagaaacaagggacatcctcactcctgagccgctccagagtcgcttctccccggaactaaaaagcggtttcgctggcgttcgtgggcctcccccggacccacacacggaaacacgcaaccattcggggatccagacgcccgtttacacgcaccacccctgggcgggctgtgcggctcaggccctcccccgggaccggcccgtgtcccgccccgtgtcccgccccgtatttgtgcggcgccagctggccccgcagcctgcggcgcagagaggctgggcttgcaggcgcagtagctccagaggtcgcgctgggctgagagtgcgggccggcagaggctggcggggagcagccggggttatgctgggcaaggattacatgctggccatcattctggtcaactgcgatggtgtgcacggaggggcccggtgggaagaccaggagctgagggaggacgagggaatccgaaaggctactctggggctcaaagacgatgacttgtggggggaccacagtctggaggtggaggctggcctgcctcctggctggaggaagatccacgatgctgcaggtacttactactggcatgtacccagcggtagcacccagtggcagcgcccaacctgggaactaggagatgcagaggacccaggcacgtgctttgcagtccgctctctgggctgggtagaggtacctgaagaggacctggcaccggggaagagcagtattgcagtcaataactgtatccagcagctggcccagacccgcagccggagccagcctccagatggtgcctggggtgagggccagaacatgctgatgatcctgaagaaggatgccatgagcctagtgaatcccctggaccacagtctgatccactgccagcctctggtgcacatccgtgtgtggggcgtggggagctccaagggccgggacttcgcttttgtggcaagtgacaaagatagctgtatgctcaagtgccatgtgttttgctgtgatgtccctgccaaggccattgccagtgccctacatgggctttgtgcccagatcttgtcagagcgagtagaggtcagtggtgatgcctcttgctgctccccagaccccatctctcctgaagacctgccacggcaagtggagctgctggatgcggtaagccaagctgctcagaagtacgaggcactgtatatggggacactgccagtcaccaaggccatgggcatggatgtgctgaacgaggccattggtaccctcaccgccaggggggaccggaatgcctgggtccccaccatgctcagtgtgtctgactctctcatgactgcacaccccattcaggtaccagaagagggtgaagttgggggctttggaggggcagaggccagtacagaggaggagccattgtggcagtgccctgtgcgccttgtgacatttattggtgttggccgcgacccacacacctttggcctcatcgctgacctgggccgtcagagcttccagtgcgcagccttctggtgccagccccatgcagggggactctctgaagctgtgcaggctgcctgtatggttcagtaccagaagtgtcttgtggcctctgcagctcgaggcaaggcctggggtgcccaggcccgtgcccgcctgcggctcaagcggaccagctccatggattccccaggaggtcccctgcccctccccctgctcaaaggaggggttggcggtgcaggggcaacccctcgaaagcggggtgtcttctcttttcttgatgccttccggctgaaaccctctctgctccatatgccctaa

SEQ ID NO: 11349 - DNA, 1839 bp, Homo sapiens
  SIMILAR (110)..(1594): 501254mologous to Oryzias latipes heat shock protein 70 cognate,accession number D13669,Smith-Waterman Score=780.
gctgggctgagagtgcgggccggcagaggctggcggggagcagccggggttatgctgggcaaggattacatgctggccatcattctggtcaactgcgatgatgacttgtggggggaccacagtctggaggtggaggctggcctgcctcctggctggaggaagatccacgatgctgcaggtacttactactggcatgtacccagcggtagcacccagtggcagcgcccaacctgggaactaggagatgcagaggacccaggcacgggaacggaggggatctggggactgcggccccccaaagggagatccttctccagcctggagagttcactggaccggagtaactctctgtcctggtatggtggggaatcctacatccagagcatggagccaggggctaagtgctttgcagtccgctctctgggctgggtagaggtacctgaagaggacctggcaccggggaagagcagtattgcagtcaataactgtatccagcagctggcccagacccgcagccggagccagcctccagatggtgcctggggtgagggccagaacatgctgatgatcctgaagaaggatgccatgagcctagtgaatcccctggaccacagtctgatccactgccagcctctggtgcacatccgtgtgtggggcgtggggagctccaagggccgtgacagggacttcgcttttgtggcaagtgacaaagatagctgtatgctcaagtgccatgtgtttcgctgtgatgtccctgccaaggccattgccagtgccctacatgggctttgtgcccagatcttgtcagagcgagtagaggtcagtggtgatgcctcttgctgctccccagaccccatctctcctgaaagacctgccacggcaagtggagctgctggatgcggtaaagcaaagctgctcagaagtacgaggcactgtatatggggacactgccagtcaccaaggccatgggcatggatgtgctgaacgaggccattggtaccctcaccgccaggggggaccggaatgcctggggtccccaccatgctcagtgtgtctgactctctcattgactgcacatcccattcaggcagaggccagtacagaggaggagccattgtggcagtgccctgtgcgccttgtgacatttattggtgttggcccgcgacccacacacctttgggcttcatcgctgacctgggcggtcagagcttccagtgcgcagccttctggtgccagcccccatgcaggggaactctctgaagctgtgcaggctgcctgtatggttcagtaccagaagtgtcttgtggcctctgcagctcgaggcaaggcctggggtgcccaggcccgtgcccgcctgcggctcaagcggaccagctccatggattccccaggagggtcccctgcccctccccctgctcaaaaggaggggttggcggtgcaggggcaaccccctcgaaagcggggtgtcttctcttttcttgatgccttccggctgaaaccctctctgctccatatgccctaaacttatctgggaaggctggggaagtaggctctgggtccatgcctaactctgtaccgttttattcctcaaggcctatagcctggtcatcccttgaagccttctctgcctgtccctccgatccttgtccaccgtctatttattgcccaatttattgtttatacggatgactgggaggcactgcaccacaacgtaggaccctggctcccctttccttgggtccttgtgttccttgcccctgtccaaccctggacagttggctctacctcagtaacactttatagcaaaatcagtgcaaataaaaatccctcagtgacctc

SEQ ID NO: 11350 - DNA, 1832 bp, Homo sapiens
  SIMILAR (139)..(1203): 941254mologous to Homo sapiens interleukin-1B converting enzyme,accession number X65019,Smith-Waterman Score=1705.
cagaagtacgaggcactgtatatggggacactgccagtcaccaaggccatgggcatggatgtgctgaacgaggccattggtaccctcaccgccaggggggaccggaatgcctgggtccccaccatgctcagagtgtctgactctctcatgactgcacatcccattcaggttcagtaccagaagtgtcttgtggcctctgcagctcgaggcaaggcctggggtgcccaggcccgtgcccgcctgcggctcaagcggaccagctccatggattccccaggaggtcccctgcccctccccctgctcaaaggaggggttggcggtgcaggggcaacccctcgaaagcgggggagttgccgcaggtccccacagcggctcccgacggttgtgaaccagcatccattctccacggattccggcaacccgcctggccctgggacgtgtctcaactggcccgcgtgaggggccgccccggaaatgacgcgctgccccgctggccaagcggaagtggagatggcggagctgtacgtgaagccgggcaacaaggaacgcggctggaacgacccgccgcagtttttcataacgggctgcagacccagggccggcggacccaggcgttcgttgtttattcaagagggttcgccgcaccccaggatggatcccccagagtccccgcatcagagacttctcctgggcctcccccaatgagcgctccacctccttcaagtaaggctcccaggtccccacctgtgcgacgtcggtcctgcctctggcgtggagcccacaagtttcccagtcgagtctgaggctcgactgactggaggatgtgctgagacctttggaacaggcattggaagacttgccgtggccacacaaaggaaagcaggtatgtgattgacatcagcccgacgcctggcactggttgcaggaacagtgggcttggaggaaagttgtcaataccctgtaaaagaagagaatggctctacttggtgcaaaagctttttaagccaccggtgggacgcagcagatgacatccacccgctcccctcatggttgaccatgtgactgaggtcagtcaagtggattggtaggacgttaaaagattaatttgcagaaaagaaggagtctgttttcagaggaaggcagccaaatgaaaagaaatctgcaagccacaagctgaagaaagaaccataccataccagggtttccagcaggctttcataatcctccgggttccccagacttcaccgggacaccatcttcctaatgccttggaagaccttctgtcacttggctcccttcttaccaccaccaagactgtcccactgggcctgacccacctatgagggaagaagtcccacctgggccagagggagttcatgtgttactcataacatgcatttcaataaaaacatctctgcggtgggccttgggtaggagagatgaacccttccggtgccaagctagtcccctctggtgtcctcgactgcccctgctccctgtgtatctgcaaacctctgttctcccttctccattcatcaggaagggatctgctgggtaaagtcagactactgcctaccactttttcccaaagtagactgaaagcacatcctgtgctgggcggagcagctgtgtttggatggtttcatttcagcatgagaacagactcaaatagaacggggagacttttccctcaacaaaaggaaagacagtcctatttgcactgtatcacacttgagatactactgttacagagattagaaccacattgagtggggttttctgtgtaaatcgaaggagaaaaagaccagattactgagattggggattgtaac

SEQ ID NO: 11351 - DNA, 487 bp, Homo sapiens
  SIMILAR (3)..(815): 831254mologous to multiple sclerosis associated retrovirus polyprotein,accession number AF009668,Smith-Waterman Score=1158.
  misc_feature (1)...(487): n = a,t,c or g
caaacaaaaaaaagtccattttacttttataaaaaaaaaagcaacaccactccaagttgtttaacatcctgaactttctattaatactatctgaccaaattttaatacaaaaggttaatttttatgaacaaatggataataacccaactgcaaactaccaacatatattctatctgaactcagcagttcccagggatgatgtttggaggggaggaaattgaatgcgtacagagcacgaagtctgggctaacaaggcctgagccaacantaaccttgctctttctcttcgtcttcagggcagcccgggctgagggctgcaaatcataaaaccgggctttgggctttcttatggaggtctgaggttgaattgaacctcagcacttgcagatcacaggaaggtttgcaggttcaggcaggcttttttcccccggatttccagnacccccttntcagggtttccgggggccgaaatcccgttaggttgttc

SEQ ID NO: 11352 - DNA, 871 bp, Homo sapiens
  SIMILAR (115)..(363): 331254mologous to Homo sapiens synaptonemal complex lateral element protein,accession number Y08982,Smith-Waterman Score=131.
gttgctccgggatcccctttctcaataacagaagaaagagagttgccagaaggaatttccacttcatccctagaagttgtgccagagaacttgaacggttctgccattctcccaacctttgaaaacttcactaaaaaacggaaaagaaaatatgagcttaggtacagaaagcgtccgtttaattcataaaatgcaaagaaagcaccggattgcctaataaaacttttaaaccagatgcaactgttcagactcaataaactagagcgctttcaaaatttggttcttcaagagttgagcagtcttaagcaggatattcaggccctggaacaccttgagaaggaggttctggaattctgggggaaacagtctgctgatctgcaatctttctgtgatctgcaagtgctgaggtactttgaaaggtgttctttctagaagaatcttggttgaagtatgaggttcaattcaactcagaccttcataaggaaagcccaaagcctggttttatggattgcagccctcagcctgggctgccctgaagacgaagagaaagagcaaggttattgttggctcaggccttgttagccagacttcggtgctctgtacgcattcaatttcctcccctccaaacatcatccctgggaactgctgagttcagatagaatatatgttggtagtttgcagttgggttattatccatttgttcataaaaattaaccttttgtattaaaatttggtcagatagtattaatagaaagttcaggatgttaaacaacttggagtggtgttgctttttttttataaaagtaaaatggactttttttttgtttgagaaatgtcttcaagttttgtgtgaataaaacactttagcagc

SEQ ID NO: 11353 - DNA, 1245 bp, Homo sapiens
  SIMILAR (2166)..(1039): 941254mologous to Homo sapiens putative p150,accession number U93564,Smith-Waterman Score=1889.
agaaacccacccaaccccctaaacctaagaaacccagactgcgcaaacctgcaggaacagagccatttccccctaatgtgtgcttcaaacccaccgaagcccaactcagcggctgccgatctgggcagcgggtgggtattcctggggctccgtggacgttgagccgccgcgcgaaaccggcgccggctggacctgcaaatcgccgcccggccggcaggggacgccgcggacgcgagggcgagacattgatcccaagagcactccccagtaaatgttctccatttcagagactgcttcccataggcaaacggacccacaacaatatattcagaaaggtattcccccacaattcacgtgctgaagttctaactgccatggagggtggagcctttgggagagttagtgcagcccccacgggttatgggtccattccacaagactgtccccacttcagattccagtgccagatctgggcctcctgtatgtctgaacaatcagctataaatctgtacatcagggctctccaccatcctctcctcatgctccgccttaaggctacactaatccaggattcccctaatccaatttcagaaattgaacttttctgggtcagcccgatcagtcaaagccaaccaggcttcaggtgtattttcagccgcccctttattcctgtgcttaggtacagaaagcgtccgtttaattcagaaaatgcaaagaaagcaccggattgcctaataaaacttttaaaccagatgcaactgttcagactcaataaactagagcgctttcaaaatttggttcttcaagagttgagcagtcttaagcaggatattcaggccctggacacaccttgagaaggaggttctgggtggggaattggatgatatgggcagtagagaaggatctggaaggattgctgatggcttggatgtgacaggtgggaaaaggcaggatcaagggcagcttctaggtttggggcttaagcagctgggtgcaaaccactgtcacttaaggaggtggaggagattgggaaaggtccagttgattggcccgggaaggatgaggatggatatgaaaggcaggaagaaggagttgagtaaaactaaaagcctgggctgcctgaagacgaagagaaagagcaaggttattgttggctcaggccttgttagccagacttcgtgctctgtacgcattcaatttcctcccctccaaacatcatccctgggaactgctgagttcagatag

SEQ ID NO: 11354 - DNA, 462 bp, Homo sapiens
  SIMILAR (205)..(390): 901254mologous to Homo sapiens v-fos transformation effector protein,accession number M84711,Smith-Waterman Score=292.
atgacggttagcaagaacaagtgccatacaaaaggtggcaaaaagggaaccgagaagaaagtggttgcttcattttctaagatatattggtataatgtaaaagcacctgctatgttcagtataagaaatattggaaaggcactggtcatagggactcatggaaccgattttgtatctgatggcttcaagggtggactgattgagattccagacagcatcggaaaagacaaagaaaaggcttgccgatctatttatcctcttcatgatgtttttgttagaaaagtaaaaatgctgaagaagcccaagtttgaattgggaaaactcatggagcttcatggagaaggcagaagttctggaaaagctactgggaatgaaagtggtgctaagttgaatgagctgatggatatggatcaccagcccaaaaatctttttaaagttcagacttttaatagtggtagataa

SEQ ID NO: 11355 - DNA, 645 bp, Homo sapiens; identical to SEQ ID NO: 11312
  SIMILAR (133)..(642): 871254mologous to Homo sapiens v-fos transformation effector protein,accession number M84711,Smith-Waterman Score=763.

SEQ ID NO: 11356 - DNA, 587 bp, Homo sapiens
  SIMILAR (305)..(532): 1001254mologous to Homo sapiens v-fos transformation effector protein,accession number M84711,Smith-Waterman Score=394.
attcgcacgaggcccatgcaatatacagttagctaagagggtgtaatggaaaaagcataaggcttggactcagaagactctactaactttgccactagctagctatgtaattcagatcatctatcctttacatgtgaaaggtaaataatggcttatcttaacaggaggatttatgcaggttaaatgaggtaggtgttatgtgtaggtttattccaaggcttctctactttttaaagaaaatggcttatcttatatctgagaactaggacttttagaaaaaaatttactgttactggtttgcaggattccagacagcattggaaaagacatagaaaaggcttgccaatctatttatcctctccatgatgtcttcgttagaaaagtaaaaatgctgaagaagcccaagtttgaattgggaaagctcatggagcttcatggtgaaggcagtagttctggaaaagccactggggacgagacaggtgctaaagttgaacgagctgatggatatgaaccaccagtccaagaatctgtttaaagttcagacttcaaatagtggcaaataaaaagtgctatttgtaaaaaaaaaa

SEQ ID NO: 11357 - DNA, 441 bp, Homo sapiens
  SIMILAR (1)..(90): 961254mologous to Homo sapiens ribosomal protein S3a,accession number AB007148,Smith-Waterman Score=151.
atgctgaagaagcccaagtttgaattgggaaaactcatggagcttcatggtgaaggtagtagtactggaaaagccactggggatgagacagtcccagccactgggggtgatgccagcagcagttcatctggagcggctgccacaaaaaacgccggctgcagcagggaaggcgtggcagggtctgtgcgctccaaagagtcagcaacaggtgggagccctgaccactttccaaagttgcccctcttcgccttgctaaccctccaactgtctgtgtacctcattctctctggacgtgggacaagaactcgggacccgccaaatggtgggactcgaagagctgtaacacaaacagtgctgaaacatcccttcctaccccccactcaccatgctgccggcgacaaggacggaagagctctgaccctttggggagtccagacctag

SEQ ID NO: 11358 - DNA, 1139 bp, Homo sapiens
  SIMILAR (595)..(1173): 751254mologous to multiple sclerosis associated retrovirus polyprotein,accession number AF009668,Smith-Waterman Score=736.
cccttttggctctctgaccagcaccatggcggttggcaagaacaagcgccttacgaaaggcggcaaaaagggagccaagaagaaagtggttgatccatttcctaggcaaagattggtattgacgtcgaaagcaccctcttatgttccattataagaattattggaaagacggctcgtcacccaggaccccaaggaacccaaaattgcaatctgatggtctccaagggttcgtgtgtttgaaagtgagtcttgctgatttgcagaaatgatgaagtttgcatttagaaaattcaaggctgattactgaggtttgtttcaggggtaaaaacttgccctgacttaacttcccatggggcatgggatcttaccccgtgaccaaaatgtgttcccatggtcaaaaaaatggccagaccaatggattggaaagcctcaccgttgatgtccaaagacctacccgatgggttaccttgccctccgcctgttcctgtgttgggttttaccctaaaaaaccggccaacaattcaggatacgggaagacccctccttatgcctcagccacccaaccaggtcccgcccaaattccgggaagaagatggatgggaaatccatgacccccgagagggtgcaggacaaattgacttgaaaagaagtgggtcaataaatttgattcccagacagccattggaaaaagacaatagaaaagggcttgcccaatcctatttatccctctcccatgatgtccttcgttagaaaaagtaaaaatgctgaagaagcccaagtttgaattgggaaaagctcatggagcttcatggtgaaggcagtagttctgaaaaagcccctggggacgcagacaggtgctaaacgttgaaccgagctgcatggatatgaaccacacagtccaagaatctgttggaaagttcagacttcaaattagtggcaaagtgaaaaagtgctatttgtgatggtttgaaaaaaaaaaaaaaaaggggggggccctttttaaaaaatccttggggggcccaaatttaaccgggggtgggaaggcaaaatttttttctttttgggggggggtttaataccctccttgggaattttggaaaggaaccttttttttggggggggaaaaaaatggaacaacc

SEQ ID NO: 11359 - DNA, 1065 bp, Homo sapiens
  SIMILAR (988)..(1065): 881254mologous to Homo sapiens Human secreted protein, SEQ ID NO: 7217,accession number G03136,Smith-Waterman Score=116.
tcaaacttcagtatgcttgtaaaccacctggggttcttcatgagctgtagattctgattcagcagggagtgggacctgagcttctgcaggtggtggtgatgctgctagttcatggaccacactttgagcagcagggctgtagcatctagtgctcctgcttacaggtttctccctgtttttccctattttgaggcacagtttcaggcagtcaggctggttctgctgcatttgcttggcaacatcacctccctccagcctctgcagcttccacccttgggctgctgcacgtgcacgtacatttccactgctgtggctcccacagtgcacagttggggactgagtctgaagctgtgtcacaataacatcactcagtctgggcaacacagtgggaccccatctcatcacccatgaggccactggatcctgaaacctttctcctcgccttccacctgccctgtctgcagcacattcgttgtactgtcgggggcagtgcaagctccaggtggctcctctgcatttccacctgattatcgtttttccaggtggagagtgcacagtcaggatcagaattaggcggttctgctttctctctctggctcttctgggaacttcataccatctctcggtccccttgacccaggaagaaccgttagcaggtcttgttgtacttaaatcacaggtgttcagggaaaagcccatggactcctgttgagcagctctgaggccagaccatccaggggagccccagtccctgacctcatagatctcatagtccatgcctgtgagcacagggacagcggcaagaaacaattcaggggggcaggtccttgagtaggacactgtatctttagggaagaagtgggacttcactaagccaaaagcttgcacagctgtccagtttgaccggggattccacaccactatgagagattcgtgactaagtggttgacccaagggtaggatgaagattttctctcttaggtgcctatgagtgagaacatgcagtgtttggttttttgtctttgcgatagtttgctgagaatgatggtttccagcttcatccat

SEQ ID NO: 11360 - DNA, 1245 bp, Homo sapiens; identical to SEQ ID NO: 8703
  SIMILAR (814)..(1029): 521254mologous to Homo sapiens Gag protein,accession number AF164612,Smith-Waterman Score=232.

SEQ ID NO: 11361 - DNA, 2031 bp, Homo sapiens
  SIMILAR (1966)..(1760): 601254mologous to Escherichia coli choline dehydrogenase,accession number U73857,Smith-Waterman Score=180.
atgcgcgcgagacaaaacggttgctctttctgttttcctcctccctctctggtggctctggctccaagtcagcacaaacttgagaggccttctggtgcccgtgtaggcttcaccagcctccaggaagggatagttcatgcagaatggaccagtggtctgggcctgcggaggtcaggaagggatttctgctatataaactgcgagaggctaatggaatgggagctcctctctgaagcttgtccagatttctccgaatttcagtccaaggaacatcagcatcacattctgcgggaacaagggccaaaatgcctcattatgggaacatcttcccaggcagcaagccatactgcccagacccgtcctgctcatacctacaagtaccccaacctgtacgaagcagtgggcactggcattaagctagtcccccacctctgtgagcccgctgcgactgaacatgctgaaggtgagcatactgtaggtgagcagccttcaggagaacagccttcaggtgaacacctctccggagaacagcctttgagtgagcttgagtcaggtgaacagccttcagatgaacagccttcaggtgaacatggctccggtgaacagccttctggtgagcaggcctcgggtgaacagccttcaggtgagcacgcttcaggggaacaggcttcaggtgcaccaatttcaagcacatctacaggcacaatattaaattgctacacatgtgcttatatgaatgatcaaggaaaatgtcttcgtggagagggaacctgcatcactcagaattcccagcagtgcatgttaaagaagatctttgaagaaatgtcattttcctatttctacatgcagacattcatccaccatcactcggaaaacattaatgacacataccatgaactacagaaagatgactcaaatataaactgtgtacaaagagattatgttataatggacatggatgaagctggaaaccatcattctcagcaaactatcgcaaggacaaaaaaccaaacactgcgtgttgtcactcatagggcgcccagtcccatcgaccacccaagggctgaggaatgcgagcgcacggcatgggactggcaggcagctccacctgcagccccggtgcgggatccactaggtgaagccagctgggctcctgagtctggtggggacgtggagaacctttatgtcctgctcagggattgtaaatacaccaatcagcaccctgtgtttagctcaagttttgtgagtgcaccaatcgacactctgtatctagctgctctggcttgctgctatgtccatcccatagcatctaccatggttactatatcaacaactgataggagaaacaataaactcattttcaaagtgaatttgttagaaatggatgataaaatattggttgacttccggctttctaagcctggacgctctggggtttggcattattcagtcctcctagaccctctacacatatctcccaccataaatgaagcagaaatgtggggtgatggtgttcagggtctctggagtgtgggtgatggggaggaagtgagactgcttagtgtggggcactattctgggtatggaagtgatgataacccatgtgggaaagctccaaaggggctggctctgtggaaatctttcctgagcctggacagtggtgaaacacccactggcgagtgtgtaaaaggaagcttctgcccacagcctgggagcagctcagtccagactctccagcctgctctcatctgcacactgaagcagactgtcttagcctttccggagcacttagctgcctggttccagccaccctgctgtgtctttcttacctcccagactgagatggacaagttcccgctcatgctcctgctgctgggggtttttcctcttgtgttcttccaaggtgtgagtgagggtttgggctggctggggcaggaggtgagaacaggggcgaagatagctggcgagcaggctgaagatgatctggccagcacgggaggaggtcaacaccaagattctgggatgatctga

SEQ ID NO: 11362 - DNA, 5517 bp, Homo sapiens
  SIMILAR (805)..(1125): 711254mologous to Homo sapiens alpha-tubulin,accession number K00558,Smith-Waterman Score=382.
ttaatggacaccagaacggctactgcagagctgggctggacggccaatcctgcgtccggggtgagtatcaaaccattcgtctttcagtcctgctatgaggtcctggatccatatgatatctgtggggaatggaatacaggtgtgaatggctgtgtccactgcccatccatgcaaagacagcaccaggggtctcagacctgagctgctgcctcgtgtgctgatgtagaccatctcttgacacagtcctttctgaaagctgacacctagacaactagggccatggctgtgcattctccactggtttctcactgttactttatcccagcatttgaagaactgcactgctcgaggcataagcatgatgccttgaaacagggaagcaaggtccaaaatgagctggcattcccatggggagcagagagctgtgcatgcaaataacagggactctgtctcattggaggggtcagcaagactccctgcttcctcagagggggtggatgcagaggaggctgtgtgagtgtggcagaaataccaggctcctccaatgtcaatcctgctgtctaaggatcctccaaaaaggcctggacactgtgactgagtcttggatttaggaagatgtatcaggcttccttcggaagtaacggtgttccatccctggaagtgtctaaaattaggctgaggaccactgtggaagagcaaagtggggtcatggggtgtgcttgactcgctgtccttcgaggctttatctagccggatgtggccatgctccatcaggttctccagagcaacagcaccacttgcagccacagcatcctctggacattgtgaacactttctaagagctaagaatgcagcatattcccagccatactcttctggactaaaccacatctccccagactttgccttctcagtattattaacaggccccttgcatgccacgctgttctcaggctcatagccaggcttgcaggtgcatcgcccaataggcaccatccattccccatccccgttgcagtagagtttgatgggcacgtccacttcctctgcgttggggatgcatgtgccccgagcaatcaccagagatgtgctctctgcccctgtcatagtctctggaaacactgcaaaattttgcacaatgctgggacactttttgaagaagacacggacagaaagaagagacatacaggctccataatccttcatcagccttcccccaaagtccacctgggagaagctctcatctgcagcaatggtgtctactttgaggtagggggcctcagaccagaaggctgacttcttggtggcaatgacagagtcagtctcatagtaatacaagttgaaggtctccttgcaggatcctgggacattagggaggctgctgcagtctctcacagtgaagcgcatctctgtgtagatgcgatgggccccccgccggttgatgaaggtggtgagcagccaattgctctggttgggctcgaagacattgcacacctggtaggtgcggatggtgttcaggttttcatcgtagccactgacttcttcccatccatggcctctgtctccagcagtgtgaagcatgaacagccaggcgggggagcctgcaccttccatcttgcagctctccaaattacttttcagttcctccttgtacctctggtagaatttggctgtgaatccatctggtcctggactctttttggttggtaagctattgattattgccacaacttcagatcctgttattggtctattcagagattcaacttcttcctggtttagttttctcttgtaggcatttagtgctataaatttccctctacacactgctttgaatgtgtcccagagattctggtatgttgtgtctttgttctcgttggtttcaaagaacatctttatttctgccttcatttcgttacgtacccagtagtcattcaggagcaggttgttcagtttccatgtaggtgagcggttttgagtgagattcttaatcctgagttctagtttgattgcactgtggtctgagagatagtttgttataatttctgttcttttacctttgctgaggagaggtttacttccaagtatgtggtcaattttggaataggtgtggtgtggtgctgaaaaaaatgtatattctgttgatttggggtggagagttctgtagatgtctattaggtctgcttggtgcagagctgagttcaattcctgggtatccttgttgactttctgtctcgttgatctgtctttctctctggctgcccttaacattttttccttcatttcaactttggtgaatctgacacttatgtgtcttggagttgctcttctcgaggagtatctttgtggcattctctgtatttcctgaatctgaacgttggcctgccttgcgagatttgggaaattctcctggataatatcctgcagagtgttttccaacttggttccattctccccatcactttcaggtataccaatcagaggtagattttgtcttttcacatagtcccatatttcttggaggctttgctcgtttctttttattcttttttctctaaacttcccttctcgcttcatttcattcgtttcatcttccattactgataccctttcttccagttgattgcatcggctcctgaggcttctgcattcttcacgtagttctcgagccttggttttcagctccatcagctcctttaagcacttctctgtattggttattctagttatatattcttctaaatttttttcaaagctttcaacttctttgcctttggtttgaatttcctcccatagctcagagtaatttgatcgtctgaagccttcttctctcagctcatcaaagtcattctccgtccagctttgttctgttgctggtgaggagctgcgttcctttgcaggaggagaggcgctctgctttttagagtttcctttttttctgttctgttttttccctatctttgtggttttatccacttttggtctttgatgatggtgatgtacagatgggtttttggtgtggatgtcctttctgtttgttagttttccttcttttctcttctttattgtcattgcaatgggattccaaaaagcagcaaagagaaacatgtttgagtcagagctttgagtgtaggtgacattggtggtaaaagtccatctccctgaagaatgactagcacactgttcattgaggacctgctgtgcacaggcatagcactggggattccacagaggtaaattcttcttcgtaatggattttgatcgcctccgaggaagatgggagataactagagctgtcccgttccgagtcttgcctttaacagcatgtgctgcttcctctttggtcagttcgtgccctgagtaaacatgtaagtcctgctcctctagtggatcccgcactggggctgcaggtggagctgcctgccagtcctgcaccgtgcgctcgcattcctcatcccttgggtggtcgatgggactgggcgccgtggagtagggggtggtgctcccgtcggggaggctcgggctgtgtccacatgcgtgtttgtgtgcccttgcacagacatgtgcacacatcaaagggaaggagaaggagctgctgttgaggatgttcagcccaataaacatggctgtgaggggtctaggttgagggcctgggcatcttccaaggcttcccatacagatcaccaagttgctttctaaaaggtagtcctggtaagtccctgtcctgagcgaacctgtcttgtcatccttgttcacacccggggttgttgtgggaggatgaacagggtcacacgtgtcaagtcgcaacacaagcctggcacttggtaggtgcccacaaaagacagctgctgtcatttctatgagtgagaacatgcggtgtttggttttttgtccttgcgatagtttgctgcgaatgatggtttccagcttcatccatgtcccaatgacccagtggcctttggcatacccctgagagcagacagagatctgctgactatgaaaaggtggcacagatccagaaaatgctgatcttttaacctggatgaacttgaaaatggccaggaagaggacccagacaggacaaaggccctgaggtgggaagatcttggcagtgtcaaggaccagataggaccatgggctgttgtttcctgactttttaatgattgccattctaactggtgtgagatggtatctcattgtggttttgatttgcatttctctgatggccagtgatgatgagcattttttcatgtgttgtttggctgcataaatgtcttcttttgagaagtgtctgttcatgtccttcgcccactttttgatggggttgtttgtttttttcttgtaaatttgtttgagttcattgtagattctggatattagccctttgtcagatgagtaggttgcaaaaattttctcccattttgtaggttgcctgttcactgtgatggtagtttcttttgctgtgcagaagctctttagtttaattagatcccatttgtcaattttgtcttttgttgcatttgcttttgggttcttggtcatgaagtccttgcccatgcctatgtcctgaatggtttttccaatgttatcttctaggatttttatagtttcaggtcttggatttaagtccttaatccattttatgtttttgtttgctttgtgaaagatcagatagttgtagatatgcggcgttatttctgagggctctgttctgttccattgatctatgtgcctatttttataacagtaccatgctgttttggttactgtagccttatagtatagtttgaagtcaggtagtgtgatgcctccagctttgttcttttggcgtaggattgacttgggtatgcgggctcttttttggttccatatgaactttaaagtagttttttccaattctgtgaagaaaggcattggtagcttgatggggatggcattgaatctgtaaattaccttgggcagtatggccattttcacggtattgattcttcctacccatgagcatggaatgttcttccatttgtttgtatcctcttttatttccttgagcagtggtttgtagttctccttgaagaggtccttcacatcccttgtaagttggattcctaggtattttattctctttgaagcaattgtgaatgggagttcactcatgatttggctctctgcttggttgctgttggtgtagagaagagctaacgatttgtgtacactaatcttgtatcctgagactttgctgaattcttttatcagttctagaagctttctagagaagtcttcagggtttttgaggtaaataattgtatcatcagcaaacagtgacagtttgactttttctttacctatttggatgctttttatttctttctcttgtctgattgctctggctagaacttctagtactgtgttgaagaggagtggtgagagtgggcatccttgtcttgttccagttctcagagggaatgctttcaatttttccccattcactattatgttggctgtgggtttgtcatacat

SEQ ID NO: 11363 - DNA, 535 bp, Homo sapiens
  SIMILAR (1)..(387): 981254mologous to Homo sapiens p40,accession number U93564,Smith-Waterman Score=656.
atggggaaaaaacagaacagaaaaactggaaactctaaaacgcagagcgcctctcctcctccaaaggaacgcagttcctcaccagcaacggaacaaagctggatggagaatgactttgacgagctgagagaagaaggcttcagaggatcaaattactctgagctacgggaggacattcaaaccaaaggcaaagaagttgaaaactttgaaaaaaatttagaagaatgtataactagaataaccaatacagagaagtgcttaaaggagctgatggagctgaaaaccaaggctcgagaactacgtgaagaatgcagaagcctcaggagccgatgcgatcaactggaagaaagggtatcagcgatggaagatgaaatgaatgaaatgaaggacatggatgaagctggaaaccatcattctcagcaaactaacacaggaacagaaaaccaaacactgcatgctctcactcataagtgggatttgaacgatgagaacatatggacacagagagaggaacatcacacaccaggtcctgtca

SEQ ID NO: 11364 - DNA, 1187 bp, Homo sapiens
  SIMILAR (1)..(789): 911254mologous to Homo sapiens ribosomal protein L3,accession number X73460,Smith-Waterman Score=1266.
cggaatattttcgacttgctctttcaaaactgcagagttgtgatctctttgatgagtttgacaaggacatggatgaagctggaaactatcattctcagcaaactaacacaggaacagaaaaccaaacactgcatgttctcactcataagtgggagcactgtccctggggtcatccaaaccagtacagtaacccagctggcctctcttctgaaaacatctccaacttcaacaatactttgagataccatattgctggtatttcaaaaactgctgccagcagggaggaggccaatggcgtgtccatagatcatgttcagcctccaagtggtctcataatcaacaaagaatctgaagtttacaagatgcttcaggagaaacaggagttgaatgaacccctgaaacagtctacctctttcctgattttgcaggaaatcctggagtctgagataaaaggggatctcaacaaccctcaggattcagaagtgttactcagctcagtctattactcagtggctgcatcaattggaaatgctcagaaggtgcccatgtgtgacaaatgtggtcctggcattgtaggcatcataccctgtaaaaagtgtgtggtggttggtaatggaggagttttgaagaataagacattaggagaaaaaatcgactcctatgatgtaataataagaatgaataatggtcctgttttaggacatgaagaagaagttgggagaaggacaaccttccgacttttttatccagaatctgttttttcagatcctattcacaatgaccctaatacgacagtgattctcactgcttttaagccacatgatttaaggtggctgttggaattgttgatgggtgacaaaataaacactaatggtttttggaagaaaccagccttaaacctgatttataaaccttatcaaatccgaatattagatcctttcattatcagaacagcagcttatgaactgcttcattttccaaaagtgtttcccaaaaatcagaaacctaaacacccaacaacaggaattattgccatcacattggcgttttacatatgtcacgaagttcacctagctggttttaaatacaacttttctgacctcaagagtcctttgcactactatgggaatgccaccatgtctttgatgaataaggtgacaatgcagagccagggcaaaggtgtttaa

SEQ ID NO: 11365 - DNA, 1119 bp, Homo sapiens
  SIMILAR (251)..(547): 971254mologous to Homo sapiens muscle specific gene M9,accession number AB019392,Smith-Waterman Score=499.
atggatgaagctgaaaaccatcattctcagcaaactaacacaggaacagaaaaccaaacaccacatgttctcactcataagtgggagctgaaaaatgagaacacagggacacggggaggggaacgtcacacacttgggcctgtcagggggtgggggcctaggggagggatggcattcggagaaatacctattgtagatgacaggttgatggatgtatcccagaacttaaagtataattttaaaaaaaaagagggagaagagggagaaggggaagaagaaggagaagaagaggaagaagaagagaagaaggagggggaggaggaggaggaagcttctggaggacccatcacaccaagcccaaggaccagcacaaaaaagacacaatgggccactttagaagctgtgctttccaagagggctttgtcgtccatgttcctctgctgtcttctgaaaagtaaagataagtgggaagaaaggtgggagctcctccagggagagctgccaaattcagctccagatacttttccagcccctttcacatttgcatggggccctgcaggatctgacctgctcgtggctacgaagcagcctcctccactctgcccctctgcctctccagacccagacctggctcctgctttgttcttattcagtaattgcaagctttctttggggcataggaaagagaagagggacgctgtggcttgccggggaagaaaacctttaaaagtcatccttgtgaattttggacagctgacttcttataaagagcttccctcctacgcgttgggcctaaagcccagtccctgggacagcactcatgcacctctggccctcccctatcactcccctgtctttcaagaaggcaaaagcaccagccttgcaatgggaatcttccagccagggcactttccttcagtaaaaaccctttgtgcccctgcaggcacttcctgtgaatcattgtccggccccggagctaccggctttgcaaactgcaggtttctgcaggaagccacagatgaggtgtgccaatctgcccaatctgctcagagacctggctccggaaaacccaatagtatgtgctgggaaaaaagtcaggccatctgggccccggtctga

SEQ ID NO: 11366 - DNA, 2481 bp, Homo sapiens
  SIMILAR (2292)..(1675): 871254mologous to Homo sapiens putative p150,accession number U93574,Smith-Waterman Score=909.
ctattcttgttcctctcctttagggtctacaattacatgtcttttgggcaagttcattgactgattatcacatgactcactgattctgttttcttttttctgtctcttttccctacttgtttcagtttgaagcatttctgttgctacatctgcaagttcagtaatctgttcttcttcaatatctaatgtatcattaatctcattcagtgtatttttcatctcatatattgtaggttttatctcttgctgtggcaaatccactgctactatgtatgctaggtagtttttatattcatcatctatagcatgttttaaggtttcggaacctagattctttttttttttagtgaacataatcattagaagactttgcaccttggttgggctgtccctttgctcctctttgttgacaggcagtcttctaaggctgtcctttctccctgtaaccttccgtctgtcagtctttgccggccttgcatacataagcctctctttgtgagtcaatcgagatgaattaacagtcctattagtagtctggggttcttcatgagctgtagactctgattcagcagggagtgggacctgagcttctgcaggtggtggtgatgctgctagttcatggaccacactttgagcagcagggctgtagcatctagtgctcctgcttacaggtttctccctgtttttccctattttgaggcacagtttcaggcagtcaggctggttctgctgcatttgcttggcaacatcacctccctccagcctctgcagcttccacccttgggctgctgcacgtgcacgtacatttccactgctgtggctcccacagtgcacagttggggactgagtctgaagctgtgtcacaataacatcactcagtctgggcaacacagtgggaccccatctcatcacccatgaggccactggatcctgaaacctttctcctcgccttccacctgccctgtctgcagcacattcgttgtactgtcgggggcagtgcaagctccaggtggctcctctgcatttccacctgattatcgtttttccaggtggagagtgcacagtcaggatcagaattaggcggttctgctttctctctctggctcttctgggaacttcataccatctctcggtccccttgacccaggaagaaccgttagcaggtcttgttgtacttaaatcacaggtgttcagggaaaagcccatggactcctgttgagcagctctgaggcgtggtgcactaagtatccagagatcaacatcatccactctgaggaccacaatgcgtagacagatgagtaatctagcaattaccgggtagtggttaggttcagaccatccaggggagccccagtccctgacctcatagatctcatagtccatgcctgtgagcacagggacagcggcaagaaacaattcaggggggcaggtccttgagtaggacactgtatctttagggaagaagtgggacttcactaagccaaaagcttgcacagctgtccagtttgaccggggattccacaccactatgagagattcgtgactaagtggttgacccaagggtaggatgaagattttctctcttaggtgcctatgagtgacaacatgcagtgtttggttttccgtgcttgtgatagtttgctgagaatgatggtttgcagcttcatccacgtcccatgctgttttggttaccgtagccttgtagtatagtttgaagtcaggtagcgtgatgcctccagctttgttcttttggcttaggattatcttgacaatgcgggctcttttttggttccatatgaactttaaagtagttttttccaattctgtgaagaaagtcattggtagcttgatggaaatggcattgaatctataaattactttgggcagtatggccattttcatgatactgatacttcctatccatgagcatgaaatattcttccatttgtttgtatcctgttttatttcgttgagcagtggtttgtagttctccttgaagaggtccttcacatcccttgtaagttggattcctaggtattttattcccattgtagcaattgtggatgggagttcactcctgatttggctctctgtttgtctgttattggtgtataggaatgcctgcgatttttgcacattgattttgtatcctgagactttgctgaagtcgtttatcagcttaaggagattttgggctgagacgatggggttttctaaatatacaattatgtcatctgcaaacagggacaatttgacttctttttctaattttttcctgattgaataccctttatttctttctcttgcctgattgccctggccagaactcccaatacttctgaagcccacttctgtcaactcatcaaagtccttctccatccagctttgttccattgctggcgaggagctgcaatccattggaggagaagaggtgctctgagttttagaattttcagcttttctgctcttgtttctccccat

SEQ ID NO: 11367 - DNA, 3368 bp, Homo sapiens
  SIMILAR (616)..(1242): 1001254mologous to Escherichia coli phosphoenolpyruvate carboxykinase,accession number U18997,Smith-Waterman Score=1092.
atggcgaagaagttaaaaactttgaaaaaaaaaatagatgaatggataactagaataatcaatgcagagaagtccttaaaggacctgatggagctgaaaaccatggcacgaggactacatgatgaatgcacaagcctcagtaaccgatgcaatcaactggaagaaagggtatcagcgatggaagacgaaatgaatgaaatgaagcgtgaagagaagtttagagaaaaaagaataaaaagaaacaaacaaagcctccaagaaatgtgggactatgtgaaaagaccaaatctacgtctcattggtgtacctgaaagtgacggggaggctggaaccaagttggaaaacattctgcaggatattatccaggagaagttctccaatctaggaaggcaggccaacattcaaattcaggaaatacagagaacaccacaaagatactcctcgagaagagcaactccaagacacataattgtcagattcaccaaagttgaaatgaaggaaaaaatgttaagggcagccagagagaaaggtggggttacccacaaagggaagcccatcagactaacagctgatctcttggcagaaactctacaagccagaagagagtgggggccaatattcaacattcttaaagaaaagaattttcaatacagaatttcatatccagccaaactaagcttcataagtgaaggagaaataaaatactttacagacaagcaaatgctgagagattttgtcaccaccaggcctgccctaaaagagctcctgaaggaagcactaaacatggaaaggaacaactgtgcaatcaaactagaactcaggattaagaaactcactcaaaggcgctcaactacatggaaactgaacaacctgctcctgaatgactactgggtacataacgaaatgaaggcagaaataaagacgttctttgaaacaaacgagaacaaagacacaacataccagaatctgtgggacacattcaaagcagtgtgtagaggaatggccatactgcccaaggactggttttttgaaaagatcaacaaaattgatagaccactagcaagcctaataaagaagaaaagagagaagaatcaaatagatgcaataagaaatgacaaaggggatatcaccaccgatcccacagaaatacaaactaccatcagagaatgctataaacacctctacacaaataaactagaaaatctagaagaaatggataaattcctcgacacatacaccttcccacaactaaatcagggaagaagtcgaatccctgaagagaccaataacaggctctgaaattgaggcaataattaatagcttaccaaccagaaaaagtccagaaccagatggattcacagccgaattctaccagaggtacaatgaggagctggtaccattccttctgaaattattccaatcaacagaaaaagagggaatcctccctaactcattttatgaggccagcatcatcctgacaccaaagcctggcagagacataacaaaaaaagggaattttagaccaatatccttgatgaacattgatgcaaaaatcctcaataaaatactgacaaaccgaatccagcaacacatcaaaaagcttatccaccatgatcaagtgggcttcatccctgggatgcaaggctggttcaacgtacaaaaatcaataaacataatccagcatataaacagaaccaaagacaaaaaccacatgattatctcaatagatgcagaaaaggcctttgacaaaattcaacaacccttcatgctaaaaactctcaaccaattaggtattgatgggacatatctcaaaataataagagctatctgtgacaaacccacagccaatatcatactgaatggacaaaaactggaagcattccttttcaaaacgggcataagacagggatgccctctctcaccactcctattcaacatagtgttggaagttctggccagggcaatcaggcagaagaagggaataaagggcattcaattaggaaaagaggaagtcaaattgtccctgtttgcagatgacatgattgtatgtctagaaaaccccaaagtctcagcccaaaatctccttaaactgataagcaacttcagcaaagtctcaggatacaaaatcaatgtgcaaaaatcacaagcattcttttacaccaataacagacaaacagagagccaaatcatgagtgaactcccattcacaattgcttcaaagagaataaaatacctaggaatccaacttacaagggatgtgaaggacctcttcaaggagaactacaaaccactgctcaatgaaataaaagaggatacaaacaaatggaagaacattccatgctcatgggtaggaagaatcaatatcgtgaaaatggccatactgcccaaggtaatttatagattcaatgccatccccatcaagctaccaatgactttcttcacagaattggaaaaaactactttaaagttcatatggaaccaaaaaagagcccatattgccaagtcaattctaagccaaaagaacaaagctggaggaatcacgctacctgacttcaaactatactaccaggctacagtaaccaaaacagcacgggacatggatgaagctggaaaccatcattctcagcaaactatcacaaggacagaaaaccaaacaccacatgttctcactcacagggacttggtgccctgcatcccagctgctccagccatggctaaaaggtggcaaggtacagctcaggccatggcttcagaggatgcaagccccaaaccttggcagcttcaatgtgatattgagcctgcaggtgcacagaagtcatgaattgaggtttgggaacttctggctagatttcagaggatggatagaaatgcctagatgtccaggcagaagtttgctgcaggggtggggccctcatagagaacctctgctaggacagtgcagaagtgaaatgtggggttggagctgccacagagtccccactggggcacttcctagtggagctgtgagaagagggccatcatcctccagaccccagaatgttagatccatcaacatctcgcactgcgcacctggaaaagctgcaaacactcaacatcaacccatgaaagcagctgggatgggggatataccatgcaaagccaacgggacagagctgcccaaggccataggggcccacttcttgcatcatcgtgacctggacgtgagacatggagtcaaaggagatcattttggaagtttaaggtttaataactgccctactggatttcagacttgcatggatcctgtagccccttttttggccagtctctcccatttggaatggctgtatttacctgatgcctgcacccccattgtatctaggaagtaa

SEQ ID NO: 11368 - DNA, 4289 bp, Homo sapiens
  SIMILAR (155)..(2947): 1001254mologous to Homo sapiens transmembrane receptor UNC5C,accession number AF055634,Smith-Waterman Score=4945.
atggaatactatgcagccataaaaaaggatgagttcatgtcctttgcagggacatggatgaagctggaaaccatcattctcagcaaactatcacaaggacaaaaagccaaacaccgcatgttctcactcatagaaatacaaactaccattagagaatactataaacacctctacgcaaatgaactagaaaatctagaagaaatggataaattcctcgacacatacaccctcccaagactaaaccaggaagaagttgaatccctgaatagatcaataacaggctctgaaattgaggcaatgattaatagcctaccaaccaaaaagagtccaggaccagacggattcacagccaaattctatcagagcccatcccttactggcaagaatgacaaagagcctgagattttaccctacttccatgctgacttccttgtggttcctggaacgcaccaagcatcccctgtccttatggtcttggggcataagtcatttcctcataggaactctcctccaagcgtctgcatggctaacttctttactcaaaagccaccttctcaatctattcacaacgctgtgaacacccacacggatcctccactgtttctggtgctgctgaaggacagaggattgcttgtcatctggtgccatgagtcacaaggagacgaattgtggcacttggtacttctagattccaagtgctgcttcggcagcatgacacacagaatggaatggtcaggaccctcatctgcaggtctgttggagtttgctggaggtccactccagaccctgtttgcctgggtatcaccagcagaggcgtaaagtaatccagagaacagaaaatgttattaagaaaatcataggagaaattatatttattattcattaagtagaagtgtatcatcataaaagtcttcactctcatcgtcttcacattgagtggtctatgagtgagaacatgcgatgtttggttttttgtccttgtgatagtttgctgagaatgatggtttccagcttcatccatgtcccagggcgcacatttgtgtggcaggataacaatgaacgagggtccagtcctcttttccacttctctggcatgatctcatcggggccagtggggctgggcagggtgatgcggcctccagagggcgggctcaagcttgcccatggtttttcgtcctgggccaccacggccgctgcgtagggctccacgtagaggcggcggacggaaggcctcgcgtcctggagactgctgttccgctcctcaggaaggctggcagcgtgggccagagttaggcccctgggatcatcaagggcagggccggcccgcttggcctccttgggctccagcgatgatggccggctgaagccgccatagtgggggtgcttgcctggcttccgctttcccaggaagcctagcgggggccgcccaccggacacagtcttggcgtggttcttgggtgtgaaccccgtgagggtcaggctatggagaaactcggcacatgagtgatcgggatttgggccctcgccctggggatcctggcccggccccagaggggttttcacgtcgtgcacttgcaggacgtcgggggcgctgccgcttaggccgctaagggtctgctgcgcaatgtcgtgagatgataggtagaccaggtccaggtctctggggctcagggcatcgctggagtcgtagtcactgttggtggggaggaagacttctgagcaggcttcttcatcagagcagggctgtgaatttataagtgagaacatgcagtgtttggttttctgtccttgtgatggtttgctcagaatgatggtttccagcttcatccatgtccctacaaagtaggacacgaactcatccttttttatggctgcatagtattccatggtgtatatgtgccacattttcttaatccaggctatcgttgatggacttttgagttggttctacaccctcttgctattgtgaatagtgccgcaataaacatacgtgtgcatgtgtctttatagcagcatggtttataatcctctgggtatatacccagtaatgggatggctgggtcaaatggtatttctagttctagatccctgaggaattgccacaccgacttccacaatggttgaactagtttacagtcccaccaacagtgtaaaagtgttcctatttctccacatcctctccagcacctattgtttcctgactttttaatgatcaccattctaactggtgtgagatggtatctcattgtggttttgatttgcatttctctgatggccagtgatgatgagcattttttcatgtgttttttggctgcataaatgtcttcttctgagaagtgtctgttcatatcctttgcccactttttgatggggttgtttgtttttttcttgtaaatttgtttgagttcattgtagattctggatattagccctttgtcagatgagtaggttgcaaaaattttctcccattctgtaggttgcctgttcactctgatggtggtttcttttgctgtgcagaagctctttagtttaatgagatcccatttgtcaattttggcttttgttgccattgcttttggtgttttcgacatgaagtccttgcccatgcctatgtcctgaatggtattgcctaggttttcttctagggtttttatggttttaggtctaacatgtaagtctttaatccatcttgaattaatttttgtataaggtgtaaggaagggatccagtttcagctttctacatatggctagccagttttcccagcaccatttattaaatagggaatcctttccccattgcttgtttttgtcaggtttgtcaaagatcagatagttatagatatgcggcattatttctgagggctctgttctgttccattggtctatatctctgttttggtaccagtaccatgctgttttggttactgtagccttgtagtatagtttgaagtcaggtagcatgatgcctccagctttgttcttttggcttaagattgacttggcaatgtgggctcttttttggttccatatgaactttaaagtagttttttccaattctgtgaggaaagtcattggtagcttgatggggatggtgttgaatctataaattaccttgggcagtatggccattttcacgatattgattcttcctacccatgagcatggaatgttcttccatttgtttgtatcctcttttatttccttgagcagtggtttgtagttctccttgaagaggtccttcacatcccttgtaagttggattcctaggtatgttattctctttgaagtgattgtgaatgggagtccactcatgatttggctctctgtttgtctgttattggtgtataagaatgcttgtgatttttgcacattgattttgtatcctgagactttgctgaagttgctcatcagcttaaggagattttgggctgagacagtggggttttctagatatacaatcatgtcatctgcaaacagggacaatttgacttcctcttttcctaactgaatgctctttatttccttctcctgcctgattgccctggccagaacttccaacactatgttgaataggagtggtgagagagggcatccctgtcttgtgccagttttcaaagggaatgcttccagtttttgcccattcagtatgatactggctgtgggtttgtcatagatagctcttattattttgagatacgtcccatcaatacctaatttattgagagtttttagcatgaagggttgttgaattttatcaaaggccttttctgcatctattgagataatcatgtggtttttgtctttggttctgtttatatgctgttttcctgtccacagcggaaagggcttcaggatggaaggagaaaggagcttcacgcgccccactttgtccgtgagtcctcggtacaccagctccatatagtgctcccgggtgaaaaagcaaccccgagtagtcatgcttgcccctgaaaccatgtgatcctggatcagtcccgccaatggttggccatccttgggaacaaggtactgctgatcagtgcaggccaggacgtaggcctcggcccggcccagctcactctgggggaaatgggcattcatctcgtctccatcaaagtcggcattataggccttgcagttggcatagtggagccgcagcactttctcttcaggcaggatgcgggcacggtgggcctggatggagggtctgtgcagtgtgggctgtcggttcagtagcagaatgtccccattcttcacatgccggcacaccgtgatcacatgtgagtacat

SEQ ID NO: 11369 - DNA, 1559 bp, Homo sapiens
  SIMILAR (1)..(270): 801254mologous to Homo sapiens hepatocellular carcinoma- associated antigen 59,accession number AF218421,Smith-Waterman Score=363.
  misc_feature (1)...(1559): n = a,t,c or g
atgtctgcgagccaggattcccgatccagagacaatggccccgatgggatggagcccgaatgcgtcattgagagtaactggaatgagattgttgacagctttgatgacatgaacctctcggagtcccttctccgtgacatctatgcctatggttttgagaagccctctgccatccagcagcaagccattctaccttgtatcaggggttataatgtaatcgctcaagcccgatctgggactgggaaaatggccacatttgccatatcgattctgcagcagattgaattagatctaaaagccacccaggccttggtcctagcacccactcgagaattggctcagcagatacagaaggtggtcatggcactagtagactacatgggtgcctcctgtcatgcctgtgtcaggggcaccaatatgcgtgctgaggtgcagaaactgcagatggaagctccccacatcatcgtgggtacccctagccgtgtgtttgatatgctttaccggaagatacctggccccccaaatccatcaggatgttggtactgaatgaggctgacgaaatgttaagccgtggattcaaaggacagatctatggacatatccaaaaggctcaacagcaccaccaagggtagttttgctgtcagccacaatgccctttgattgtgcttgaggtgaccaagaagttcatgaggggcccccattccggattcttgtcaagaaggaagagttgcccctggagggtatccgccatttctacatcaacgtggaaccagaggaattgcaacttggacacactatgtgtactggtatgaaccctgacccatcaccccaggcagtcatcttccatcaaccacccggagggaaggtggactggcctcacccgagaagatgcatgctcgagattccactgtaccccccatgcatggagatatgaccaaaaaggaaccgagacggtgattatgagggaatttcgttctggctcctaaccagagttttgaattaccccactgaccctgcctggccagaggccattgatgtgcaagcaggtttcctttaagtcatcaacctatgacccttcccccaccaaccaggggaaaactattaatccacaggaatcggtcgagggtggaccggtttggccgtaaaggtgtggctattaacatggtgacagaagaagacaagaggactcttcgagacattgagaccttctacaacacctccattgaggaaatgcccctcaatgttgcttgacctcatctgaggggctgtcctgccaccacagccccagccagggctcaatctctgggggctgaggagcagcaggaggggggagggaagggagccaagggatggacatcttgtcattttttttctttgaataaactgtcactttttgaggcnnnnnnnnnnnnnnnnnngggggggccgttttaaagaacccttgggggggccaaattttaccggggatggcgagggaatagttttttccttatagggggccatataaaaacctacctgggaatctttggaaagaaaccttacttctggggggagacaac

SEQ ID NO: 11370 - DNA, 587 bp, Homo sapiens
  SIMILAR (471)..(788): 851254mologous to Homo sapiens Human secreted protein clone bf157_16 protein sequence SEQ ID NO:94,accession number Y94944,Smith-Waterman Score=468.
  misc_feature (1)...(587): n = a,t,c or g
gggtacatggccgggcttcctcgttgggggttgggcaccaattcccaagggccatggacagataaaacctattgncttaagcctcccgtatatggggcctgcaagctcttggacatggagctggaaatggctttttttgtaggccctggaaacagattgggagagccgatcccatttccaaggcccatgagcccatttttggaatggtccttatgaacgnctggagtgcccgacacattcaaaagtgggagtatgtccctctcgggccattccttgggaaaagttttgggacccctgtgaagtcatcataacagggttctgccagggggatggttacgcactcggctttggccagtgtgctggaaaagtgctgcctgctttcctgccatcatgagattttttttgcttttttggaaacaaagggctcaagcccccctttcaaccctgtgattggggtcctccctcggggtgtaggcctggtcccccattcagtgacaaataaagccattgtgttttggggcctgccctgccnnnnnnnnnnnnnnnnnnnnnnnnnnnnnnnnnnnnnnnnnnnnnnnnnnnnnnnn

SEQ ID NO: 11371 - DNA, 1484 bp, Homo sapiens
  SIMILAR (461)..(547): 371254mologous to Homo sapiens Human secreted protein encoded by gene 129 clone HHSCV65,accession number W74857,Smith-Waterman Score=42.
  misc_feature (1)...(1484): n = a,t,c or g
atgtccttcatcccggtggccgaggattccgacttccccatccacaacctgccctacggcgtcttctcgaccagaggcgacccaagaccgaggataggtgtggccattggcgaccagatcctggacctcagcatcatcaagcacctctttactggtcctgtcctctccaaacaccaggatgtcttcaatcagcctacactcaacagcttcatgggcctgggtcaggctgcctggaaggaggcgagagtgttcttgcagaacttgctgtctgtgagccaagccaggctcagagatgacaccgaacttcggaagtgtgcattcatctcccaggcttctgccacgatgcaccttccagccaccataggagactacacagacttctattcctctcggcagcatgctaccaacgtcggaatcatgttcagggacaaggagaatgcgttgatgccaaattggctgcacttaccagtgggctaccatggccgtgcctcctctgtcgtggtgtctggcaccccaatccgaaggcccatgggacagatgaaacctgatgactctaagcctcccgtatatggtgcctgcaagctcttggacatggagctggaaatggctttttttgtaggccctggaaacagattgggagagccgatccccatttccaaggcccatgagcacatttttggaatggtccttatgaacgactggagtgcacgagacattcagaagtgggagtatgtccctctcgggccattccttggggaagagttttggggacactgtcttctcccgtgggtggtgcccatggatgctctcatgccctttgctgtgcccaacccgaagcaaggacccaggggcccctgccggtatctgtgccatgacgagccctacacatttgacatcaacctctctgttaaccctgaaaggatgaaggaatgagccaggcggctacccatatgcaaagtccaaattttaaagtacatgtactggacgaatgctgcagcaagctcactcacccactctgtccaacggctgcaaacctgccgcccgggggacctcctgggctttctgggacccatcaagtgggcccggagcccagaaaaatttcggctcccatgttggaactgtcgtggaagggaacgaagccccatagaccctggggaatggtcagacccaggaagtttctgctggacaggggatgaagtcatcataacagctatggctacccgggacttcaagtggtactncccagggggatggttacccgcatcggctttgggcaagtgtgctggaaaagtgctgcctgctctcctgccgatcatgagattttttctgcttttttgaaaacaaagggctcaaagcaccccttttcaaccctgtgactgggggtcctcccctcgggctgtaggcttggttccgccatttcagttgacaaattaaagccattgtgctctgaggcctgccctgccgcaaaaaaaaaaaaaaaaaaa

SEQ ID NO: 11372 - DNA, 431 bp, Homo sapiens
  SIMILAR (11)..(259): 951254mologous to Homo sapiens eukaryotic initiation factor 4AI,accession number D13748,Smith-Waterman Score=400.
  misc_feature (1)...(431): n = a,t,c or g
cccacgcgtccgcccacgcgtncgcactgacctgctggccagaggcattgatgtgcagcaggtttctttagtcatcaactatgaccttcccaccaacagggaaaactatatccacagaatcggtcgaggtggacggtttggccgtaaaggtgtggctattaacatggtgacagaagaagacaagaggactcttcgagacattgagaccttctacaacacctccattgaggaaatgcccctcaatgttgctgacctcatctgaggggctgtcctgccacccagccccagccagggcttaatctcttggggctgaagagcancangaggggggaaggaagggagcccagggaaggacctcttggccttttttttctttgaataaatggcactttttgaggccnnnnnnnnnnnnnnnnnnnggggcgggcgtt

SEQ ID NO: 11373 - DNA, 282 bp, Homo sapiens
  SIMILAR (1)..(1047): 1001254mologous to Homo sapiens Human secreted protein clone bf157_16 protein sequence SEQ ID NO:94,accession number Y94944,Smith-Waterman Score=1848.
atggaatactatgcagccataaaaaaggatgagttcatgtcctttgtaaggatatggatgaagctggaaaccatcattctcagcaaactatcgcaaggacagaaaaccaaacaccgcaggttctcactcatagatgggaccatcacagaagctttacaaggactgaaaactctagccaacgaactggcagaaaatgctggaattgatgacccacttgtgggttggctagaagttggtttggaaagacatggtcagggaactgactatggcctagagaaatga

SEQ ID NO: 11374 - DNA, 348 bp, Homo sapiens
  SIMILAR (75)..(1): 841254mologous to Homo sapiens Human secreted protein, SEQ ID NO: 7217,accession number G03136,Smith-Waterman Score=111.
atggatgaagctggaaaccatcattctgagcaaactatcacaaggacagaaaatcaaacactgcatgttctcactcggcacaaaaatgctctccacacggcacccgcactacctgtcattccagatgcttaccgctttagtgcctctttcagcaatatgaagttaaatccaggtactgtgagtgctgacttgacttttggttcttatgaaggtggggtggacctggagcctgtgtccactggagcaggtctagatcttgggttcatggtggccagcctgacagtaaggctcactgaagttgtcctaatggttgggtccacagggatagtcctgatcataagtccatag

SEQ ID NO: 11375 - DNA, 414 bp, Homo sapiens
  SIMILAR (18)..(275): 981254mologous to Homo sapiens Human secreted protein clone bf157_16 protein sequence SEQ ID NO:94,accession number Y94944,Smith-Waterman Score=466.
atggaatactatgaagccataaaaaaggatgagttcatgtcctttgcagggacatggatgaagctggaaaccatcattctcagcaaactatcacaggaacagaaaaccaaacactgcaggttctcactcacctgcgagcggcctggtgatgtcttcacagatgagggcgtgggagcccacggcccgggccgggcggaggcagcacgggaggagcggggccgggcgctggtccatccctcgcaccgcccctccccgcccaaaatgcagagggactcggagggaggcgacggggaaataaatacctttgactttgtggctaaggttaacgggaactgccaccccgagggcgacttgggcaccgggctcccggccctggccattcccggggcaggcggggcgggcacgggtgcctga

SEQ ID NO: 11376 - DNA, 375 bp, Homo sapiens; identical to SEQ ID NO: 11089
  SIMILAR (207)..(76): 881254mologous to Homo sapiens Human secreted protein, SEQ ID NO: 7217,accession number G03136,Smith-Waterman Score=199.

SEQ ID NO: 11377 - DNA, 270 bp, Homo sapiens
  SIMILAR (270)..(160): 831254mologous to Homo sapiens PRO1546,accession number AF116638,Smith-Waterman Score=158.
cctgaagcctcgccggaactcgcgtctggggccagcagggggcactagagtcaacagggactgtatgcaaaacccacttcctcccaggccctctagggggatggtcaggcttctgcagagatggggaggatcctttcctatgagtgagaacatgcggtgtttggtttttcgtccttgtgacagtttgctgagaatgatggtttccagcttcatccatgtccctacaaaggacatgaactcatcaatttttatggctgcatagtgttccat

SEQ ID NO: 11378 - DNA, 420 bp, Homo sapiens
  SIMILAR (313)..(417): 821254mologous to Homo sapiens putative p150,accession number U93574,Smith-Waterman Score=144.
atggagcagctctcaccgatggccagctcctaccactctgaccacgctgctgtctccctggccatcttctttgactacaaaggaataaaactaggtatcaagctggcggctgttcccagtgccttgcccacccctgccgggccgtcggactcggcggggcccctgtggcatccctgtccagtccctgtcaccacccagtttttccctctggacccaggaattcaaagtaagcaaggaggtccgctgctccagttggctgcaaataattacaaccttaagcccaagcagcactttgggtcctggtttgggaccatgaagcggctcgggacatggatgaagctggaaaccatcattcttagcaaactatcacaaggacaaaaaaccaaacaccgcatgttctcactcatagatgggaattga

SEQ ID NO: 11379 - DNA, 334 bp, Homo sapiens; identical to SEQ ID NO: 4628
  SIMILAR (35)..(139): 911254mologous to Homo sapiens Peptide sequence derived from a human secreted protein,accession number Y40039,Smith-Waterman Score=159.

SEQ ID NO: 11380 - DNA, 268 bp, Homo sapiens; identical to SEQ ID NO: 11093
  SIMILAR (1)..(174): 621254mologous to Homo sapiens PRO1546,accession number AF116638,Smith-Waterman Score=188.

SEQ ID NO: 11381 - DNA, 564 bp, Homo sapiens
  SIMILAR (537)..(406): 861254mologous to Homo sapiens Human secreted protein, SEQ ID NO: 7217,accession number G03136,Smith-Waterman Score=185.
atgtttgccccacttgagcttgatggtggctgcagctcaactgacagtctgagaggcagcagcctggcatgtcccccactggaagggacaaagcagccactgttcagtaggctaatagggcttgccattttggagaatccatggaaccattatcagagaagaagaggccctggaggataccaaatggcagttgggctggccaattctagtggatatgcaactgagatggcaaaggccctctatagacccagatcccatctacctgagctctccttagctttcttttatgaacacaatgcagaggagcctttgttgtcatttgagcccttccaacacctcagacacagaatggggaagtggaaatcctgggaggaagaggcaataatggaggctctgaagttgaagagggacatggatgaagctggaaaccatcattctcagcaaactaacacaagaacaggaaaccaaacactgcatgttctcactcctaagtgggagttgaacaataagaacacatggacacagggagaggaacatcatacaccagggcctgtaggcggatga

SEQ ID NO: 11382 - DNA, 264 bp, Homo sapiens
  SIMILAR (85)..(1536): 991254mologous to Homo sapiens similar to Kelch proteins; similar to BAA77027 (PID:g4650844),accession number AC006963,Smith- Waterman Score=2565.
atggaatactatgcagccataaaaaatgatgagttcatgtcctttgtagggacatggatgaaactggaaaccatcattctcagcaaactattgcaaggacaaaaaaccaaacactgcatgttctcactcatagcacgagacattcagaagtgggagtatgtccctctcgggccattccttgggaagagttttgggaccactgtctctccgtgggtggtgcccatggatgctctcatgccctttgctgtgcccaacccgaagcag

SEQ ID NO: 11383 - DNA, 363 bp, Homo sapiens
  SIMILAR (1)..(111): 811254mologous to Homo sapiens PRO1546,accession number AF116638,Smith-Waterman Score=158.
atggaatactatgcagccataaaaaaggatgatttcgtgtcctttgtagggacatggatgaagctggaaaccatcattctcagcaaactattgcaaggacagaaaaccgaacaccgcatgttctcactcatagggctggtcaccaggccagcagcagtaccagcagcatttgggagcttgttagaaatgcatagccccgagctgcacaccacgccgtgtgaatcagaaactttggaggtggtgttagggatatgtggggtacgagctcgaattcgtaatcatggtcatagctgtgtcctgtgtgagattgtgatcgctcacatttcacacacatacgagctggagcataagtgtaaagctgtg

SEQ ID NO: 11384 - DNA, 309 bp, Homo sapiens
  SIMILAR (150)..(55): 871254mologous to Homo sapiens Human secreted protein, SEQ ID NO: 7217,accession number G03136,Smith-Waterman Score=140.
atggaatactatgcagccacaaaaaatgatgaggtcatgtcctttgtaggacatgatgaagctggaaaccatcattctcagcaaactaacacaagaacagaaaaccaaacaccacatgttctcactcataagtgggagttgagcaatgataggtcatatccctacgattatcgaagaaatcacaccgtgctcgatttacggaaatctcagccgatccccgccttgaaatcatccgctcgatgtcaaaccaacgatgatgatcgcgagtctcgccacgatgtttactgcataacttatcaacagcgcctg

SEQ ID NO: 11385 - DNA, 738 bp, Homo sapiens
  SIMILAR (759)..(373): 591254mologous to Homo sapiens dJ591C20.2.1 (tumor protein D52-like 2),accession number AL118506,Smith-Waterman Score=346.
atggatgaagctggaaaccatcattctgagcaaactatcacagggacagaaaaccaaacaccggatgttctcactcatagcctggtggcggcggcggtaacggagcgcggggctctggcaggagccggcggaggcaaaggcagcgccaaccgagagccgcgcgcaggctggagggagacccgcggcgaggagccagcgagagcgctcggcgctgggctgtttcccggccgagggaggcgaacttctcatggggaagaagtggagggatgcggcggaaatggagcggggctgctccgaccgcgaggacaacgcggagagccgcagacgcagccggagcgccagccggggcaggtttgccgagtcgtggaaaaggttaagttccaagcaggggtccaccaaacgctcgggactcccgtcgcagcagacgccgacagcactcttgcttccactaatgctataattacccttatcagcaggtaccaaccacagattatcacaccttgtgcagacaagtgggcaactgagagagtgtatggaaacagcagtgagtatgtagaaagcacagtgctgccaagccactcctgcgatgctttagaacatgtagcagcatatgtagcagcacctctaaatattgaccagacaagggcaggattctacccaatggaaaactctgatagcctattgaagtctccatcaatctatgtcatgtcttttgatgacagaatgacatattctttg

SEQ ID NO: 11386 - DNA, 2031 bp, Homo sapiens; identical to SEQ ID NO: 11361
  SIMILAR (436)..(819): 1001254mologous to Homo sapiens sperm protein 10,accession number M82968,Smith-Waterman Score=685.

SEQ ID NO: 11387 - DNA, 1379 bp, Homo sapiens
  SIMILAR (375)..(716): 581254mologous to porcine endogenous retrovirus pol,accession number Y17013,Smith-Waterman Score=360.
acttaaaagatgccgtctttagcatcagaatatctcctgagagccagaagctgtttgcctttcagtgggaagatccggagtcaggtgtcactactcagtacacttggacccagcttacccaagggtttgagaactcccctactatctttggggaggccctggctcgagacctgcaaaagtttcctgctaaagacctaggctgcatcttgctcctgtacatggatgaccttctgctgggacactccacggcagtcaggtgcgcaaaagggatggatgccctgcttcagcacctggaggactgtgggtataaggtgtccaagaagaaagctcagatctgcagacagcaggttacaaagtggggcgattgggagcgctttgaatgggaacctctacaacagcaagccttttgtaagttaaaggaaaaatttatgtcggccccagccctaggactaccagatttgacaaagccctttacactctatgtgtcagaaagagaaaaaacggcagttggagttttaatccagactgtggggccctggcctacaccagtggcctatctctcaaaacaactagatggggtttccaaaggctggccaccatgtctaagggccctggcagcaacagccctgttagcacaagaagcagataaactaacccttgtgcaaaacctgaatataaaggccccccatgctgtgggcacttcagcccagaagcctgagctcattgctttaactcgggctctagaactcagtgaagggacatggatgaagctggaaaccatcattctcagcaaactatcacaaggacaaaaaaccaaacactgcatgttctcacggggatctctagatcgacttgagcatgcagttgcctggcgtcgttacaggtcggactggaaaccgggtcccaattatcgcttgagaatccccttcgcgtgggtatacaaaggcgacgatgcttcacgtgcgctgtggatggcgaaggtttcctacttggggttccgatggcctaactgcaaaggctggggccccaagcttgtaatggctaagagagagacgcggagggagagggagagagagagagagagagagagagagatggagagagagagagacagagagagagacagacagagagacagatcaacgcgacagaaagttaacaaggatatccaggaactgaactcacctctgcaccaagcagacctaatagacatctacagaactctccaccccaaatcagcagaatatacattcttctcagtactgcactggacttactccaaaattgaccacatagttggaagtaaagcactcctcagcaaatgtaaaaggacagaagttataacaactgtctctcagaccacagtgccatcaaactag

SEQ ID NO: 11388 - DNA, 1247 bp, Homo sapiens
  SIMILAR (385)..(669): 1001254mologous to Homo sapiens potassium channel TASK3,accession number AF212829,Smith-Waterman Score=479.
atggccctgcgcagtggggcgggctgcttcggccgggtctggcgcagggtgtcggggttcccggacgcctggccccggcgctcgagcagcctcctgtgcctgtccgccttctcggctgagcccgggcccgcgccgcccctgccccgccagccgcctcgcggtggcggtggctgtggcggccccagcggagggggccccccccagcctccccgccccccgcctccccgctgctgctgctgctgctgccgccgccgcttacaacttggaggcggcggcggcggcggcggaggaggaggcggcggcggccgccgggcgctgcagtgggacgcgcgcggctgtgagcctgcgggacatgccccccgcgccggctccttgctggcggccatgaagaggcagaacgtgcggactctgtccctcatcgtctgcaccttcacctacctgctggtgggcgccgccgtgttcgacgccctcgagtcggaccacgagatgcgcgaggaggagaaactcaaagccgaggagatccggatcaaggggaagtacaacatcagcagcgaggactaccggcagctggagctggtgatcctgcagtcggaaccgcaccgcgccggcgtccagtggaaattcgccggctccttctactttgcgatcacggtcatcaccaccataggatcattaaaaaagaagaaaccatcagatcttagaaatcagatctcatctgcagagtgtagaggacaatttgaaatcgggcttaggaagcactgcctctttgtagatgtcatggacacagccaagaaatggggcagaagtggggtttcttctgattctggggtacatcaaagagacacctcggaatgcggagacacccagcatggtgctctgaggaggggtgggaatcaggccagctgctggcgccaggcctctgtgagtctgcagggcatctggcaggaagagatgcctacttgtgaaatggactttggctgtcactggccctgtcagacatgtgaggtgcagcccactcaggaagggacatggatgaagatggaaaccatcattctcagcaaactatcacaaggacagaaaaccaaacatcgcatgttctcactcatagaaacattatggctcagtatccttcatactacaataaatttacaatgactccccttattcatttattcatgggcaaagtattgtttatttcctatgttccaagtagctttttagatgccggtgacacagcattgaagaag

SEQ ID NO: 11389 - DNA, 627 bp, Homo sapiens
  SIMILAR (145)..(291): 851254mologous to Homo sapiens putative p150,accession number U93564,Smith-Waterman Score=217.
atgcggttacttcacttaatatgtatcaccataattctcttctcagaaagtttattcagtcaggctgttaggatcaacagctataggagaaaggaaggatgccagattgggaagaagagagggactatggtgccgtcacaacaagaattagaaaaaacaactttaaatttcatatggaaccaaaaaagagcccgtattgccaagacagtcctaagtaaaaagaacaaagctggaggcatcatgctacctgacttcaaactacattacaaggatacagtaacaaaaacagcaggggacatggatgaagctggaaaccatcattctcagcaaactaacgcagggacagaaaaccaaacactgcatgttctcactctgaggcaatgttttgaaaagaaacagaaaatccttgcaaacgtccaactgcaaggaatatgtggccccagcagctgtgctctaagatccattgccatgtttgtgccgaggttgggcttcccattggctgctttgcatggggcagggatgcggaggcaggctctttattgggggacagaagactgtgctgaccatgactctggcttgaggacccatggcctttccgaaccttccttagactgcacagtggcctag

SEQ ID NO: 11390 - DNA, 362 bp, Homo sapiens
  SIMILAR (119)..(205): 861254mologous to Homo sapiens unknown protein,accession number M22332,Smith-Waterman Score=124.
atgtggaggaggaacaagggcatagttttaggaatgcaaggtgaattatctcatggtagagaaatgagaacggtttggataggatggactgttcatgcagaaatggagagagagataagggacatggatgaagctggaaaccatcattctcagcaaactatcgcaaggacgaaaaaccaaacactgcatgttctcactcataggcacctaagagagaaaatcttcatcctacccttgggtcaaccacttagtcacgaatctctcatagtggtgtggaatccccggtcaaactggacagctgtgcaagcttttggcttagtgaagtcccacttcttccctaaagatacagtgtcctactcaag

SEQ ID NO: 11391 - DNA, 2703 bp, Homo sapiens
  SIMILAR (745)..(3783): 751254mologous to Homo sapiens myosin X,accession number AF234532,Smith-Waterman Score=3777.
atggctgaccctccctggtcttcagtgcaggtcaacaagtatgattcaggcctcctctcttctgtctctgcagagcctttggcaagttcagcctcctcccaccccggaatgagtgacaatgcacctgcttccttggagagcggcagcagctccacccctactaattgcagtacctcctcggccatcccgcagcccggtgcagccaccaagccttggcgcagcaaatccctcagcgtgaagcacagtgccacggtatccatgctctcggtcaagcctcctgggcctgaggcccccaggcccacacctgaagccatgaagccggcccccaacaatcagaagtccatgctggaaaagctgaaacttttcaacagtaaagggggctcaaaggcaggtgaggggccggggtcccgggacacaagctgtgagcggctggagactctgcccagcttcgaagagagcgaggagctggaggccgccagtcgcatgctcaccaccgtgggccctgcttccagcagccccaagattgcactcaagggcattgcccagaggacttttagccgggcactgaccaacaagaagagttctctgaaaggcaatgagaaagagaaggagaaacaacagcgggagaaggataaggagaaaagcaaggaccttgccaagagagcctctgtgacggagaggctggacctcaaggaggagccaaaagaagaccccagtggagcagctgtgcccgagatgccaaaaaagtcctccaagattgccagcttcatccccaaaggggggaagctcaacagtgccaagaaggagcccatggccccttcccacagtggaataccaaaaccaggaatgaaaagcatgcccgggaaatccccaagtgccccagcgccttccaaggaaggggagcggagccggagtgggaagctgagctcaggactcccccagcagaagccccagctggacggcagacactccagttcctcttccagcctggcgtcctcagaaggaaaaggcccaggagggaccaccctgaaccacagcatcagcagccagactgtcagtgggtctgtcgggaccacccagaccacaggaagcaataccgtcagtgttcagctacctcagccccagcagcaatacaaccatcccaacactgccacggttgcacctttcctgtacagggtagtctgggaagtgacgctggaaataagagcaccaggatacgaatcaggacacctgggccctgtcctttatcagcccttggtgccctctgaggtcttcggcactggctgcaggaacaggtctcagacggacactgaagggaatgttactgccgagtcaagctcaacaggtgtgagcgtggagcccagccacttcaccaagactggacagcctgctctggaagaactcactggctgtgagttagtgggtatatcctacattcaggtcattgtcagaggaggcataattggcagtttagaacgtgatcacctaagcatgtcagggcaagtggaatccttctcagaaaggacaagaggtgccaagttccgcttcttagtaggtgaagggacaggagcaactccatccagtccagtaggagagcccatgacatgcaaagcagaagacaagaggcttcctaccagcaggaactccacaacagaaaggttgtttggcatttgttttgatttttctaactccctggctctccttggtggggaaatacttcaggatatgggagacaaaggctgcaacacagcccatggaagttgccctgcaagtctaaagtgccatattgctggactattgctgaaaaatcttaacctacctcgtcagcccacctccgtgacacttcccagaataaatatcgagtgtactatttttgattttgcaataagagattccgggatgattgaaaacatagatgcctgcttgaatttcctggcagctaagggaataaacatccaggggctgtctgcagaagagatcaggaatggaaacctcaaggccattctaggcctcttcttcagcctctcccgatacaagcagcagcagcagcagccccagaagcagcacctctcctcacctctgccgcccgccgtatcccaggtggccggggccccctcccagtgccaggctggcacccctcagcagcaggtgccagtcactccccaagccccgtgccagcctcaccagccagcgccacatcagcagtcaaaagcacaagctgaaatgcagtccagtgcatcatccaaggactcatctcaaagcaaaatcatccgcttcactctgggtcagaaaaagatctctagacttccaggtcctaccgcgagggtatccgctgcaggcagcgaggccaaaacacgcggagggtcaactactgctaacaaccgacgcagccagagctttaacaactatgataaatccaaaccagtcacctccccacccccaccgccaagcagccacgagaaagggacatggatgaagctggaaaccatcattctcagcaaactatcacaaggacaaaaaaccaaacaccgcatgttctcactcatagggcaggctcatctaactgtgtgcttagaagctctagagcagaacttgcacccaccaggaaactgcctggagacacaacagtcaattaataacccaaaatatgcccactatgaaactccctcccacccggagagcttcagccactttacaacctag

SEQ ID NO: 11392 - DNA, 516 bp, Homo sapiens
  SIMILAR (246)..(136): 671254mologous to Homo sapiens PRO1546,accession number AF116638,Smith-Waterman Score=137.
ctgctgctgatggggctgaagcacaacgtccttaagcttcctaggggccctatggtcacattgagagaatctgtatgggagacccttaatttcttgaaatagtcttttgtgtgactgaatatgctgatttttaaaaaatcctcctagaggctccagtaggtgaggttccacttcctgtgtccacgtgttctcattgttcaactcccatttatgagtgagaacatgcggtgtttggttttctgttcctgtgttagtttgctgagaatgatggtttccagcttcatccatgtcccttttttcaaggttcttagcttctttgcattgggttagcacatgctcctttagctcagaggagtttgttattatccaccttctgatgcctacttctgtcaattcatcaaactcattctccatccagtttttgtcccttgctggcaaggagttgtgatcctttggaggagaagaggcattctggatttcggaattttcagcctttttgctctggtttttcctcat

SEQ ID NO: 11393 - DNA, 1018 bp, Homo sapiens
  SIMILAR (2)..(79): 841254mologous to Homo sapiens putative p150,accession number U93572,Smith-Waterman Score=109.
atggatgaagctggaaaccgccattctcagcaaactatcacaaggacagaaaaccaaacaccacatgttctcactcatagaccactcaatgtgaagacgatgagagtgaagacttttatgatgatacacttctacttaatgaataataaatataatttctcctatgattttcttaataacattttctgttctctggattactttacgcctctgctggtgatacccaggcaaacagggtctggagtggacctccagcaaactccaacagacctgcagccgagggtcctgaccattccattctgtgtgtcatgctgccgaagcagcacttggaatctagaagtaccaagtgccacaattcgtctccttgtgactcatggcaccagatgacaagcaatcctctgtccttcagcagcaccagaaacagtggaggatccgtgtgggtgttcacagcgttgtgaatagattgagaaggtggcttttgagtaaagaagttagccatgcagacgcttggaggagagttcctatgaggaaatgacttatgccccaagaccataaggacaggggatgcttggtgcgttccaggaaccacaaggaagtcagcatggaagtagggtaaaatctcaggctctttgtcattcttgccagtaagggatgggctctgatagaatttggctgtgaatccgtctggtcctggactctttttggttggtaggctattaatcattgcctcaatttcagagcctgttattgatctattcagggattcaacttcttcctggtttagtcttgggagggtgtatgtgtcgaggaatttatccatttcttctagattttctagttcatttgcgtagaggtgtttatagtattctctaatggtagtttgtatttctatgagtgagaacatgcggtgtttggctttttgtccttgtgatagtttgctgagaatgatggtttccagcttcatccatgtccctgcaaaggacatgaactcatctttcatggctgcatagtattccat

SEQ ID NO: 11394 - DNA, 739 bp, Homo sapiens
  SIMILAR (1837)..(2619): 961254mologous to Escherichia coli soluble lytic transglycosylase,accession number M69185,Smith-Waterman Score=1320.
atggccagggaagctccactgaaatggagacctttgccagagcctgaaggaaaacacgatgaatgtggcagcggccagcacaactgtgatgagaatgccatctgcaccaacactgtccagggacacagctgcacctgcaaaccgggctacgtggggaacgggaccatctgcagagccattctgcctgggctcttggcacttgtcgatcggaccttcttggtaactcttggtggaacacagccagggttcctgctcctggtttatcaactggcaagggtactgtgcgtcagggaaaaagaaaaatgcttcaggtttagctttggagttgaaagaaaaaggcatagggacatggatgaagctgtaaaccgtcattctcagcaaactaacacaagaacagaaaaccaaacaccgcatgttctcactcacaggagatcccacaggtgatgaccgcctgtgcctcctgtccctcccaggagatcccacaggtgatgaccgcctgtgcctcctgtccctcccaggagatcccacaggtgatgaccgcctgtgcctcctgtccctcccaggagatcccacaggagatcccacaggtgatgaccgcctgtgcctcctgtccctcccaggagatcccacaggtgatgaccgcctgtgcctcctgtccctcccaggagatcccacaggtgatgaccgcctgtgcctcctgtccctcccaggagatcccacagaccttcgtgtgggatga

SEQ ID NO: 11395 - DNA, 697 bp, Homo sapiens
  SIMILAR (3)..(356): 721254mologous to Homo sapiens putative p150,accession number U93574,Smith-Waterman Score=460.
gaatatacctaaccaaggagttgaaagacctctacaaagaaaagtgcaaaacactactgaaagaaatcacagatgacacaaacaaatggaaacacatcccaagctcatggatgggtagaatcaacattgtgaaaatgaccacactgccaaaagcaatctacaaattcaatgcaatccccttcagaataccaccatcattcttcacagcattagaagacacaattctaaaattcatatggaaccagaaaagagcccacatagccaatgcaagattaagcaaaaagaacaaatctggaggcatcatactacctgatttcaagctatactataaggccatagtcaccaaaacagcatgggacatggatgaagctggaaaacatcattctcagcaaactattgcaaggacagaaaaccaaacactgcatgttctcactcataggtgggaattgaacagtgagaacacatggacacaggaaggggaacatcacacaccagggcctgtcatggggtgggggaagtgggagggatagcattaggagatacacctaatgttaaatgatgagttaatgggtgcagcacaccaacatggcacatgtatacatatgtaacaaacctgcacattgtgcacatgtaccctaaaacttaaagtataatatataaaaatcttattttcttaagccatcaactatgcactgag

SEQ ID NO: 11396 - DNA, 1583 bp, Homo sapiens
  SIMILAR (1)..(627): 781254mologous to Homo sapiens eukaryotic initiation factor 4AI,accession number D13748,Smith-Waterman Score=792.
  misc_feature (1)...(1583): n = a,t,c or g
atgtctgcgagccaggattcccgatccagagacaatggccccgatgggatggagcccgaatgcgtcattgagagtaactggaatgagattgttgacagctttgatgacatgaacctctcggagtcccttctccgtgacatctatgcctatggttttgagaagccctctgccatccagcagcaagccattctaccttgtatcaggggttataatgtaatcgctcaagcccgatctgggactgggaaaatggccacatttgccatatcgattctgcagcagattgaattagatctaaaagccacccaggccttggtcctagcacccactcgagaattggctcagcagatacagaaggtggtcatggcactagtagactacatgggtgcctcctgtcatgcctgtgtcaggggcaccaatatgcgtgctgaggtgcagaaactgcagatggaagctccccacatcatcgtgggtacccctagccgtgtgtttgatatgctttaccggaagatacctggccccccaaatccatcaggatgttggtactgaatgaggctgacgaaatgttaagccgtggattcaaaggacagatctatggacatatccaaaaggctcaacagcaccaccaagggtagttttgctgtcagccacaatgccctttgattgtgcttgaggtgaccaagaagttcatgaggggcccccattccggattcttgtcaagaaggaagagttgcccctggagggtatccgccatttctacatcaacgtggaaccagaggaattgcaacttggacacactatgtgtactggtatgaaccctgacccatcaccccaggcagtcatcttccatcaaccacccggagggaaggtggactggcctcacccgagaagatgcatgctcgagattccactgtaccccccatgcatggagatatgaccaaaaaggaaccgagacggtgattatgagggaatttcgttctggctcctaaccagagttttgaattaccccactgaccctgcctggccagaggccattgatgtgccagccaggtttcctttagtcattcaaacttatgacccttcccccaccaaccaggggaaaactattaatccacaggaatcggtcgagggtggaccggtttggccgtaaaggtgtggcttattaacatggtgacagaagaagacaatgaggactcttccgagacattgagaccttctactaacacctccattgaggaaatgcccctcaatgttgcttgacctcatctggaggggctgtcctgccatcccagccccagccaggggctcaatctctgggggactgaggagcagcaggaggggggggagggaagggagtccaagggatggacatcttgtcaatttttttttcctttgaataaactgtcacttttttgaggcaaaagaaaggaaccgtgaacattttagacacccttttctttggggtaggctcttgccccaggcgccggctcttctaccnnnnnnnnnnnnggggggggcccgttttagagaaccaaatttaacttacgcggcttggcaagagaaaagtttttttatggggccccaaa

SEQ ID NO: 11397 - DNA, 655 bp, Homo sapiens
  SIMILAR (853)..(1404): 921254mologous to Homo sapiens myosin X,accession number AF234532,Smith-Waterman Score=896.
aaaagccggggccgggggctgccttacaccatggacgcgttcatgcttggcatgggaatgctgaaatatcccaacttcgtggcgacctaggcccgtggctaccccggatttgctccaagctatggctatcagttcccaggcttcccagcagcggcttatggaccagtggcagcagcggcggtggcggcagcaagaggatcaggctccaacccggcgcggcccggaggcttcccgggggccaacagcccaggacctgtcgccgatctctacggccctgccagccaggactccggagtggggaattacataagtgcggccagcccacagccgggttcgggctttcgcccacgggcatagctggacctttgattgcaacggcctttacaaatggataccattgagcaggtgctttcgttgccatctcactctgagagcatacctggatgtccaggcaagactgggcgaagtttctgagtggccctttgtttaggtgatgtcctcagacctggacccccaccagcctcactccccatcccaaccagaagatggctcactttcggatcgagggttgactacatctcatcatctcacgaatctgcatgtaatataagacaacagcttttaaatgtatatataacccaaaaaaaaaaaaaaa

SEQ ID NO: 11398 - DNA, 744 bp, Homo sapiens
  SIMILAR (2)..(208): 1001254mologous to Homo sapiens myosin X,accession number AF132022,Smith-Waterman Score=367.
ctaaatgcatgcaccgtagtagatgtactggtagccgtagctgtagttgtagtacatgcattgttgagttgatattacagggtctttgacggctcggcacagcacggccgtcgtgatggaagagatgtttccactgccagggagctcccaatttggaaaggcaacagggtccaagcccttaggagcttctactccaaggctggagaatctattctgtgtccttgaatttgcagtttctctgtcgccgatctctacggccctgccagccaggactccggagtggggaattacataagtgcggccagcccacagccgggctcgggcttcggccacggcatagctgtaagtacctgccttcccctgccctcctgcctcctccttcctgaccagctccttgtggcctgtgggtgtgccaggaaagcccaacatcgggggcagaggagaggacagagggtccccatcaacatcacaccagctcctgagggctgaagcctccgtcgtcttagaggtgtcctgggtgcctctcgtgtggctggtgatgacggctacagcatgctctgaatcagtggattcctcagctttgaagcccaatgcacttctgattgggccactctcagatgactctatctgtaccagctcagctgctgcttctgtgaaatgagaattataatgcgaaccataccggagaccgggtaggttttctaagagtccctcgggctttgcttggcacacaagggcctccat

SEQ ID NO: 11399 - DNA, 440 bp, Homo sapiens
  SIMILAR (223)..(534): 991254mologous to Homo sapiens myosin X,accession number AF132022,Smith-Waterman Score=529.
ccgtggtgacgtggttcccaaagatgtcaatgctgccattgccaccatcaaaaccaagcgtaccatccagtttgtggattggtgccccactggcttcaaggttggcattaattaccagcctcccactgtggtgcctggcggagacctggccaaggtacagagagctgtgtgcatgctgagcaataccacagctgttgccgaggcctgggctcgcctggaccacaagtttgacctgatgtatgccaagcgtgcctttgttcactggtacgtgggtgaggggatggaggaaggcgagttttcagaggcccgtgaggacatggctgcccttgagaaggattatgaggaggttggagcagatagtgctgcaggtgtaaacttgtacactcctttgtcttggaactgtcttattttctgtaaatgtctattgccgtaaattgtta

SEQ ID NO: 11400 - DNA, 837 bp, Homo sapiens
  SIMILAR (1)..(216): 841254mologous to Cricetulus griseus alpha-tubulin III,accession number M12329,Smith-Waterman Score=317.
atgttgaacaacaccacagctgtcgctgaggcctgggctcacctggaccaaaactttgacctgatgtatgcaaagcatgcctttgttcactggtacgtgggtgaggggatggaggaagaagagttttctggagcccctgaggacatggctgcccttgaaaaggattatgaggaggttggagcagatagtgctgagggaaaggatgagagtgaagagcaaccggagctaatccgcagagaaactctgggaatcagaaaattccacgtgaaggagaagggtgctagggcacttgcgtatccctcccatcaatccctggctgagggctgttcctggagggttcttagctcccatcccttcctccctgccatctacacagacagagcagacgtcaatagcttatggaagctcttgggctggaagatggcagacaccatctgccagttggaagtctgccagagtgcaccaaagagaataataggtatttcatgcgggagacaaagaagtccaacagttaggcaaaacttatccgagggaatacatgaggacacggccctgaccctgcaagagaccggacgtgggcgcaaaaagccccagaaaaccaagacgcacgggaaaaacacagggaacacacaccggaccaagggggccagaacagtacagggggcaccgccaaccgacggagacgccgaacaacaacacggaaagaaaaaagggagagaccatacccaaacacaccgcagaggacaccccagcaatctccaagcaccgaacaaattcaatttctatagcaacctccatcaagaggttgcccagtccacatttcaatattcccactga

SEQ ID NO: 11401 - DNA, 615 bp, Homo sapiens
  SIMILAR (331)..(480): 881254mologous to Notothenia coriiceps alpha tubulin,accession number AF255560,Smith-Waterman Score=229.
ttaattgggcccagggccctgctgctctgtgcagccttgggacttggtgccctgcatcccagcttctccggcttcagccacggctaaaagaggccaaggtacaacttgggtcattgcttcagagggtgcaagccccaagccttggtggtttccatgtggtgttgggccagggatgccggtgggtaagagtagacctgttagtaagtgaaccagttgaccactctgaaatctctccatctcagcaagattttcttgttctctgcttctttcagtgtaggcagtatgggcagtatttcttataagtgcatacacaatcaacctgatgataatctggaccaaaactttgacctgatgtatgcaaagcatgcctttgttcactggtacgtgggtgaggggatggaggaagaagagttttctgaagcccctgaggacatggctgcccttgaaaaggattatgaggaggttggagcagatagtgtgtcttggtcgtcctccatctgcttcaagtacctgttgtgtagcagccagcaccttcttggcacttggtgggtaacctatgccctcaaattctgaagtccctgtttcttcccagccagttgatgttcgccttcccat

SEQ ID NO: 11402 - DNA, 1574 bp, Homo sapiens
  SIMILAR (3562)..(3999): 831254mologous to Mus musculus ribosomal protein L7,accession number X57960,Smith-Waterman Score=632.
gcacgagctagtctcgagtttttttttttttttttttaaaatgggaaacatcaattttattaacaatttacggcaatagacatttacagaattataatatagacagttccaagacttaggagtgtaaaagtacagcactcaggttaatactcttcaccctcatcctctccggtcagcactatctgctccaacctcctcataatccttctcaagggcagccatgtcctcacgggcctctgaaaactcgccttcctccatcccctcacccacgtaccagtgaacaaaggcacgcttggcatacatcaggtcaaacttgtgggtccagggcgagcccaggcctcgggcaacaagcttgttggtatttggctcagcattgcacacagcttctctggtaaccgtgggcccaggtctccggccaggcaaccacagtgggaaggctgggtaattaaatggccaacctttgaagcccagttggggcaccaattccacaaacttggaatgggtacgcttgggttttgaatgttggaaatgggcagcattgaacatcttttggggaaccacgttaaccacgggtataaacaggcaagcaagccatgtatttaccatgggcgaggggtcacattatatcatctcgattggctggctcaaagccaagcattgggtgatctctgctacagtaaagctgttcgttgtaggctttctcagcagagatgaacaggggcatatgtgggccggagggaagttgaatgccggggtaagggaaccaggttggtctggaatttctgtcaagtaaccattcaggggctcaatccaatttcagggaagcagtattggaaggacacaacctggttaataaggcgggttaaggttaagttagttttggcgctccgaaatcgaggtttttacgaaaaatgtcactaaatggcctcattgtctaccatgaaggcacaatcagagtgctccagggtggtgtgggtggtgaggatggagttgtagggctcaactacagctgtggaaacctggggcgccgggtaaatggagaactccagcttggacttcttgccataatcaactgagagacgttccatgagcagcgaggtgaacccagaaccagttcccccaccaaagctgtggaaaaccaagaagccctgaagaccggtgcactggtcagccagcttgcgaattcggtccaacacgaggtcaatgatctccttgccaatggtgtagtgccctcgggcatagttattggcagcatcttccttgcctgtgatgagttgctcagggtggaagagctggcggtaagtgccagtgcgaacttcatcaatgactgtgggttccaagtctacaaacactgcccggggcacatgcttgccagcacccgtttcactgaagaaggtgttgaaggaatcatctcctcccccaatggtcttgtcacttggcatctggccatcgggctggatgccgtgttccaggcagtagagctcccagcaggcattgccaatctggacaccagcctggccaacgtggatggagatgcactcacgcgcaagctccgccttccgggttcgcgccat

SEQ ID NO: 11403 - DNA, 438 bp, Homo sapiens; identical to SEQ ID NO: 9415
  SIMILAR (99)..(260): 751254mologous to Rattus norvegicus ribosomal protein S26,accession number X02414,Smith-Waterman Score=201.
  misc_feature (1)...(438): n = a,t,c or g

SEQ ID NO: 11404 - DNA, 642 bp, Homo sapiens
  SIMILAR (260)..(526): 421254mologous to Pisum sativum ribosomal protein S26,accession number AF112440,Smith-Waterman Score=150.
ggcacgagggctaaatagtcccatgtgcactttgttccatggataaataaacactaggaacgcatttccaccctagatttcagcagaaatgctgaatgtaaaggaatatttgagtaaagtgagttgccgttcttgaagcccgtctcctgtctccggtccgtgcctccaagatgacaaagaaaagaaggaacaatggtcgtgccaaaaagggccgcggccaacgtgcagcctattcgctgcactaactgtgcccgatgcgtgcccaaggacaaggcccattaagaaattcgtcattcgaaacatagtggaggccgcagccagtcagggacatttctgaagcgagcgtcttcggatgcctatgtgcttcccaagcttgtatgtgaagctacattactgtgtgagttgtgcaattcacagcaatgtagtcatggaatcgatctccgtgaaagcccgcaaggacccgaacacccccaccccgatttagacctggcgggtgctggccccacgtccccccaccaaagcccaatgtaagggagctggagttctttaaagacttgaaggacaggcttatttcttcttgggaggaaaaataaaatggaaatgtatacgaaatcgtcgacccgggaaaagcactagatggac

SEQ ID NO: 11405 - DNA, 1164 bp, Homo sapiens
  SIMILAR (1)..(228): 1001254mologous to Homo sapiens HSPC132,accession number AF161481,Smith-Waterman Score=418.
atgaacagtgtgggggaggcatgcacggacatgaagcgcgagtacgaccagtgcttcaatcgctggttcgccgagaaatttctcaagggggacagctccggggacccgtgcaccgacctcttcaagcgctaccagcagtgtgttcagaaagcaataaaggagaaagagattcctattgaaggactggagttcatgggccatggcaaagaaaagcctgaaaattcttcttgaccttgacagtcaccttgaaggatttcgcaagtccagaaattgaggactctggatttttgtcaactaactctgtgaacatagccatcagatttgatgaggaacttaggagagaggagttttattttcctccttcgatgtttttcctctcagtctgtaaaagatgaactctttgagaatgatttctcacgctgctgctggtatcttgcaggaactgtgtgctaaaattgaacaatttttttgagattatggttgcaatacttggcgtggaatcagctttacataaatataccttgtatgcaaacgatgataaactagtcaggatgagcagagctgcctgacctcttgatttctgctgcaaaagacatatacactgtactggggtcactatttatgaaagcaattggttaggacctcttttttttcctctcagggaactaatgctctgaaaagggatctgggcacaacagtttcagtgagtgcttttgagcacacttgtatctttatatagtaactaatggttaagattgatggtggcctggattagcaaagaggaagacagcttttaacacagttccctgccttcacaagacggtgtcagattaagatgtgaaagctgcaagaatgttgcagtgaacaccatttcagagctctcagtgtgcagtccaggaattaaaaatacttggaatagctgtggaggaagaacctaaattgcaaagatctgctattgccagctctcaacccaagtcagtgaattgtcaacctgcatatccttaaaaatgtcaaaatgctgcatctgggttaaatgtcggggtaggggggaagctgaaggtgctcgcttcatttgccttttttactccatcctgccctgtaatgtctgtaatcctgaagatggaataaattgtaaaatttagtttctttcattaaaaaaaaaaa

SEQ ID NO: 11406 - DNA, 428 bp, Homo sapiens
  SIMILAR (2)..(133): 771254mologous to Homo sapiens integrase,accession number U88899,Smith-Waterman Score=168.
  misc_feature (1)...(428): n = a,t,c or g
atgaactcttatgctgtactaatgtttcaaccaaagaagggattcatcttgcattggtggagctgctgaaaaatttaaccaagtgcttgangtttctgggaagtcggcatccaaccctggtgcttcccttggtgccagagcttctgagcacccacccattttttgacacagctgaaccagacatggatgatccagcttatattgcagttttggtacttattttcaatgctgctaaaacctgtccaacaatgccagcattgttctcagatcacaccttcaggcactatgcctacctccgaaacaggttatggaaggggacctacaaaatgggaatttcatgtacagtggtgtgggaggaataaagcaggtgggtggttataccttcacatgagggntgcaggccaaaggtttggcaacttatagtaaca

SEQ ID NO: 11407 - DNA, 1911 bp, Homo sapiens
  SIMILAR (136)..(903): 791254mologous to Homo sapiens Fragment of human secreted protein encoded by gene 11,accession number W75239,Smith-Waterman Score=989.
aaaatctctaacaacatcaccctccgagaagatcatcttgacactgtcctggctgtgctagaggattcatccagagatattcgagaggctcttcatgaactcttatgctgtactaatgtttcaaccaaagaagggattcatcttgcattggtggagctgctgaaaaatttaaccaagtaccctactgatagggactccatatggaagtgcttgaagtttctgggaagtcggcatccaaccctggtgcttcccttggtgccagagcttctgagcacccacccattttttgacacagctgaaccagacatggatgatccagcttatattgcagttttggtacttattttcaatgctgctaaaacctgtccaacaatgccagcattgttctcagatcacaccttcaggcactatgcctacctccgagacagtctttctcatcttgttcctgccttgaggttaccaggtagaaaactggtgtcatcagctgtttctcccagcatcatacctcaagaggatccttccccagcagttcctgcagcagagccttgaaagagtgtatagtcttcagcacttggaccctcagggagcccagggagctgctgggaattcaccatcagggatctgcaaagacttggagaacttcaatctgaattggcaggagtagctgatttctctgccacctatcttcgctgtcaactacttctcatcaaggccttgcaggaaaagttgtggaatgtaagctgcccctttgtatttgaagcagagtgatttggcctcagcagcagcgagaacagattatggaagagacctacaaaatggaattcatgtacatgtggtgtggagaataagcaggtggtgattatacatcacatgaggctgcaggccaaagctttgcaacttattagtaacagcacggaactacacgaggacttgaccccttaatttgggatgtgtgaaaaatttttacaggaagtagacttttttcagaggtattttcatcgctggatttgccccacttggcaggacagctttgtgggacaaactcctttgaccttgtgccccgactcatggacatccaaacctggcaggaagtgggtccaaatttctacagaccatgctgcgacagagtgcctttctgcatctcccgcttccagagcagatccacaaagcctcagccaccatcatcgagccagcgggcgagttcagacaaccctttgcggtttacctctgggtctggtggttgccctgggatgttgatgcaaccctggaagcatgtgcaaggatcctcagaacactgttaaggtccagggtcttatatccaagatgggccaaggctcaagatgattcaccccaaagcctgcaagactttccgggaatcctggggcccaggggcgggcaccgggcttcaatcacttcaggttttattcttcttccccacacccgctttgggacaggaggcatcccccaggtggaaagtgagggctggctgcctgggccttacaactcccagtgctccgcattcccaaaatgccccccctggatgggaggggtgggtgaagatgttcaccacagggtggaaacccagcatcgaggggcacccattccccttcagcaagcctgtaaaagtttatataatgccccaaacctgcacggcgcttaaggcaaaaacagtcttccccaacccgtggcctagagggcccttcttaggtgtcagaatgagccaagcctgaagcacttcacctggaattgatgtcgtaggcttaaggagtatgtgacccttacagtctcatctggtatcaaacacaggataaattgtttcttcattaaaaaataaaaaaaccttcaagtctacttacccttctcctggtccacaataaagttgagacaacaccaagctgttctagttcatgg

SEQ ID NO: 11408 - DNA, 1257 bp, Homo sapiens; identical to SEQ ID NO: 11306
  SIMILAR (430)..(1254): 991254mologous to Homo sapiens EF-1 alpha (aa 1- 463),accession number X03558,Smith-Waterman Score=1427.

SEQ ID NO: 11409 - DNA, 1389 bp, Homo sapiens
  SIMILAR (1767)..(1423): 801254mologous to Mus musculus argininosuccinate synthetase (EC 6.3.4.5),accession number M31690,Smith-Waterman Score=447.
atggacataaagaagggaataacagacatcagcgcctctttgagagtggagagtggatgggaagccagaacgagaaaggaaaagactcatatcaacactgtgatcatcggacacgtagattcgggcaagtccaccactactggccatctgatctacaaatgcggtggcgtcgacaaaagaaccatcgaaaaatttgagaaggaggctgctgagatgggaaagtgctccttcaagtatgcctgggtcttggataaactgaaagctgagcgtgaacatggtatcaccattgatatctctttgtggaaatttgagaccagcaagtactatgtgactatcattgatgccccaggacacagagacctcatcaaaaacatgattacagggacatctcaggctgactgtgctgtcttgattgttgctgctggttttggtgaatttgaagctggtatctccaagaatgggcagacccgagagcacgcccttctggcttacacactgggtgtgaaacaactaattgttggtgttaacaaaatggattccactgagccaccctacagccataagagatatgaggaaattgttaaggaagtcagcacttacattaagaaaattggccacaacaccgacacagtagcatttgtgccagtttctggttggaatggtgacaacacgctggagccaagtgctaacatgccttggttcaagggatggaaagtcacccgtaaggatggcaatgccagtggaaccacgctgcttgaggctcttgactgcatcctaccaccaactcgtccaactgacaagcccttgtgcctgcctctccaggatgtctacaaaattggtggtattgtcaacgttgcaacagaagtaaaatctgttgaaatgcaccatgaagctttgagtgaagttcttcctggggacaatgtgggcttcaatgtcaagaatgtgtctgtcaaggatgttcgtcgtggcaacgttgctggtgacagcaaaaaggacccaccaatggaagcagctggcttcactgctcaggtgattatcctgaaccatccaggccaaataagtgctggctatgcccctgtattggattgccacacggctcacattgcatgcaagtttgctgagctgaaggaaaagactgatcgccattctggtaaaaagctggaagatggccctaaattcttgaagtctggtgatgctgccattgttgatatggttcctggcaagcccgtgtatgttgagagcttctcagactatccacctttgggtcgctttgctgttcatgatatcagacagacagttgcggtgggtgtcatcaaagcagtggacaagaaggctgctggagctggcaaggtcaccaagtctgcccagaaagctcagaaggctaaataa

SEQ ID NO: 11410 - DNA, 1931 bp, Homo sapiens
  SIMILAR (1128)..(967): 701254mologous to Homo sapiens Human secreted protein, SEQ ID NO: 7420,accession number G03339,Smith-Waterman Score=182.
cacctaaaagccaaaatgggaaaggaaaagactcatatcaacattgtcgtcattggacacgtagattcgggcaagtccaccactactggccatctgatctataaatgcggtggcatcgacaaaagaaccattgaaaaatttgagaaggaggctgctgagatgggaaagggctccttcaagtatgcctgggtcttggataaactgaaagctgagcgtgaacgtggtatcaccattgatatctccttgtggaaatttgagaccagcaagtactatgtgactatcattgatgccccaggacacagagactttatcaaaaacatgattacagggacatctcaggctgactgtgctgtcctgattgttgctgctggtgttggtgaatttgaagctggtatctccaagaatgggcagacccgagagcatgcccttctggcttacacactgggtgtgaaacaactaattgtcggtgttaacaaaatggattccactgagccaccctacagccagaagagatatgaggaaattgttaaggaagtcagcacttacattaagaaaattggctacaaccccgacacagtagcatttgtgccaatttctggttggaatggtgacaacatgctggagccaagtgctaacatgccttggttcaagggatggaaagtcacccgtaaggatggcaatgccagtggaaccacgctgcttgaggctctggactgcatcctaccaccaactcgtccaactgacaagcccttgcgccctgcctctccagggagtccaccaaattgggtggtattggtactgtctcttctgccccgatggaaacctggtttctccaaccccggtatggtggtcacctttgctcccagtccacggtaacaacggaaagtaaaatctgtcgaaaatgcacccatgaagctttgaagtgaagctctttctggggaacaatgtgggctttcaatgtccaagaaggtgtctgtcaaggaatgtttcgtccgtggcaacggttgctgggtgaccagcaaaaaatgaccccacccaatgggaagcaagctggctttcactgctccaggtgattatccttgaaccatcccaggcccaaataagcgcggggttatgccccttgtattgggattgcccacacgggctcacatttgcatgcaaagtttgctgagctgaaggaaaagattgatcgccgtttctggtaaaaaagtgggaagatggccctaaaattttggaagtctgggtgatgctgccattgttgatatggtttcctggccaggcccatgtgtgttgagagcttctcagactatccacctttgggtcgctttgctgttcgtgatatgagacagacagttgcggtgggtgtcatcaaagcagtggacaagaaggctgctggagctggcaaggttcaccaagtctgcccagaaagctcagaaggctaaatgaatattatccctaatacctgccacccccactcttaaaaattttccccaaaagggatttgggtggaaaagaacggttctcagaactgtttggtttcaaatggcccatttaaggttaagtagtaaaagactggtttaatgataccaatgcatcgtaaaaacctttcagaaaggaaaggagaatgttttgtgggccccttttgggtttatttttttggcgcggggccgttttaaagttattaagttttttaaaatcccgacttttttaaatgggaaaccacctggacccaaaaatttttgtaaccagaattttgggaacccattaaaaagggtaaatggggaaaaaaaaactgtgggggggcgggccgtttttaaagataccttggggggccccaagttattccgcgggctatggaaaggaaaaaccctttttcccttaaaggggggcccaataaataagcccaaccttggggttcttttgcgaaaaga

SEQ ID NO: 11411 - DNA, 999 bp, Homo sapiens
  SIMILAR (16)..(246): 921254mologous to Homo sapiens ABC transporter,accession number AJ005016,Smith-Waterman Score=368.
atgagcccaccaatcctggatattgagaccatcaacgccctggcagatgccatcaatgggtttcagggtagtatgatgctggtcagccatgacttcagactcattcagcaggttgcacaggaaatttgggtgtgtgagaagcagacaatcaccaagtggcctggagacatcctggcttacaagttgcacctcaagtccaagctggtggatgaggagccccaactcaccaagaggacccacagcgtgaaacttacaatcatggtggaaggcaaagcagaagcaggcaccttcttcacaaggtggcaggagagacgacctgcgctgctggagagactcacgtacgacgatgtgtactcctacacgacgatctctcgtatgttagtgctacgagtgatgcgcggagctggtggtgttcgagcgaggacgcgtgtacccgatgttgacgatggacagcgtctcacggtgacggacgatagtgtgatggagacgatacagcggaagatcgtccgcagtggctacgagcgtgcgtgcgagctgtcgagtgcggttatgcgattgagttatgatgatgccgagtctcgatcgtcgtatccactacgtcgtcgtctgctgcctcggcatgctggtgacgctgcgctacttcttgatctgcttctgctgtgcgactgctacgacgatgattatcgtagtgactgtacgtgtgcacaacggactgatcgactatacgtcgacactgcctgtgcagctactgctgctactctgtctaccgctgcttgtgttgctacggcgtctagctctgcgttcgctgcgacaggtgcgcgatggcggttgcatcttacggacatcacacggcgtcgtctgactgacgctactacgaccgcggactactgctgtctcctgctgctactacagactgctactgcgtacggcttacgactacggactatacagctactacagttgacgcatgcttcgtctgttgactgcatctactattga

SEQ ID NO: 11412 - DNA, 2442 bp, Homo sapiens
  SIMILAR (23)..(823): 661254mologous to Homo sapiens Human normal ovarian tissue derived protein 34,accession number Y59757,Smith-Waterman Score= 743.
atgccctccgacctggccaagaagaaggcagccaaaaagaaggaggctgccaaagctcgacagcggcccagaaaaggacatgaagaaaatggagatgttgtcacagaaccacaggtggcagagaagaatgaggccaatggcagagagaccacagaagtagatttgctgaccaaggagctagaggactttgagatgaagaaagctgctgctcgagctgtcactggcgtcctggcctctcaccccaacagtactgatgttcacatcatcaacctctcactcacctttcatggtcaagagctgctcagtgacaccaaactggaattaaactcaggccgtcgttatggcctcattggtttaaatggaattggaaagtccatgctgctctctgctattgggaagcgtgaagtgcccatccctgagcacatcgacatctaccatctgactcgagagatgccccctagtgacaagacacccttgcattgtgtgatggaagtcgacacagagcgggccatgctggagaaagaggcagagcggctggctcatgaggatgcggagtgtgagaagctcatggagctctacgagcgcctggaggagctggatgccgacaaggcagagatgagggcctcgcggatcttgcatggactgggtttcacacctgccatgcagcgcaagaagctaaaagacttcagtgggggctggaggatgagggttgcccttgccagagccctctttattcggcccttcatgctgctcctggatgagcctaccaaccacctggacctagatgcttgcgtgtggttggaagaagaactaaaaacttttaagcgcatcttggtcctcgtctcccattcccaggattttctgaatggtgtctgtaccaatatcattcacatgcacaacaagaaactgaagtattatacgggtaattatgatcagtatgtgaagacgcggctagagctggaggagaaccagatgaagaggtttcactgggagcaagatcagattgcacacatgaagaactacattgcgaggtttggtcatggcagtgccaagctggcccggcaggcccagagcaaggagaagacgctacagaaaatgatggcatcaggactgacagagagggtcgtgagcgataagacactgtcattttatttcccaccatgtggcaagatccctccacctgtcattatggtgcaaaatgtgagcttcaagtatacaaaagatgggccttgcatctacaataatctagaatttggaattgaccttgacacacgagtggctctggtagggcccaatggagcagggaagtcaactcttctgaagctgctaactggagagctactacccacagatggcatgatccgaaaacactctcatgtcaagatagggcgttaccatcagcatttacaagagcagctggacttagatctctcacctttggagtacatgatgaagtgctacccagagatcaaggagaaggaagaaatgaggaagatcattgggcgatacggtctcactgggaaacaacaggtgagcccaatccggaacttgtcagacgggcagaagtgccgagtgtgtctggcctggctggcctggcagaacccccacatgctcttcctggatgaacccaccaatcacctggatatcgagaccatcgacgccctggcagatgccatcaatgagtttgagggtggtatgatgctggtcagccatgacttcagactcattcagcaggttgcacaggaaatttgggtctgtgagaagcagacaatcaccaagtggcctgggagacatcctgggcttacaaggagcacctcaagtccaagctggtggattgaggagccccagctcaccaaggagttacccacaacgtgttgagccttttacctgggttcgggtcaggagctccatcgtgggaactaacagctgctaacctgaccagccgctcaggacaggaccctggggctacactcctgcattgctgcaatacatgctcccccagcctctcccctgcccctcaacctgccttagctgcactctcttacctacagctggacagtacctgtctgtttcctgtcctccttccagttacatctgtccatgtctggactcggctggccgttccctccagccccttgctggttatcttacatctgagtgtgatgcagtcagaggcacctgcgggttagcccaggggcccaagccctggatttggcctgcggaggagcttaggatcctcgttttctgggttttggtgatgttggaggagtaccccccagcccaccgccccgattcctttttgcttctggtttggagctccggaccaggaccttcgtcctggtcagtttttaaataattatttagcagtgtaacttttaaacctgcgtgacatctacaaagcgcccaataaagaaagaggaagccaaaaaaaaaaaaaaaaaa

SEQ ID NO: 11413 - DNA, 498 bp, Homo sapiens
  SIMILAR (333)..(662): 371254mologous to Mus musculus glutamine repeat protein- 1,accession number U46463,Smith-Waterman Score=161.
aaggattctaatgagactcagagcaggtgtaaacacagggcatggaccttccctgaaccaagaggcctggcctaaacaaaactgtggaccgtggtaccttagacacattaaagaagacattaacagggacaccctgcaagtatgtcctccccggggagaagcccaagtgcagatgcctatggcccacagatgatatggtttggcctctgtgtcccccactcaaatctcatcctcaagttgtaatccctggatgttcgagggagggaccctggtgggaggtgattggattggttcgcatgatagtgagggagttctcacgagatctggttgtttgataagtgtctggcatttctcctgtgctgtctctcctgccaccttgtgaagaaggtgcctgcttctccttcgccttccgccatgattgtaagtttcctgaggcctccctagcaatgcagaactgtgagtcaattaaacttcctttctttataaattaaaaaaaaa

SEQ ID NO: 11414 - DNA, 678 bp, Homo sapiens
  SIMILAR (190)..(675): 841254mologous to Homo sapiens SOX5=Sry-related HMG box gene {alternatively spliced},accession number S83308,Smith-Waterman Score=736.
atgccagctctgagaataaacagtggggcaggccccttcaaagcttgtgttgcagcagcgtttggtagtccttcagccagagttagcacaataatttacttaaatgtccatgatgctgtcaccaaggcaatccaagaagctcggcaaatgaaggagcaacttcaacgggaaaaacaggtgctttatgggaagaaaacagccatatatgaggagcaagcccgtcttggcaagcagcacctggagaagtaccctgactatgagtacaagcctagaccaaagtgcacctgcctcatggatgacaaaaagctgcacgttggtgaatacgaggcaatcatgcacaacaggcagcaggagatgcggcagtacttcaatgttgggcaacaagcacagatcccaattgctactgctggtgttgtgtaccatggagccatcaccatggctggaatgccctcccctcacctgccctcagagcactcaagtttgtccagcagcccagagcctgggatgcctgttatccagagcacttttgtgaaaggagaggaaccacatatcaaagaagagatagaggccgaggacatcaatggagaaatttatgatgagtatgacaaggaagacgatgatccagatgtagattatgggagtgacaaagaaaaccgtattgcaggaaaagccaactga

SEQ ID NO: 11415 - DNA, 1473 bp, Homo sapiens
  SIMILAR (18)..(521): 311254mologous to Drosophila melanogaster extracellular matrix protein papilin,accession number AF205357,Smith-Waterman Score=216.
gatgaagtggcacagccactgaacctatcagctaaacccaagacctctgatggcaaatcacccacatcacccacctctccccatatgccagctctgagaataaacagtggggcaggccccctcaaagcctctgtcccagcagcgttagctagtccttcagccagagttagcacaataggttacttaaatgaccatgatgctgtcaccaaggcaatccaagaagctcggcaaatgaaggagcaactccgacgggaacaacaggtgcttgatgggaaggtggctgttgtgaatagtctgggtctcaataactgccgaacagaaaaggaaaaaacaacactggagagtctgactcagcaactggcagttaaacagaatcaagaaggaaaatttagccatgcaatgatggatttcaatctgagtggagattctgatggaagtgctggagtctcagagtcaagaatttatagggaatcccgagggcgtggtagcaatgaaccccacataaagcgtccaatgaatgccttcatggtgtgggctaaagatgaacggagaaagatccttcaagcctttcctgacatgcacaactccaacatcagcaagatattgggatctcgctggaaagctatgacaaacctagagaaacagccatattatgaggagcaagcccgtctcagcaagcagcacctggagaagtaccctgactataagtacaagcccaggccaaagcgcacctgcctggtggatggcaaaaagctgcgcattggtgaatacaaggcaatcatgcgcaacaggcggcaggaaatgcggcagtacttcaatgttgggcaacaagcacagatccccattgccactgctggtgttgtgtaccctggagccatcgccatggctgggatgccctcccctcacctgccctcggagcactcaagcgtgtctagcagcccagagcctgggatgcctgttatccagagcacttacggtgtgaaaggagaggagccacatatcaaagaagagatacaggccgaggacatcaatggagaaatttatgatgagtacgacgaggaagaggatgatccagatgtagattatgggagtgacagtgaaaaccatattgcaggacaagccaactgataagggtcaaaagattgttgtgaccttaggacttaaagaagccctaactggttcatccttaccagtggccaagcacattaactttctcatacactgactgttactttaactgttagtcttaaatagttgggacatcagctgactaatagacctcagcctcaaaaggcttggaaagaaaaaacaaatacaacaagcaaacaacaatatcaacaacaagagattgaaataagctatgggtaaaataatgccagtaattcagctgctacatccaagcactgaagtcttacccgtcaactttttttttttttaaataaactttatggctgtttgttctacaaaaaaaaa

SEQ ID NO: 11416 - DNA, 714 bp, Homo sapiens
  SIMILAR (4)..(267): 901254mologous to Rattus norvegicus ribosomal protein L21,accession number M27905,Smith-Waterman Score=424.
atgtatatgcaaatctataagaaaggtgatattgtagacatcaagggaatgggtactgctcaaaaaggaatgccccacaagtgttatcatggcaaaactggaagagtctacaatgttacctggcatgctgttggccttattgtaaacaaacaagttaaaggcaagattcttgccaagagaattaatgcgcttattgaacacattaagcactctaagagccaagatagtttcctgaaacgcgtgaaggaaaataatcagaaaaagaagccaaagacaaaggcattgaattttctaagttcacttcaactcaactttccagaccaaacatacgactttgcgcaggcaagccttgcagccagaactcatcttctttttccgggccgaaaaccggcacgccgtaatgttgcgccagttccgccgctgacgccagatcgttggctgaacgaaggcgataccatcagcatagggaatgtagctgtctttgtcaaagaaacccttaaagactcctctggaaagctcctagatctgataaatgaattcagtgaagtctcaggatacaaaatcaatgtacacaaatcagtagcactgctgtacatcaacaatgacaaagctgagaatcaaatcaagaactcaatctcttttacaacagctacagaaaagattcttaggaatatacttaacaaaggaggtgaaggatctctacaaggaaaatga

SEQ ID NO: 11417 - DNA, 913 bp, Homo sapiens
  SIMILAR (460)..(840): 381254mologous to Peromyscus maniculatus reverse transcriptase,accession number U43360,Smith-Waterman Score=186.
  misc_feature (1)...(913): n = a,t,c or g
aattgcaattcagggcatacacagaccaggcagtcttcggcatgtccaaagaacaaagagaagattgggagttttattagaaagatcaatgttatgtactgttttgaaagaaatctcatcagcactagagaagctttcgaaagctggcaagctctgactgagccaatagaaaagatatgggaagactatttggaggaacagatgaacagctggaacagaaaggaagaagaagccggggatcctctagagtcacctacgcatggagctgcctgccgcagacagatacaatcgagctcggtaccggaccatgagagaactctggtagttatatcctacatcttgaataggaattgcatacacagctatgaagttactcttaaattccaggcccacagtccccacaatctagtccagatcttggttggctacagtgttgaaacccttaaagactcctctggaaagctcctagatctgataaatgaattcagtgaagtctcaggatacaaaatcaatgtacacaaatcagtagcactgctgtacatcaacaatgacaaagctgagaatcaaatcaagaactcaatctcttttacaacagctgnnnnnnnnnnnnnnnnnnnnnnnnnnnnnnnnncccaaggaatttttttaaccaaaaggctaaaaaatttttaaaggggaaaatttaaaaccctggtaaaaaaaaaccagggggacccaaaaaaagggaaaaaccccccgggccccaaaatgggaaaaaacaattttgggaaaacccccttttgggccaaaaaaatttaaaaattccattcaatttccaaaaaaaaccccacctttttttttccaaaaacttaaaaaaaccggggtaaaatttttttgggccccaaaaggccccaaaggttttcttagcaaaaaa

SEQ ID NO: 11418 - DNA, 570 bp, Homo sapiens
  SIMILAR (68)..(553): 561254mologous to Homo sapiens dJ228H13.1 (similar to Ribosomal protein L21e),accession number AL031985,Smith-Waterman Score=368.
cccgcctgcaggaattcggcacgaggaaccgccatcttccagtaaattcgccaaaattgacgaacacaaagggaaagaggagaggcacccgaatatatgttcctctaggccttttagaaaacatggagttgttcctttggccacatatatgcgaatctataagaaaggtgatattgtagacatcaagggaatgggtactgttcaaaaaggaatgccccacaagtgttaccatggcaaaactggaagagtctacaattgttacccagcatgcctgatgggcattgttgtatacaaacaagcttaagggcaaagattcttgccaaagagaatttaatgttgcgtgattgagcacatttaagcactcttaagagccgagatagctttcctgaaaccgtgtgaaggaaaatgatcagaaaaagaaagaagccaaagaggaaaggtacctggggttcaactaaagccgccagcttgctccacccagagaagcacactttgtgagaacccaatggggaaggagcctggagcttgctggaaccctattccctatgaattccatgggcataatagggt

SEQ ID NO: 11419 - DNA, 2094 bp, Homo sapiens
  SIMILAR (625)..(1728): 771254mologous to Homo sapiens mitofusin 1 precursor,accession number AF329637,Smith-Waterman Score=1332.
atgcaagaaacacacctaaaacaaaatgacccaggaaggctaaatgtaacagtaagagagtggtttttcccaaatggatatgccttcgccactggctctgatgatgccacttgccggctctttgaccttcgtgcagatcaagagttattattgtattctcatgacaatatcatctgtggaatcacttctgtagccttctcaaaaagtgggcgtctcttgttggctggttacgatgactttaattgtaatgtatgggacacgctaaaaggagatcgtgcagtttcttttcgcaaatgtaagcagatagctatctattttaaccctatcagcatcttgtacagcgcttgcgaggctgagagatcatgggagcctcatgctgccccagctgctgcctctccagtgaggggtctgctgtgcccatgtgtcatccatggtgctctcaatcagatctacgtttggagctttgcgatgagagggtctgctttcctctacttgttctacatcttcctccagttgctctgtttactgatgccgtattggtataggcctgtaacaggtgctggctccttctctcctagactgttgctgttcactgcagtaatgtgttacggcttgggcccctcgcaggagtgtatctcgcagtcagcagtgaaaacaaagttcgaacagcacactatcagagctaaacagatactagctactgtgaaaaacataatggattcagtaaacctggcagctgaagataaaaggcattattcagtggaagagagggaagaccaaattgatagactggactttattcgaaaccagatgaaccttttaacactggatgttaagaaaaaaatcaaggaggttaccgaggaggtggcaaacaaagtttcatgtgcaatgacagatgaaatttgtcgactgtctgttttggttgatgaattttgttcagagtttcatcctaatccagatgtattaaaaatatataaaagtgaattaaataagcacatagaggatggtatgggaagaaatttggctgatcgatgcaccgatgaagtaaacgccttagtgcttcagacccagcaagaaattattggtaatatttatgtctacaaggtcatgtctgagtccatccgtaagctggaagaaggatatatcaaagaagtgtttgacattgataatgaggtttcagttgttcattcattaactgatggcaaaatagctaaaatgcttctaaatcaaggtgattatgataatggtgataatgaagatgatttcattgacctcgcagaacaactgcctataggcagcatgctccctagatctttagcttctactcccactgctcctaccactccagcaacgccagataatgcatcacaggaagaactcatgattacattagtaacaggattggcgtccgttacatctagaacttctatgggcatcattattgttggaggagtgatttggaaaactataggctggaaactcctatctgtttcattaactatgtatggagctttgtatctttatgaaagactgagctggaccacccatgccaaggagcgagcctttaaacagcagtttgtaaactatgcaactgaaaaactgaggatgattgttagctccacgagtgcaaactgcagtcaccaagtaaaacattggcccagggcttcccggtatcaacagggacaccaggatttatttattctgcgaagtgatcttccgtcacaggtatttattcgcgataagctcatggagcggcgtaaccgtcgcacaggaaggacagagaaagcgcggatctgggaagtgacggacagaacggtcaggacctggattggggaggcggttgccgccgctgctgctgacggtgtgacgttctctgttccggtcacaccacatacgttccgccattcctatgcgatgcacatgctgtatgccggtataccgctgaaagttctgcaaagcctgatgggacataagtccatcagttcaacggaagtctacacgaaggtttttgcgctggatgtggctgcccggcaccgggtgcagtttgcgatgccggagtctgatgcggttgcgatgctgaaacaattatcctga

SEQ ID NO: 11420 - DNA, 2211 bp, Homo sapiens
  SIMILAR (9)..(956): 281254mologous to Xenopus laevis APEG precursor protein,accession number X51394,Smith-Waterman Score=169.
atgtgttacggcttgggcccctcgcaggagtgtatctcgcagtcagcagtgaaaacaaagttcgaacagcacactatcagagctaaacagatactagctactgtgaaaaacataatggattcagtaaacctggcagctgaagataaaaggcattattcagtggaagagagggaagaccaaattgatagactggactttattcgaaaccagatgaaccttttaacactggatgttaagaaaaaaatcaaggaggttaccgaggaggtggcaaacaaagtttcatgtgcaatgacagatgaaatttgtcgactgtctgttttggttgatgaattttgttcagagtttcatcctaatccagatgtattaaaaatatataaaagtgaattaaataagcacatagaggatggtatgggaagaaatttggctgatcgatgcaccgatgaagtaaacgccttagtgcttcagacccagcaagaaattattggtaatatttatgtctacaaggtcatgtctgagtccatccgtaagctggaagaaggatatatcaaagaagtgtttgacattgataatgaggtttcagttgttcattcattaactgatggcaaaatagctaaaatgcttctaaatcaaggtgattatgataatggtgataatgaagatgatttcattgacctcgcagaacaactgcctataggcagcatgctccctagatctttagcttctactcccactgctcctaccactccagcaacgccagataatgcatcacaggaagaactcatgattacattagtaacaggattggcgtccgttacatctagaacttctatgggcatcattattgttggaggagtgatttggaaaactataggctggaaactcctatctgtttcattaactatgtatggagctttgtatctttatgaaagactgagctggaccacccatgccaaggagcgagcctttaaacagcagtttgtaaactatgcaactgaaaaactgaggatgattgttagctccacgagtgcaaactgcagtcaccaagtaaaacactgctcaaagaaagtcaaagtcgagaaaggacttaaatcgtcgagtccagtcccccttaactcctcattcattccactatttctcgagccaaggaatcgggtgaaactcaacaacgactcgcagtcttcaggcggctggcacacttcggggtctgagatgccatctgccttgcctaacctgggcaagaccactcgcgtcctttcccttgaggagcagcgtgggaaaggctttttcaactacctccagccatggaggagaggtgagggctgggatgtgcggttaaaccctaaacctgataagagtgaaagtgggatacaatctgatgagatcgagtgcattcagggtgcaacatataagaatccggaacttgatcgaatagccactgaagatgatctggtagaaatgcaaggatataaagacaagctttccatcattggtgaggtgctatctcggagacacatgaaggtggcattttttggcaggacaagcagtgggaagagctctgttatcaatgcaatgttgtgggataaagttctccctagtgggattggccatataaccaattgcttcctaagtgttgaaggaactgatggagataaagcctatcttatgacagaaggatcagatgaaaaaaagagtgtgaagacagttaatcaactggcccatgcccttcacatggacaaagatttgaaagctggctgtcttgtacgtgtgttttggccaaaagcaaaatgtgccctcttgagagatgacctggtgttagtagacagtccaggcacagatgtcactacagagctggatagctggattgataagttttgcctagatgctgatgtctttgttttggtcgcaaactctgaatcaacactaatgaatacggaaaaacacttttttcacaaggtgaatgagcggctttccaagcctaatattttcattctcaataatcgttgggatgcctctgcatcagagccagaatatatggaagacgtacgcagacagcacatggaaagatgcctgcatttcttggtggaggagctcaaagttgtaaatgctttagaagcacagaatcgtatcttctttgtttcagcaaaggaagttcttagtgctagaaagcaaaaagcacaggggatgccagaaagtggtatgcattacctatag

SEQ ID NO: 11421 - DNA, 1035 bp, Homo sapiens
  SIMILAR (448)..(1032): 901254mologous to Homo sapiens putative transmembrane GTPase,accession number AF054986,Smith-Waterman Score=887.
accatctaggcaggactactggaatggcagagtgcacatctctataaaaccaccactgggagggtggaaaattttgtgcgtttggcgggtttcgctctcttcataagtattgatcattccgcagccctgcggaccggacacgtgaggaggtagtgacgccgacactgccagaacacactgctacaaggtcccagatggccacgtctctggattttaaaacttatgtagatcaggcatgtagagctgctgaggagtttgtcaatatttactatgagacaatggataaaagaagacgggcactaaccaggctgtatctggacaaggccaccttaatatggaatggaaatgctgtttcagggctggatgccctaaataatttttttttgacacattgccttcttagtgagttccagggtcaatattgtttagattgccaacccagttcatggattatcagagcctatctttcagctccctagatctttagcttctactcccactgctcctaccagtccagcaatgccagataatgcatcacaggcagaactcatgattacattagtaacaggattggcttctcttacatctagaacttctatgggcatcgataatgttggaggaatgatttggaaaactataggctggaaactcatatctgtttcattaactatgtatggagctttgtatctttatgaaagactgtcctggaccacccatgccaaggagagagcctttaaacagcagtttgtaaactatgcaactggaaaactgaagatgattgctagctccacaagtgcaaactgcagccaccaagtaaaacaacaaatggctaccacttttgctcgcctgtgccaacaagctgatattactcaaagacaactggaagaagaaattgctagattacccaaagaaatagatcagtgggagaaaatacaaaacaatttaaagctcttaagaaataaagctgttcaacttgaatatgagctggagaattttactaagcagtttctaccttcacgcgatgaagaatcctag

SEQ ID NO: 11422 - DNA, 1470 bp, Homo sapiens
  SIMILAR (3)..(677): 991254mologous to Homo sapiens putative transmembrane GTPase,accession number AF054986,Smith-Waterman Score=1148.
gggaagaccaaattgatagactggactttattcgaaaccagatgaaccttttaacactggatgttaagaaaaaaatcaaggaggttaccgaggaggtggcaaacaaagtttcatgtgcaatgacagatgaaatttgtcgactgtctgttttggttgatgaattttgttcagagtttcatcctaatccagatgtattaaaaatatataaaagtgaattaaataagcacatagaggatggtatgggaagaaatttggctgatcgatgcaccgatgaagtaaacgccttagtgcttcagacccagcaagaaattattgaaaatttgaagccattacttccagctggtatacaggataaactacatacactgatcccttgcaagaaatttgatctcagttataatctaaattaccacaagttatgttcagattttcaagaggatattgtatttcgtttttccctgggctggtcttcccttgtacatcgatttttgggccctagaaatgctcaaagggtgctcctaggattatcagagcctatctttcagctccctagatctttagcttctactcccactgctcctaccactccagcaacgccagataatgcatcacaggaagaactcatgattacattagtaacaggattggcgtccgttacatctagaactttctatgggcatcattattgtgggaggagtgatttggaaaactataggctggaaactcctatctgtttcattaactatgtatggagctttgtatctttatgaaagactgagctggaccacccatgccaaggagcgagcctttaaacagcagtttgtaaactatgcaactgaaaaactgaggatgattgttagctccacgagtgcaaactgcagtcaccaagtaaaacaacaaatagctaccacttttgctcgcctgtgccaacaagttgatattactcaaaaacagctggaagaagaaattgctagattacccaaagaaatagatcagttggagaaaatacaaaacaattcaaagctcttaagaaataaagctgttcaacttgaaaatgagctggagaattttactaagcagtttctaccttcaagcaatgaaggatccgtaacaatagagattgctttggtgaccctgataggaggaaaccgaaacttgtaagattggaacagttgttatttttatgaaattactttaaatatgaattgtactaactgtacctaaatagcaaagccctgtgtagattctggtaatgatctgtctcagggtatgtgtatttttgaagagtgttatgtccttagttttaattttgagtaaagaaaaggctaaaatcatgaattagttacaagcaacagtaccaacttatgtgacccctgagggtaggggctgtgagctcttaatttgtttttgattctgaaaaactctgcttcctggcatccaggagttagagattgagcctttcatcttctt

SEQ ID NO: 11423 - DNA, 454 bp, Homo sapiens
  SIMILAR (160)..(357): 981254mologous to Rattus norvegicus ribosomal protein S9,accession number X66370,Smith-Waterman Score=320.
tggtttgcttaggcgcagacggggaagcggagccaacatgccagtggcccggagctgggtttgtcgcaaaacttatgtgaccccgcggagacccttcgagaaatctcgtctcgaccaagagctgaagctgatcgaaggcggaatcagtgtttcctcccactcttcccaggcaacgccctgctgcggcggctggtccgcattggggtgctggatgagggcaagatgaagctggattacatcctgggcctgaagatagaggatttcttagagagacgcctgcagacccaggtcttcaagctgggcttggccaagtccatccaccacgctcgcgtgctgatccgccagcgccatatcaggtaccacctcggatgggcacctgaatcttcctccacctgcccctctgatggttgccctcactaagcctgctgtccctatctcctatgcagccctcggg

SEQ ID NO: 11424 - DNA, 693 bp, Homo sapiens
  SIMILAR (1)..(261): 771254mologous to Homo sapiens pot. ORF VI,accession number X03145,Smith-Waterman Score=351.
atccctgacatcatcgtgcactgggccaggtaaggcaccttttggttgcgctcgccatctgggtggccgcatcgctactgccactattcctcctcctcctctacctcatcctccgacatcgacgtcagggccaacactggacatcgacccaaagaaaggctgatttccaacatcctgcaggggctgtggggccagagcccacagacagaagcctgcagtggaggaccagcccatctgccgacgcccaggaagaaaacctctatgctgccgtgaaggacacacagcctgaatatggggtggagaaggacactccggctgctgcatctgaagccccccaggaggtgacctacgcccagctgcacagcttgaccctcagacggaaggcaactgagcctcctccatcccaggaaagggaacctccagctgagcccagcatctacgccaccctggccatccactacgcccggagggtacgcagactccacactcagtagaaggagactcaggactgctgaaggcacgggagctgcccccagtggacaccaatgaaccccagtcagcctggacccctaacaaagaccatgaggagatgctgggaactttgggactcactcgattctgcagtcgaaataactaatatccctacattttctaattaaagcaacagacttctcaataatcaatgagttaacc

SEQ ID NO: 11425 - DNA, 2097 bp, Homo sapiens
tttgtgtcctgccaggcaccgtggtctcatccgcctgcacagctgagtccagtgggagctgacgccatgaccctcaccctctcagtcctgatttgcctcgggctgagtgtgggccccaggacctgcgtgcaggcaggcaccctccccaaacccaccctctgggctgagccagcctctgtgatagctcgggggaagcccgtgaccctctggtgtcaggggcccctggagactgaggagtaccgtctggataaggagggactcccatgggcccggaagagacagaacccactggagcctggagccaaggccaagttccacattccatccacggtgtatgacagtgcagggcgataccgctgctactatgagacccctgcaggctggtcagagcccagtgaccccctggagctggtggcgacaggattctatgcagaacccactcttttagccctgccgagtcctgtggtggcctcaggaggaaatgtgaccctccagtgtgatacactggacggacttctcacgtttgttcttgttgaggaagaacagaagctccccaggaccctgtactcacagaagctccccaaagggccatcccaggccctgttccctgtgggtcccgtgacccccagctgcaggtggaggttcagatgctattactattacaggaaaaaccctcaggtgtggtcgaaccccagtgacctcctggagattctggtcccaggcgtgtctaggaagccctccctcctgatcccgcagggctctgtcgtggcccgcggaggcagcctgaccctgcagtgtcgctctgatgtcggctatgacatattcgttctgtacaaggagggggaacatgacctcgtccagggctctggccagcagccccaggctgggctctcccaggccaacttcaccctgggccctgtgagccgctcccacgggggccagtacagatgctacggtgcacacaacctctcccctaggtggtcggcccccagcgaccccctggacatcctgatcgcaggactgatccctgacatacccgccctctcggtgcagccgggccccaaggtggcctcaggagagaacgtgaccctgctgtgtcagtcatggcatcagatagacactttctttttgaccaaggagggggcagcccatcccccgctgtgtctaaagtcaaagtaccagtcttatagacaccaggctgaattctccatgagtcctgtgacctcagcccagggtggaacctaccgatgctacagcgcaatcaggtcctacccctacctgctgtccagccctagttacccccaggagctcgtggtctcaggaccctctggggatcccagcctctcacctacaggctccacccccacacctggccctgaggaccagcccctcacccccacggggttggatccccagagtggtctgggaaggcacctgggggttgtgactggggtctcagtggccttcgtcctgctgctgttcctcctcctcttcctcctcctccgacatcggcatcagagcaaacacaggacatcggcccatttctaccgtcctgcaggggctgcggggccagagcccaaggaccagggcctgcagaagagggccagcccagttgctgacatccaggaggaaattctcaatgctgccgtgaaggacacacagcccaaggacggggtggagatggatgctcgggctgctgcatctgaagcccccccaggatgtgacctacgcccagctgcacagcttgaccctcagacgggaggcaactgagcctcctccatccccaggaaagggaacctccagctgaacccagcatctacgcccccctggccatccacttagcccacgggggacccagatctcatactcaacagaaggagactcagagactccagaaggcacgggagctgcccccagtggacaccaatgaaccccagccagcctgggacccctaacaaagaccaccaggggcatcctggggaactctggggacttcacttagatttttgcagttcaaagatgacttaattattcctttgcattttttgaaattgaagccacagacttctcaataaatcaatgagctgagaaaactga

SEQ ID NO: 11426 - DNA, 2263 bp, Homo sapiens
  SIMILAR (219)..(1502): 491254mologous to Homo sapiens dJ1182A14.5.1 (novel gene (isoform 1)),accession number AL137798,Smith-Waterman Score=793.
tctctgtcctgccagcactgagggctcatccctctgcagagcgcggggtcaccggaaggagacgccatgacgcccgccctcacagccctgctctgccttgggctgagtctgggccccaggacccgcgtgcaggcagggcccttccccaaacccaccctctgggctgagccaggctctgtgatcagctgggggagccccgtgaccatctggtgtcaggggagcctggaggcccaggagtaccaactggataaagagggaagcccagagcccttggacagaaataacccactggaacccaagaacaaggccagattctccatcccatccatgacacagcaccatgcagggagataccgctgccactattacagctctgcaggctggtcagagcccagcgaccccctggagctggtgatgacaggagcctatagcaaacccaccctctcagccctgcccagccctgtggtggcctcaggggggaatatgaccctccgatgtggctcacagaagagatatcaccattttgttctgatgaaggaaggagaacaccagctcccccggaccctggactcacagcagctccacagtggggggttccaggccctgttccctgtgggccccgtgaaccccagccacaggtggaggttcacatgctattactattatatgaacaccccccgggtgtggtcccaccccagtgaccccctggagattctgccctcaggcgtgtctaggaagccctccctcctgaccctgcagggccctgtcctggcccctgggcagagtctgaccctccagtgtggctctgatgtcggctacgacagatttgttctgtataaggagggggaacgtgacttcctccagcgccctggccagcagccccaggctgggctctcccaggccaacttcaccctgggccctgtgagcccctccaatgggggccagtacaggtgctacggtgcacacaacctctcctccgagtggtcggcccccagcgaccccctgaacatcctgatggcaggacagatctatgacaccgtctccctgtcagcacagccgggccccacagtggcctcaggagagaacgtgaccctgctgtgtcagtcatggtggcagtttgacactttccttctgaccaaagaaggggcagcccatcccccactgcgtctgagatcaatgtacggagctcataagtaccaggctgaattccccatgagtcctgtgacctcagcccacgcggggacctacaggtgctacggctcacgcagctccaacccctacctgctgtctcaccccagtgagcccctggagctcgtggtctcaggacactctggaggctccagcctcccacccacagggccgccctccacacctggtctgggaagatacctggaggttttgattggggtctcggtggccttcgtcctgctgctcttcctcctcctcttcctcctcctccgacgtcagcgtcacagcaaacacaggacatctgggctgagactctgtccatcttcacccagaccagagaaagactgatttccagcgtcctgcaggggctgcggagacagagcccaaggacaggggcctgctgaggaggtccagcccagctgctgacgtccaggaagaaaacctctatgctgccgtgaaggacacacagtctgaggacggggtggagatttacactcggcagagcccacacgatgaagacccccaggcagtgacgtatgccgaggtgaaacactccagacctaggagagaaatggcctctcctccttccccactgtctggggaattcctggacacaaaggacagacaggcggaagaggacaggcagatggacactgaggctgctgcatctgaagccccccaggatgtgacctacgcccagctgcacagcttgaccctcagacgggaggcaactgagcctcctccatcccaggaagggccctctccagctgtgcccagcatctacgccactctggccatccactagcccagggggggacgcagaccccacactcagcagaaggagactcaggactgctgaaggcacgggagctgcccccagtggacaccagtgaaccccagtcagcctggacccctaacacagaccatgaggagacgctgggaacttgtgggactcacctgactcaaagatgactaatatcggcccattttggaaataaagcaacagacttctcaacaatcaatgagttaataacaaaaaaacaaaaaacaaaaacagacgtaaaggccgggtgtg

SEQ ID NO: 11427 - DNA, 1821 bp, Homo sapiens
  SIMILAR (58)..(351): 891254mologous to Homo sapiens leucine aminopeptidase,accession number AF061738,Smith-Waterman Score=481.
atggaattcctgttttatttcttgattcgacaagcacttatagagcacatctcaggatcaggtgctaggaaccaagcccacagagccttgcctgatggtcttcaggagagccaggagaggccagttgtcacgtgcctgaaacatgaggacttcgagttggctttccttctcttgaccaagggcgcagaccaccgtgctatttctctcacggaaggtgatactcatttgcatgcagcactccacatctttctagagattaaaggacagcaatgggaacacgctgatgcacatcctcttccagaagggcatgctaaagcgcgtgaagaagctgttagacctgctggtgaacttgtgcctgatgataacagggggaaggagggcaatgatgatcaggatgactggagcacgcaggagattgaggcctgcctccaggacttcgataacatgacctgggagatcgagtgcacttcagaaatgctgaagaagctgtctagtaagaagctgaaaggtatcaataaaggccaagtgtcagctaacatgaaaattcaaaagcgtatacctcgctgctatgtggaggacacagaggccgagaagggcagggagcatgtcaatcctgagtactttcccccagccagtgcagtggagacagaatataacatcatgaagttccacagcttcagcaccaacatggcctttaacatcctcaatgacacgacagccacagtggagtaccccttccgggtgggtgagcttgagtacgcggtgatcgacctcaatcccaggccactggagcccatcatccttattgggcgaagtggcactgggaagacaacctgctgcttgtacagattgtggaagaaattccacgtttactgggaaaaagctgagcaggcaggaagcccattgctggccaaacagctgcttcttctgcttgatgcttctctgcccaaaccattttttctgagaaacgaagatggaagcttgaaaagaaccatcataggatggtctgcacaggaagagtcaaccattcctagttggcaagaggatgaagaggaggctgaggtggatggggactacagtgaggaggataaagctgtagaaatgcgtacgggtgacagtgacccccggtcaggattcttaagaaatctggtgcagatcccctttgtggaggtgataatgaaggggaagaaggaagggggagcaggagttgacccagctgctgagaaagaagatctggatattgtatgtgaaaggttcactactagtaaactgcagtcctttgaggatttagccagtatttctacctatggctttcgaggtgagaagcacaacaagaagggcctaaagaagatgcaggccaacaatgccaaggccatgagtgcacgtgccgaggctatcaaggccctcgtaaagcccaaggaggttaagcccaagatcccaaagggtgtcagccgcaagctcgatcgacttgcctacattgcccatcccaagcttgggaagcgtgctcgtgcccgtattgccaaggggctcaggctgtgccggccaaaggccaaggccaaggatcaaaccaaggcccaggctgcagctccaccttcagttccagctcaggctcccaaagacaaggatacgtcaaatatttttatttccaacaggaaaaggggctgtgactttaccaaaaaagagactaacatcccaaaagtgctgaccatatccatggccccatcattaatgtcactgtactctgtaacacgtaaccaaaccacaaagccccccagcaggcataaaaacctcacaaaaggacagctggagcccctctactga

SEQ ID NO: 11428 - DNA, 931 bp, Homo sapiens
  SIMILAR (314)..(1288): 971254mologous to Homo sapiens leucine aminopeptidase,accession number AF061738,Smith-Waterman Score=1614.
ggattcgctgttcctcggtcgacccacgcgtccgcccacgcgtccgaggcgcttcgggagccgcggcttattgttgcagacatgtttcaattccaagagaccacaccacacacaaccagtcccgaaaatggcacagaaatggtatcaagaaaccccgatcacaaagatacgaatctcttaagggggtggaccccaagttcctgaggaacatgcgctttgccaagaagcacaacacaaagggcctaaagaagatgcaggccaacaattgccaaggccatgagtgcacgtgccgaggctatcaaggccctcgtaaagcccaaggaggttaagcccaagatcccaaagggtggtcagcccataaacttgattcgacttgcctacattgcccacccccaagcttgggaagcgtgctcgtgcccgtatttgccaaggggctcaagctgtgccggcccaaaggccaaagccaaggccaaggccaaggccaaggatcaaaccaaggcccaggctgcagccccagcttcagttccagctcaggctcccaaacgtacccaggcccctacaaaggcttcagagtagatatctctatctgccaacgtgaggacagaaggactggtgcgaccccccacccccgcccctgggctaccatctgcatggggctgtggggctggggtcctcctgtgctatttgtacaaagaaacctcaggcagggaaaaaaaaattcatcctaagcttcccttggtaaaatgacaggcattcatgcagcttaaaggttctggaaaactgattttcttccatgatggtactactccacagtctagacaaaatgcagccatcaacatgaaaaactgctgcttgattttttttcctccaacatgttttaaacagagctgcagatgctcaagacgaaatcgtcgaccgggaattcggactg

SEQ ID NO: 11429 - DNA, 554 bp, Homo sapiens
  SIMILAR (53)..(328): 761254mologous to Homo sapiens Similar to CGI-67 protein,accession number BC000158,Smith-Waterman Score=396.
  misc_feature (1)...(554): n = a,t,c or g
gcagcctgcacctcagcgagcgcgccgactggcaatactcgcagcgggctggaacgccgtcgaggtcttcttctcgcgcacggcccgggacaaccggctcggctgcatgttcgtgcgctgcgcgccctccagccgctacacgctgctcttctcgcacggcaacgccgtggacctgggccagatgtgcagcttctacattggcctcggctcccgcatcaactgcaacatcttctcctacgactactcgggatacggcgtcagctcgggcaagccctccgagaagaacctctacgccgacatcgacgccgcgtggcaagcgctgcgcaccccggtatggcgtgagtcccgagaacattatcctctatggtcagagcattgggactgtccccacggtagacttggcctcgaggtatgaatgcgcagcggtaattctccattcccctctgatgtctggtttgcgtgtggcttttccggatacaggaaacatactgctttgatgctttcccagattnacaagatatctaagtcactctcctgtgttggtcattcatggt

SEQ ID NO: 11430 - DNA, 1782 bp, Homo sapiens
  SIMILAR (133)..(315): 861254mologous to Homo sapiens Similar to CGI-67 protein,accession number BC000158,Smith-Waterman Score=297.
atgaaaagtggattttatatgacagccagcaacgaccagctcattgattggattgagaagaagctccaagcacttcccaaagccaaaattgcaccaaaaaaaggacatgctcactgtttggtggtctgctgcaggtatggcgtgagtcccgagaacattatcctctatggtcagagcattgggactgtccccacggtagacttggcctcgaggtatgaatgcgcagcggtaattctccattcccctctgatgtctggtttgcgtgtggcttttccggataccaggaaaacatactgctttgatgctttccccaggaacttacagttcagcactcgctcattcattcagagacacttcttgttaaacttgagctgtaacaatatgtgtgatggggcaactagtggtgtagacactcaaaaacttcaagcaagcacagtttggaaatttctcttacttttcagttggacagaacaggacagcttcatggaacagtctttcctttatccgttgatttgtcctgccagtaaaagcttatttgatccagttaccagtgtggaagatgacaggaatgagataaagctagcacagtgggaattcagccagacatttgatctgaccatctgggcaaacttcacagattccatcttagcagaccaggcctggggtggccctaaatccggggaagttttatgtggcgctgaacacttgcgtttcccaggggcgttttccctagctcccggaaacccagtagatgacactgcctcatgcttcattcacagtgaaaggcagacgctttcaggcacaaatatcaccacttctattcctcagggttcctgcttttcccgcctggaacagctgaaactctccccggaccatgagatcccatgggagtggagcaagggccaaggaactggagctgtggtagcccagctggagcatgaatgtccaggtttacagagatctgcccgaacctcagctgtggcgtggaggtctgtggcagaaaacgccccaacgccttgtgtctgggaagagagcgcacgactttcccggagacccagggccacataccccgagtggaggaagtggctgggagctgtccatggtgaaattcaggaagccaatccaagtgtgcccggagggaagtggttctctgaatctgccctcttgacaacacagctcattccatcctcctgcattttacatcaggcacagaaggatccacataagagagattcacacccacccacaattgccctagagaaggaaggggagagacagagagcctttacttatgtaccacggagcttcagagttaagccaggtctcacggtgaagacagcagaaccagatggagtaggggctcaaggaacagaaagttcaggctggaggtcatatcgaagatggataagaggagactatggtggaaaagaatactataaggaacctagagagaccaatttgaggttattagtaaattcaggcaagaaacgaggaatacctgaaaaagttgggggcagtggctgccagctcttcgagagcaggaaccatgtattcaactgccttctcagtgactcattcagggcctgcctcatagaagatgatcaaaaacttgtactcaacttattttctgcttccgattgtggcggactggtgtccttacaagaagaggaagagacacaaggggtgggcacagagaaaagaccatgtgagagcacagcaaaaagcaccagctgcaagccaggaagaccagactcaccagaaacccatctgccagcaccgtga

SEQ ID NO: 11431 - DNA, 1065 bp, Homo sapiens
  SIMILAR (319)..(837): 891254mologous to Homo sapiens mutant beta-actin (beta'- actin),accession number X63432,Smith-Waterman Score=799.
  misc_feature (1)...(1065): n = a,t,c or g
atggatgatgatattgctgcgctcgttgttgacaacagctctggcatgtgcaaggccggcttcgcgggtgacgatgtcccctgggccatcttcccttccatcgtggggtgcaccaggcaccaggtcatgatgctgcatgtggctcccgaggagcaccctgtgctgctgaccgaggcccccctgaaccccaaagccaactgtgagaagatgacccagatcatgtttgagaccttcaacaccccagccatgtatgtggccatccaggccatgctgtccctgtacgcctccgtccgtaccgcccatgtacaagggcttcacaccacggccgagcgggaaatcgtgcgtgacatcaagaagctgtgctacgtcgccctggacttcgagcgggagatggccatggtggcctccagctcctccctggagaagagctacaagctgctcgatggccaggtcatcaccatcggcaacgagcggttccactgccccgaggcgctcttccagccttccttcctgggcatggaatcctgtggcatccacaaaactaccttcaactacatcatgaagtgtgacgtggacatctgcaaagacctgtacaccaacacagtgctgtctggcggcaccaccatgtaccctggcatcaccaacaggatgcagaagaagatcaccgccctagcacccagcatgatgaagatcaagatcattgctcctcccgagcgcaagtactccgtgtggatcagcggctccatcctggcctcgctgtctaccttccagcagatgtggatcagcaagcagaagtatgaccagtccggcccctccatcgtccaccgcaaatgcttctaggcggactatgacttagttgcgttacaccctttcttgacaaaacctaacttgcgcagaaaacaagatgagattggcatggcnnnnnnnnnnnnnnnnnnnnnnnnnnnggnnnnnnnnnnnnnngggctggccccaggattaaaaaccggaaccgggaagggggacaccacccgttggaggggaccttccccaaaagtaaaaatggggcccggggcttttattggg

SEQ ID NO: 11432 - DNA, 1175 bp, Homo sapiens
  SIMILAR (3)..(536): 561254mologous to Carassius auratus beta actin,accession number AB039726,Smith-Waterman Score=426.
ccgagcgcggctacagcttcaccaccacggccgagcgggatatcgtgcgtgacattaaggagaagctgtgctacgtcgcccctggacttcgagcaagagatggccacggctgcttccagctcctccctggaggagagctacgaagctgcctgacggccaggtcatcaccattggcaatgagccggttccgctgccctgaggcactcttccagccttccttcctgggcatggagtcctgtggcatccacgaaactaccttcagactccatcatgaaagtgtgacgtggacatccgcaaagacctgtacgccaacacagtgctgtctggcggcaccaccatgtaaccctggatttgctgacaggatgcagaaggagatcactgccctggcacccagcacaatgaagatcaagatcattgctcctcctgagcgcaagtactccgtgtggatcggcggctccatcctgggcctcgctgtccacctttccagcagatgtggatcagcaagcaggagtatgacggagtccggcccctccattcgtccaccgcaaatgcttctagggcggactattgactttagttgcgtttacaccctttctttgacaaaaacctaactttgcggcagaaaacaagattgagatttggcatgggtttatttgtttttgtttgttttgttttggttttttttttttttttttgggttgaattcaggatttaaaaactgggaacgggtgaaggtgacagcagtcggttggagcgagcatcccccaaagttcacaatgtggccgaggactttgattgcacattgttgtttttttaatagtcattccaaatatgagatgcgttgttacaggaagtcccttgccatcctaaaagccaccccacttctctctaaggagaatggcccagtcctctcccaagtccacacaggggaggtgatagcattgctttcgtgtaaattatgtaatgcaaaatttttttaatcttcgccttaatacttttttattttgttttattttgaatgatgagccttcgtgcccccccttcccccttttttgtcccccaacttgagatgtatgaaggcttttggtctccctgggagtgggtggaggcagccagggcttacctgtacactgacttgagaccagttgaataaaagtgcacaccttaaaaaaaaa

SEQ ID NO: 11433 - DNA, 1191 bp, Homo sapiens
  SIMILAR (1)..(993): 751254mologous to Homo sapiens hypothetical protein,accession number AL080157,Smith-Waterman Score=1324.
atggaggctgaaaggctgcgactcctcgaggaagaggccaagctgaaaaaggtagccagaatgggatttaatgcatcttccatgctccgaaaaagccagctaggtttcctcaacgtcaccagttactcccgtttagccaacgagctgcgtgtgagctgcatggagcggaaaaaggtccaaattcggagcttggatccctcctctttggcgagcgaccgatttaacttcattctggcgagtaccaacagcgaccagctcttcgtagtgaaccaggtcgaagtcgaaggctccaagtacggcatcatcagtctgcgaactctgaagatcccttcgttccacgtgtacgtgctcagaaacctctacgtccccaaccggaaggtgaagtccctgtgctgggcctcgctgaaccagttggactctcacgttctgctgtgcttcgagggaatcacagatgctccaagctgtgcagtgctgctcccagcgtcgcggttcttaagtgttcacacaagagttaaccagcctggcatgctctgcagtttccagatcccagaggcctggtcctgtgcgtggtccctcaacacccgggcatatcactgctttagtgcaggcttgtctcagcaggtcctgttgaccagcgtggcgacgggacaccagcagtcatttgataccagcagtgatgtcttggcccagcagtttgctagtacggctcctttgctgtttaatggctgtcgctccggggagatctttgccattgatctgcgttgtagaaatcgaggcaaggggtggagggccactcgcctgttccatgactcagcagtgacctctgtgcaaatcctccaagaagagcaatgcctgatggcatcagacatgactggaaagatcaagctgtgggatctgagggccactaaatgtgtaaggcagtacgaaggtcacgtgaatgagtccgcctatctgcccctgcatgtgcacgaggaagagggaatcgtggtggcagtgggccaggactgctacacgagaatctggagcctccatgatgcccacctgctcagaaccatcccttccccgtactctgcctccgaggacgacattcccagcgtggccttcgcttctcggctcgggggcatccggggagcagcaccagggctgctcatggctgtccggcaggacctttattgtttccccttcagctaa

SEQ ID NO: 11434 - DNA, 1368 bp, Homo sapiens
  SIMILAR (1)..(681): 681254mologous to Mus musculus testis-specific chromodomain Y -like protein,accession number AF081260,Smith-Waterman Score=829.
atcatgaaagaagtccggcgagcgctctgcaacgcagccacagacgacagcaaactgctgctcctcagcgcagtggggagcgtgttctgcagcggcctggattattcctacctaattggccggttgtccagcgaccggcgaaaggagagcactcggattgcagaagccatcagggactttgtgaaggcctttatccagtttaagaagcctatcgtggtggccatcaatgggccggccctgggcctgggtgcctccatcctgcccctctgtgacatcgtgtgggccagtgagaaggcctggttccagacgccctacgccaccatccgcctcacgcctgctggctgctcctcctacaccttcccccagatcctgggcgtcgcgctggccaatgagatgctgttctgtgggcggaagctcaccgcccaggaggcctgcagcagggggctggtgtcgcaggtcttctggcccaccacgttcagccaggaggtcatgctgcgggtcaaggagatggcatcctgcagtgccgtggtgttagaggagtccaaatgcctcgtgcggagcttcctgaaatcagtgctggaagacgtgaacgagaaggaatgcctcatgctcaagcagctctggagctcctccaaaggccttgactcccttttcagctacctgcaggacaaaatttatgaagtctgaggggccccagctcacgggcccccaacttccagctctgccctgtgtttcggaaaccagagcacagtgtctgccccggccaaggagtttgtcaaggtgtctctttatacgtagggttgtgtccatttcctcgtgtcctttggttgctcctccttggtttgattttgtgtaatggatggaaaacgcagcatacttggcctcccccacctccctgcccttcctggccagagagctgtccaaggctgtatcttcccaggggctccgccaagcaccgttgttcctttccccatttgctgaaatgcaccatgacggtccaggaaggggaagaccactttcacattcttctgactcaggctgtgtctacacagtgcctctgacttggagacttggccatcatggctctctctggttgtatttagatcgggtgtcagaggacgaccaatcttagggaatttccagaccaatgagcaaaatgattgtgcacacctggcctcagtctcctttccgacgcaaatctgtgtgactattagggcttggtcttaaaacccaattgagtgatttgcaaacccagatattctacatttagaaatgttttgttaaatatatatttttaaaacaatgtaagtggaaattctgataatttatgtgtattatatgtaaagctagttttgcaaaaacaaaaaa

SEQ ID NO: 11435 - DNA, 1401 bp, Homo sapiens
  SIMILAR (3215)..(8086): 991254mologous to Homo sapiens pregnancy-associated plasma protein-A preproform,accession number U28727,Smith-Waterman Score= 8915.
atggagccatggccctgctccccgggcggcggcggcgggacccgcgcccggcacgtcatcatcaacgtgggcggctgccgcgtgcgcctggcatgggccgcgctggcgcgatgccccctcgcgcgcctggagcgcctgcgcgcctgccgcggccacgacgacctgctgcgcgtgtgtgacgactacgacgtgagccgcgacgagttcttcttcgaccgcagcccgtgcgccttccgcgccatcgtggcgcttttgcgcgcagggaagctgcgactgctgcggggcccgtgcgcgctggccttccgcgacgagctggcctactggggcatcgacgaggcgcgcctggagcgctgctgcctgcgccgcctgcgccgccgcgaggaggaggcggccgaggcccgcgcggggccgacggagcgcggggcgcaggggagcccggcgcgcgccctgggacctcgggggcggctgcagcgcggccggcggcgcctgcgcgacgtggtggacaacccgcactcggggctggcgggcaagctcttcgcctgcgtgtccgtgtccttcgtggccgtcacggccgtgggcctctgcctgagcaccatgccggacatccgcgccgaggaggagcggggcgagtgctcccccaagtgccgcagcctgttcgtgctggagaccgtgtgcgtggcctggttctccttcgagttcctgctgcgctccctgcaggccgagagcaagtgcgccttcctgcgcgcgccactcaacatcattgacatcctggcgctcctgccgttctacgtgtcgctgctgctggggctggcggcaggcccgggcgggaccaagctcctggagcgcgcggggctggtgctgcggctgctgcgtgcgctgcgcgtgctctacgtgatgcgcctggcgcgccactcgctggggctgcgttcgctgggcctgaccatgcgccgctgcgcgcgcgagttcgggctgctgctgctgttcctctgcgtggccatggcgctcttcgcgccactggtgcacctggccgagcgcgagctgggcgcgcgccgcgacttctccagcgtgcccgccagctattggtgggccgtcatctccatgaccaccgtgggctacggcgacatggtcccgcgcagcctgcccgggcaggtggtggcgctcagcagcatcctcagcggcatcctgctcatggccttcccggtcacctccatcttccacaccttttcgcgctcctactccgagctcaaggagcagcagcagcgcgcggccagccccgagccggccctgcaggaggacagcacgcactcggccacagccaccgaggacagctcgcagggccccgacagcgcgggcctggccgacgactccgcggatgcgctgtgggtgcgggcagggcgctga

SEQ ID NO: 11436 - DNA, 1242 bp, Homo sapiens
  SIMILAR (129)..(278): 961254mologous to Homo sapiens hypothetical protein,accession number AL390156,Smith-Waterman Score=266.
ccttcagagaaaggtgggtagaggtgggtgcctctcccaccttacctgtgggtaggaagggggctgcatctctcaagccagaaacctgaagcaggcaccgagtgctccctgtctgagcctgggtggaagggcagagatatgttcctgagaattcccagcaatctgggggggattcgcacttccttgcagcaggagctctgggttactttgctggttgaagaggaaaagaatttggcccatttaggttcccaccaaattaccacccattcccgttctcagtccttcaaggagggcccccagctttgcagcccccaaccatggctggattcccgtcctccgtccccatcccttgaacctgagaccacagaccccaccctgacagtagagggcagaagctgccaggagagcctgctcagagcacagaacatcgtggagcagcccagggctgtggagcagagtctgaagggcgagtgctcccccaagtgccgcagcctgttcgtgctggagaccgtgtgcgtggcctggttctccttcgagttcctgctgcgctccctgcaggccgagagcaagtgcgccttcctgcgcgcgccactcaacatcattgacatcctggcgctcctgccgttctacgtgtcgctgctgctggggctggcggcaggcccgggcgggaccaagctcctggagcgcgcggggctggtgctgcggctgctgcgtgcgctgcgcgtgctctacgtgatgcgcctggcgcgccactcgctggggctgcgttcgctgggcctgaccatgcgccgctgcgcgcgcgagttcgggctgctgctgctgttcctctgcgtggccatggcgctcttcgcgccactggtgcacctggccgagcgcgagctgggcgcgcgccgcgacttctccagcgtgcccgccagctattggtgggccgtcatctccatgaccaccgtgggctacggcgacatggtcccgcgcagcctgcccgggcaggtggtggcgctcagcagcatcctcagcggcatcctgctcatggccttcccggtcacctccatcttccacaccttttcgcgctcctactccgagctcaaggagcagcagcagcgcgcggccagccccgagccggccctgcaggaggacagcacgcactcggccacagccaccgaggacagctcgcagggccccgacagcgcgggcctggccgacgactccgcggatgcgctgtgggtgcgggcagggcgctga

SEQ ID NO: 11437 - DNA, 1104 bp, Homo sapiens
  SIMILAR (603)..(4): 991254mologous to Homo sapiens plasma prekallikrein,accession number M13143,Smith-Waterman Score=1083.
tcatgctggtgactgcatctgagcttttccatcactgctctgtgttgtctctaaaatccagtccatgtactcagcgactttggtgtagacaccaggttgctccctgcgggcacagccttcaccccagctggtgatgcccaccaaacgccacattccgttgtgtttgcaaactaagggaccacctgaatctcccttacaagcatcttttcccccttctttatagccagcacagaccatccgttgggttattttataatcttgatatcttttctggcattcttcatttgttaccaaaggaatatttaccttttgtagaatattttggatttcacctttctccttcgagaagccccatccggttacccaacagttggtataaattgtgcttgtgtcacctttggaaggtaggcatattggtttttggaattcagtgtaattcaaaggagcctggagttttatcaaggcgatatcatgattcccttctgagactttatagttttggtgaataataatctcttttatttgtgagaaaggtgtatcttttgtaatgtctgacagatttaaaatgccactatagatgcgccaaacatcctgcaggggaagccgggccttagctgccttcccgccgggcagggctcgggacctgcagcccgccatgcctgagcctcccacccgcttcacgggctcctgtgcggcccgagcctctccgatgagcgccgccccctgctccacggcgcccagtcccatcgaccacccaagggcaatcagcgccgtcaaaacagaccattcagctctaccaatcagcaggatgtgggtggggccggataagagaataaaagcaggctgcggagccagcagtggcaacccgctggggtccccttccacagtgtggaagctttgttctttcattctttgcaataaatcttgctgctgctcactctttgggtccacgctgcttttatgagctgtaacactcaccgcgaaggtctgcagcttctctccagaaggaagaaactccgaacacatccgaatatcagaaggaacagactccagacgcgccaccttaagagctttaacactcaccgcgagggtccgcggcttcat

SEQ ID NO: 11438 - DNA, 3018 bp, Homo sapiens
  SIMILAR (2)..(922): 651254mologous to Homo sapiens Gag-Pro-Pol-Env protein,accession number AF164611,Smith-Waterman Score=1074.
atggcccccacagctatggtacagcaagcagcatcaccaaagctgctgagagataaggaacctggaaagctagcatgccggcaaaaggcttatgaaattgcactaaacatgatgaaaaatacacaagaacttcaagatcactttttcctgaagggaagaactgctcacatggccatgattatcacacagtgttttaaggagataatcacaacgcctgagctcactgcaaaagcaacaggagtgtcacgtcaggccattaactcacgttcagctttcaagcccttacgtaaagaaccattcccatggcgtgaatcacccacaacgagcaggtcaggggcaggtgaaggcggaagttcacatcctaagactttcctgaagcggcaggctcttccacacagaaaccaaccgcaaggccagacaaaactgctggaatggctttcaaatctgtccctttctaaccccgttccccctggacctgcagtggccggaagaggaggaggaggagggtgcgggggtgaggaagcagagccgcgcgttccccggggctgggaggaaggcggaccgcgcctgggccccgcgggctggcagacaccaggaaggggccgcagaggagcgtggtggcggagtccagacccggggcctcgtgctctcgctggggcgccgcggctcagctttctggctctctccccgggtgcgagcacgcctccactccggaactgcatttggaggaccgggtcatcccaggctgaggaaagccatcgtccctcacctcgacttcgactaggacggctgccttcccgtggagcagcgctcgggacctgcaagcccgccatgcctgagcctcccaccccctccgtgggctcctgtgccgccggaggctccccaacaagtgtcgctccctgctccatggcacccagtcccatcgaccacccaagggctgaggagtgtgggctcacagcgtgggattggcaggcagctcctgtgcagccccagtgcgagacccactgggtgaaaccagctgggctcctgagtctagtgggaacttggagaacctttatgtctagctcagggattgtaaatacaccaattggcactctgtatctagctcaagactcatttggaagcagtgcatttttatcagagggactgaaaagcctttcgagaatcagtcaagaaaaaggaatgcgcatgagagtcatgaccccaccttcaaggtttgcttcaccagggaaactcaactgcccctggtctgtgatcccaaggggtcaggccactttaggctggaacttcctccactgcccacctgtgagtcaacaaaagaagccaagagctttaccctcagacgtaggccagcatgctgaaagcccgtcttcctgccctagtgtgtctggaattggtgggttcttggtctcactgactttaacaatgaagccgcggaccctcgcggtgagtgttacagctcttaaggtggtgcgtctggagcttgttccttctgatgttcagatgtgttcggagtttcttccttctggagtgaagctgcagacctttgcggggagtgttacagctcttaaggcagtgcgtctggagtttttcattcctcccggtgggctcgtggtcgcgctggcttcagaagtgaagctacagaccttcgtggtgagtgttacagctcataaaagcagtgtggacccaaagccccttgggtggtcgatgggactgggcgccatggagcagggggtggcactcgtcggggaggctcgggctgcacaggagcccacggagggtatgggaggctcaggcatggcggctgcaggtcccgagccctgccccacgggaaggcagctaaggacaggcgaggaattgagcgcagcgccgaaagtcctgtctgagtacattgagagtgctataacaagttaccataaactgggaaattataaacaacagaaatttatttctcacagtttgaagtctggaaagtccaagattgaggtgctggcagatttgcctactcaacgtgaagatgatgagcctcataactttgtgagaatgtataaagaatgcctttcatgttggttggaatctggcatacctaatttaggtgtctggccaaaaagaatacatactacagcagaaaaatatagagaatatgaagcccgggagcaaacagatcaaactcaagtccaggagttacacagatctcaagatagagattttgaaactatggctaaattacatattccagtaatggtggatgaagttgttcattgtttgtcaccacaaaaaggacagatttttctagatatgacatttggttcgggagggcacacaaaagccattctgcagaaggagtcagatattgttctctatgccttggacagagacccaacagcttatgcattagctgaacatctttcagagttgtatcctaaacaaatccgagctatgctgggccagttcagccaggcagaagccttattaatgaaagctggagtgcagccaggaacttttgatggagttcttatggatcttgggtgttcctccatgcaacttgatactcctgaaagaggttcttcccttcggaaagatggccctttggacataagaatggatgacttactacagcaatctacctatattgccaccaagactttccaggctcttcgcatatttgtgaacaatgagctcaatgaactctacacgggactgaagacagctcagaagtttctgagacttggtggtcgtcttgttgccctctccttccattcactagaggatcgcatcgtcaaaagatttttgcttggaataagcatgacagaaagatttaacctaagtgttagacaacaagtgatgaaaacatctcaattgggttcagatcatgaaaacacggaagaagtctctatgagaagagctcctttaatgtgggaactgatacacaagaaggtacttagtccacaagatcaggatgtacaagataaccccagagggcgctcagccaagcttagagcagctatcaaattataa

SEQ ID NO: 11439 - DNA, 368 bp, Homo sapiens
  SIMILAR (113)..(250): 451254mologous to Gallus gallus laminin B1,accession number L00963,Smith-Waterman Score=96.
ttatttccttcctggacactgagaggtgacagcgtgctggcagtcctcacagccctcgctagctctctgcgcctcctctgcctgggctcccactttggcggcacttgaggagcccttcagcccgccgctgcactgtgggagcccctttctgagctggccaaggccggagcccactccctcagcccctccatgggctcctgtgcggcccgagcctccccgacgagcgccaccccctgctccacggcgcccagtcccatcgaccacccaagggctgaggagtgcgggcacacggcaccgggactggcaggcagctccacttgcagccctggtgctggatccactgggtgaagccagctgggctcctgagt

SEQ ID NO: 11440 - DNA, 819 bp, Homo sapiens; identical to SEQ ID NO: 2750
  SIMILAR (138)..(1): 671254mologous to Homo sapiens Human secreted protein, SEQ ID NO: 7420,accession number G03339,Smith-Waterman Score=146.

SEQ ID NO: 11441 - DNA, 444 bp, Homo sapiens; identical to SEQ ID NO: 2752
  SIMILAR (55)..(279): 651254mologous to Mus musculus Pro-Pol-dUTPase polyprotein,accession number Y12713,Smith-Waterman Score=250.

SEQ ID NO: 11442 - DNA, 597 bp, Homo sapiens
  SIMILAR (314)..(505): 381254mologous to Mus musculus msg1,accession number X71629,Smith-Waterman Score=109.
atggaggggccgagcctgaggggtcctgcgctccgcctggcggggcttcccacccagcagcatagagctgcagccaagacagtctgtgatgagcagattggagcaacactgtctggaattgatactctcaacagaaattcccttaatagtgtgggattccaaggagggaagaccccttttgttcagagtgataaatcaaggtatctcccagtgggagggacccagtacgagataattgaatcacgtggtagtttctcccatactgttcttctaccactggttctcttcactgaccacatccaactggagctaacggccttagctgccttccctcggggcagggctcgggacctgcagcccgccatgcctgagcctcccacccactccatgggctcctgtgcagcccgagcctccccaacgagcaccaccccctgctccaccgcacccagtcccatcgaccacccaagggctggggaatgtgagcgcacggcgcgggactggcaggcagctccacctgcagccctggtgtgggatccactaggtgaagccagctgggctcctgagtctggtggggacgtggagagtctttatatctag

SEQ ID NO: 11443 - DNA, 386 bp, Homo sapiens; identical to SEQ ID NO: 6190
  SIMILAR (271)..(116): 431254mologous to cercopithicine herpesvirus 15 EBNA2-like protein,accession number AF200187,Smith-Waterman Score=103.

SEQ ID NO: 11444 - DNA, 350 bp, Homo sapiens
  SIMILAR (138)..(239): 471254mologous to Hydra sp. mini-collagen,accession number X61045,Smith-Waterman Score=88.
cctgcgatcacaatcacgagggggtagatctggatttccattggtggttttcttttcggctgcaatttccttttcggcgctgtgctctgtttctcgctgggccttagctgccttcccgtggagcaaggttcgggacctgcagcccgccatgcctgagcctcccacccactccatgggctcctgtgcggccggagcctccctgacgagcaccgccccctgctccacggcgcccagtcccatcgaccacctaagggctaaggaatgcgagcgcacggcgcaggactggcaggcagctccacctgcagccctggtgcgggatccactaggtgaagccagctgggctcctgagt

SEQ ID NO: 11445 - DNA, 444 bp, Homo sapiens; identical to SEQ ID NO: 3539
  SIMILAR (287)..(126): 371254mologous to Homo sapiens Human bcl2 proto-oncogene mutant protein fragment 14,accession number Y21166,Smith-Waterman Score=75.
  misc_feature (1)...(444): n = a,t,c or g

SEQ ID NO: 11446 - DNA, 780 bp, Homo sapiens
  SIMILAR (2224)..(4446): 931254mologous to Homo sapiens putative p150,accession number U93567,Smith-Waterman Score=3560.
atgtcagagacattcatggcagccctacccatcataggcctggaggcctacgagggaaaaatggttttgtgggtgaggcccgggacccaaggtacagatcgggccattgcttcagagagtgcaggacacaagccttggtggctttcacatgatgttgatcctgtgggttcacagaagtcaagaactgaggccttagctgccttcccgcggggcagggctcaggacctgcagcccgccatgtctgagcctcccacccactccatggactcccgtgcggcccgagcctccccaacgagcaccaccccctactccacggcgcccagtcccatcgaccacccaagggctgaggaatgcaagcgcacgacgcgggactggcaggcagctccacctgcagccctggtgcgggatccactaggtgaagccagctgggctcctgagtctgctgcacgggcaggcttgtggggacccagcaactccgtccagagagcggctgagtcagccagccgtccccacggctttgggcagccgccgaaggctcctgctaggcccggctggctcaccgggaagttccctgcctccgtcccgtcagcctccaggagggcgccgccggccgccgtgacttcagcaaggcactactatctccgtcagccgccgcctcggccatcttcctgcccggagtgcaacaaaatccggctctggccagccttccagctgacgccactctgccagggccctgcagcctcggagcgggatagaaggaagccgcagaaaagacgctga

SEQ ID NO: 11447 - DNA, 1524 bp, Homo sapiens
  SIMILAR (488)..(357): 701254mologous to Homo sapiens Human secreted protein, SEQ ID NO: 7678,accession number G03597,Smith-Waterman Score=156.
atgcaggaaagtgtaaagaagcccattgatttcacttgtaagcacattggaggagaacagacaattgaaggactccaggtgcaagatgtgacacagagagttggatcagagggtaactttatgactgtctttcaagaagaaggcaggggccagaacaggcgatatcttcaccatgcgcacaatgaaatcaatactcagagaaggcagataattctccacgaagccagaaaactaataaatgaacaacttctactgcaatcacgtatttttgacatccttggactatattgtgtccggaattggtgggttctcggtctcactgacttgaagaatgaagccgcggaccctcgcggagtgaagctgcggaccttcacggtgagtgttgcagctcttaaggaggcgcgtctggagttgttcgttcctcccggtgggttcgtggtctcgctggcttcaggagtgaagctgcagaccttcccggtgagtgttacagctcataaaggcagtgtggacccaaagaactcaggagcccagctggcttcacccagtggatcccgcaccagggctgcaggtggagctgcctgccagtcccgcgccgtgacgcacgcactcctcagcccttgggtggtcgatgggattgggcgccgtggagcagggggcggtgctcgtcggggaggctcgggccgcacaggagcccacggggtgggcgggggctcaagcatggcggactgcaggtcccaacccctgccctgcgggaaggcagctaaggcccggcgagaaatcgagcgcagcgccgccataacatatactggctccccttctccttccaccatgattataaacttcctgaggccctcaccagatccagatgccaacattatgcttcctgaacaaccttcaggactcctcagatattcctttatagcaacaaaaatggacagacagaaaactgatacagaagagtggggcattgctataaagattcctgaaggtgtgaaagtggctttggaactgggtaatgagcagagcttagaagaatttggaggctcagaagaagacaggaagatgagggaaagtttggtacttcttagagaattgttaagttgttgtcaccaaaatgttgatagaaatatggatagtaaaggccacactgataaggtctcagatagatacaaagaattcattgggaactggagcaaaggtgtagctcaggatgctgctcctaaaggtgcaagccataacccttggcggcttccatgtgggattaagtctgcaggtgaggacacagcatccctccccactgtgggacgcagcaatgcgactgagagcagcgctatccaaacaaccaaatctgctgatgccttgatcttggacctctcagctccagaactctggcttcagactccagtatctaatggcagcacgactcctcagagagcttcagaagcaagtgggagctcagctactgaccagccctggatgtctgtgacacagtatcatgtttcaggacaacgacacaaatgctag

SEQ ID NO: 11448 - DNA, 1368 bp, Homo sapiens
  SIMILAR (937)..(3474): 961254mologous to Homo sapiens putative p150,accession number U93563,Smith-Waterman Score=4251.
atgtgggaaagtttggaacttcctagagacttgttgaatggttttgaccaaaatgctgatagtgatgtggacaatgaagtccaagctgaggtggtctcagatggagatgaggaacttactgggaactggaatgaagatcacttttgctatgctttagcaaagagactggtggcattttgcctcttccctagagatatgtggaactttaaacttgagagagatgatctgaaattggaagttatgtttaaaagggaagcagagcataaaagtttggaaaatttgcagcctgatgatgcaatagaaaaagaaaaacccatttctggggagaaattcaagccagctgcagaaatttgcataagtaataaggagccaaacattaatagccaagacaatggggaaaatatctccagggcatcttgcaatgtgcacctggaaaagccacaggccactcaataccagcccatgaaggagtttcccaaggctgtgggggcccgcccccttaatcagtgtgccctggacaatttcagagatgagctgatgaaaggaggacaatttatggaaacgaaaatgggaataaaatacctaggaatccaacttacaagggatgtgaaggacctcttcaaggagaactacaaaccactgctcaatgaaataaaagaggatacgaacaaatggaagaacattccatgctcatgggtgggaagaatcaatatcgtgaaaatggccatactgcccaagataacttgttggtcaccaaaacaatctcttgataaagcaaatcagagtttattgcttgctgtaatacgggagtacaatgtcttgaccatctcagtagcatcttacaaggatgtgatggatttcaggcatgaatttgaggatttggaggtctactttaaggccttagctgccttcccgtggggcagggctcgggacctgcagcccgccatgcctgagcctcccatcccctctgtgggctcctgtgcggcccgagcctcctcgacaagcgccaccccctgctccacggcgcccagtcccatcgaccacccaagggctgaggagtgcgggcccacggtgctggactgggagacagctccatctgcagccccggtgcaggatccactgggtgaagccagctgggctcctgagtctgctaatctggtggggaggagaacctttgtgtctagctcagggattgtaaaggcaccaatcagcactctgtcaaaacagaccactcagctctaccaatcagcaggatgtgggtggggccagcttggattaattcagatgtggaataacaatgaaacaaaaccacctaagcgaaaaaagaggatttatctcaaatttagatttgtggaacaaggtgattga

SEQ ID NO: 11449 - DNA, 654 bp, Homo sapiens; identical to SEQ ID NO: 1923
  SIMILAR (592)..(47): 331254mologous to Bovine herpesvirus 1 UL36,accession number Z78205,Smith-Waterman Score=139.

SEQ ID NO: 11450 - DNA, 795 bp, Homo sapiens
  SIMILAR (394)..(771): 321254mologous to Drosophila melanogaster RNA-binding protein Smaug,accession number AF159852,Smith-Waterman Score=113.
atgcgcgcggcagggagggcgtttccaggagggagcggcctttgctcagcgcgagacggctgggcgccgagtgggacagcgctggtgcggagactgcttccggactccaggtaccgcgcttggcggcagctggccccagacttctgtcttttcagctgcagtgaaggctcggggctgcagagtcagttgctcctctccacggattttaagctcctggaggaaggaactgcggcctatgcatctccatattgcgaattgcagtctgctcagggcttggtctggtggacacagtcaggacagcccatgcacagggcatggcggtttctcgggcttatcatccacttcttggtattggtcattcttggtactggcccatactgtgagccacagcaaacagaggcccctcaaccactggagagctggctggggaagccaggagtaggaaattcaggggcccgcttcctgagtccagtgacgtccctgaaacctgacaagcatatcgaatttgatcaaaaagaagcctggggacttcttggcagggcttgggacctgcagcccgccatgcctgagcctctccagccctccgtgggctcctgtgtggcccgagcctccccaacgagcaccgccccctgctccacggcgcccagtcccatcaaccacccaagggctgaggagtatgggcacacggtgcaggactggcaggcagctccacctgcagccctggtgcaggatccactgggtgaagccagctgggctcctgagtctggtggggaggtggagaacctttatgtctag

SEQ ID NO: 11451 - DNA, 936 bp, Homo sapiens
  SIMILAR (1627)..(3297): 971254mologous to Homo sapiens putative p150,accession number U93563,Smith-Waterman Score=2950.
tcactctattaaatcttggaactgcacacttttctggtccgtgtttgttagggctcgagctgagctttcgcttgctgtccaccactgctgtttgctgccgtcgcagacccgcagctgacttctacccctccggatccagcagggtgtctgctgcactcctgatccagtgaggcgcacattgccactcccaatcgggctaaaggcttgccattgttcctgcacggtggttttaatcattgtctgaagacgagctggagtgtactgattttcagtgaaggcattctgggtacctgatatggtttggttctgtgtccccacccaaatctcatcttgaattgtattcccataattcccatgtgttgttggggggactgaaagtctttccgggggcctggaagctggtgggggatgaataactcctcctttctcaggcccagtccaagggacaaggccaattgtgccagcagcgtgcgtcagcaagatagcagaagcaggaagagagctggccagaagacacgtatccccgggccttagctgccttcccgcggggcagggctcgggacctgcagcccgccatgcctgagcctcccaccctctccatgggctcctgtgcgcccgagcctccccgaggagcgccaccccctgctccacggcgccgaatcccatcgaccacccaagggctgaggagttcgggcgcagggcgccggacttgcaggcagctccacctgcagcccaggtgcaggatccactgggtgaagccagctgggctcctgagtctgtggcttttccaaatgcacagtgcaagctgttggtggaactaccactctggggcctggaggatggtggccctcttctcatggctccactaggaatgccccagtggggaatctggggctccaatcctacattttccctttgcactaccctagtagacat

SEQ ID NO: 11452 - DNA, 810 bp, Homo sapiens
  SIMILAR (86)..(12): 721254mologous to Homo sapiens Human secreted protein, SEQ ID NO: 7083,accession number G03002,Smith-Waterman Score=67.
atggcaggagtgaagctgcggaccttcgcggtgagtgttacagctcttaaggcggcacgtctggagttgttcgttcccccccggggtcgtggtctcgctggctttagcagtgaagctgcagacctttgtgactcaggagcccagctggcttcacccagtggatcccgcaccagggctgcaggtggagctgcctgccagtcccctgcagtgcacccgcacttctcagcccttgggtggtcgatgggactgggcgccgtggagcagggggcggcgctcatcggggaggctggggccgcacaggagcccatggagggggtaggaggctcaggcatggcgggctgcaggtcccgagccatgccccgcgggaaggcagctaaggccctgcgagaaatcgagcgaagcgccgctttccacactgtactttttaggaagaagtcactgtgtgtagcccacaaaaaaggggtggagattgaaatttcacctcctagacaggaagcttcacttgattttatttccatggacttattatccaaggatgttgcttctgctgaatcatgctggtataaaaatcttgtcctagaggtggcatgcatgcagtggtttcatggagaccatacaatgcttgagatgattgagaaaaagcgttgcttgtgcaaggaaataaaggctagacagaaaacggaaaagggcctttgcaaacaggatagcatgcctatcttgcccagctggaagaagaatgcaggtgccaagaagtacagccctccaccgtattctaaacagcaaacggtattctgggatactgccatatga

SEQ ID NO: 11453 - DNA, 3342 bp, Homo sapiens; identical to SEQ ID NO: 3545
  SIMILAR (1435)..(2874): 971254mologous to Homo sapiens putative p150,accession number U93563,Smith-Waterman Score=2534.

SEQ ID NO: 11454 - DNA, 901 bp, Homo sapiens
  SIMILAR (798)..(364): 681254mologous to Homo sapiens Deleted in Colorectal Carcinomas,accession number R13144,Smith-Waterman Score=455.
tggctcagaacctgagaacttgtttgacatattctgatattctgtaatttttccattcccttcttcacaatgtggtgaacaaaaactaccaaatgagtagcgtgccttagctgccttcccgcggggcagggctcgggacctgtagcccgccatgcctgagcctcccacccactccatgggctcctgtgcggcccgagcctccccaaggagcaccaccccctgctccacggcgcccagtcccatcgaccacccaagggctgaggagtgcgagcgcacggcacgggactggcaggcagctccacctgcagccctggtgcgggatccactgggtgaagctagctgggctcctgagtctggtggggagccaacaccttcggggccaggggtcgcgggcagcggcagcactcacacacatgcactcacacacgcatgcacacatgcacacacacgcgccgagccccttcggcttcctcctcctcctcgtcctcttcctccacctctttctccacctcccctgcgcctctgctgccttcgaagcctttttccttgtccactgacagaatcagcagcaaaagcaggcagcaaaaagttccattcggtccaagagatcccgagccccgcggtgtgcgagctgggagttggaaccgtactacacattgatccggagaagtggagggctggaagggaaaatgtggagaccggagggaaacgaactggatcaggcaaagattccacgggaagggggtgggggcagacagactatggcttagggaaaaaagagcggaccgaggaggcttccaggagctgcatttgcctggtctgcgtatcaatgcgcagggatgccctctgtgggcaaagcgtgggaagtcacttttgtcaatggagcctgcgaacatcctga

SEQ ID NO: 11455 - DNA, 3066 bp, Homo sapiens
  SIMILAR (1458)..(3314): 941254mologous to Homo sapiens putative p150,accession number U93572,Smith-Waterman Score=3039.
atgaggccgcggaccctcgcgatgagcgttacagctcttaaggtggcgcgtctggagtttgttccttctgatgttcggatgtgttcagagtttcttccttctggagtgaagctgcagaccttcgaggtgagtgttacagctcttaaggcggctcgtctggagttgttcgttcctcccggtgggctcctggtcccgctgacttcaggagtggagccgcagatcttcatggtgagtgttatagctcataaaggcagtgtggacccaaagaactcaggagcccagctggcttcacccagtggatcccccaacggggctgcagatggagctgcctgccagtcccgtgccgtgtgcctgcactcctcagcccttgggtggtcgatgggactgggtgccatggagcagagggtgggaggctcagtgacaagcataagtcagcggttaatgttccctgccaaaggaactctcatgttggataaactttgcagtgcaggtggtagcctaccctgcacttccctgaaaggtgagggtgaagatttcaccccctcgctggcaggcctgcatcttaatgctgcagggctacattgcacaaatgatatcacgacaaggcccagaggaattcctgatgctgctcagagcactctggcaactcccagtgcagctaggtccaatccagcagatgcgcccttaatttgtttcccaagatctgggtcttatctgagaataggtattatacgtctacttccttttgagattaagccacaatgcacagtcattcactggaaagtaacagggattcttgtgatgtggaaacagctcttgggtgcgtgtatgcaagaaaagacggccttcgcagggccttggaaagaagtgaaggtgaaatctggtgtaatgagaggcgaggccagtaagagaagaaatccacgtgagcggtgtgaagcttgttttttggagggctgctgggtgggctccctgactccgagaaaagggagtgaagagctggaatttttcagagaacttcagcggtccatttggagagtgaggccggttacattcccatctcttgaaccctttggaagtgtggtcgcaggcactgtagccatcaaagttcaccatgtagaggacatagcgctcagtcttatcttctgggacggagtcctcatagtgagggcagaaaacatccaggtagtcattgatacagacatcaatatggtagtcacccctctggaatctgttagaaaaagaaaaaaaaatgtgataattcatagagaaagggctttctgcttggaatcagtggttaagccattcaataattttggagctaaagcatctagtatagtaagtagataccacctcgcttttcttccttatgattttcatggtgccgacctgacttcctcctggaccccacactcctgtgttgtggatattgacagctggggaggccacattgaaaggacactcaggcagtgccctgggcttcaggctgcagaggagcagcaccataatcctccttctctgagttcatctttagccactttgccctgcagtcttcctcctttcattccatcctcatttgctaaagccaaaatgcatttcattttagtagctggaaaaggaagggaatgctttgaaaataactaccaagttattagtataagttttttcaaaggcccgtttctcgttctccttattttggtgcctcctttgctagtgccgttgcgtccctgtgtcaattttgccattagtcaaaccattacgcggcagggttgcgcggtttggcttcattcaacattaggttttggtgaccagccatgccgccttcgcgttcccggcgtcgccctttcaaacactacttcttctacaagctccggacaagtcgacttctatatccttaccatatcttcattcacttgtcttcttagtgcgcttctcctaggtctgcctcacagcggccgtgtactcaagtttaaagctcgcttcgatgtcttcatcgtcttcccaaccgttggcggttggaagttctcccttataaatcatatcccctgtgccacgtctttaatgccacactggccgttggcacatcaggccgtggcacgtcgggtagtgctgggagtttccactgttcggttaaagtacctgtatatcctccccccgctttcgcatatgtcaacgggtacttgtcccctctccggccaagtccatcttaatcgtcacgtgctcgccacgccctcggccgtccccaaaagtgtcagcgctgtttccgtcagctacgtaccatcatctatttgtccttcggcggttgcattcttcactaggcaatcttggatcttcattgctgccgctgcttctaacattcggtgccactttcctcaaactaaagttaagatgggacgcattttgcacccgttcttcggcattgcgattttcgtcgcactgatgtttatgtttgtgcgttttgtgcatcacaacatcccggataagaaagatattccgtggctgttgaacattgtcgaagtattgaaaggcaatgagcataaagtggcggatgtcggtaagtacaacgccgggcaaaagatgatgttctggtcgatcatgagcatgattttcgtgctgctggtgaccggggtgattatctggcgtccgtactttgcgcagtacttcccgatgcaggttgttcgctacagcctgctgatccacgcggctgcgggtatcatcctgatccacgccatcctgatccatatgtatatggcattttgggtgaaaggatcgattaaagggatgatcgaagggaagattagcgaccgaacagtcgatcgcttcgatctcaatcttcacgtctttcggcagacgggcaacttcacgcagaacgtgccgggaagatcttttacaaacacggtagttttaacgatgtcgcccactcaggccagcggcttcgacgatcgcttttacgttatccagcgactgacgtgggggtgcagcgacgtctgccggtacttcgcccgttttcggatttaccgggatctgaccggaggtgatgatcatattgcccagatcaacgccctgtaa

SEQ ID NO: 11456 - DNA, 789 bp, Homo sapiens
  SIMILAR (1)..(3291): 991254mologous to Homo sapiens unknown,accession number AF148856,Smith-Waterman Score=5719.
atgaagccacggacccccgcggtgagtgttacagttcttaaaggcagcacgtctgcatgtctggagtttgttccttctgatgttcggatgtgttcggagtttcttccttctggagtgaagctgcggaccttcgcggtgtgtgttacagcttttaaggtggcgcgtctggagttgtccgttcctccctgtgggttcgtggtgtcactggcttcaggagtgaagctgcagaccttcgtggtgagtgttacagctcataaaggcagtgtggacccaaagaactcaggagcccagttggcttcacccagtggatcccgcactggggctgcaggtggagctgcctgccagtcccgcgccctgcgcctgcactcctcagcccttgggtggtcgatgggactgggcgccgtggagcacggggcagtgctcatcggggaggctcgggcggcacaggagcccatggagggggtgggaggctcaggcatggcgggctgcaggtcccaagtcctgccccgcgggaaggcagctaaggcccggcgagaaatagagcgcagcgccgctgagggagtgggctccggccttggccagcccagaaaggggctcccacagtgcagtggtggactgaagggctcctcaagtgccgccaaagtgggagcccaggcagaagaggctccgagagggagcgggggctgtgaggactgccagcacgctgtcacctctcaccaggagcctgctaaactcaaagatgatgagcataaaaacctttatgatgatctgtttccacttaatggatag

SEQ ID NO: 11457 - DNA, 2806 bp, Homo sapiens
  SIMILAR (2356)..(2535): 701254mologous to Homo sapiens Human secreted protein, SEQ ID NO: 7678,accession number G03597,Smith-Waterman Score=180.
tttttttttttttttttttgcagagtcggccgtgtggaagaccggagttttattattattcaaatcagtctctctgaaaactcagggattgaggtttttaaggataacttggtgagtagagggccagtaagtcgggagtgctgattgttcgggtccaagataaaatcttagggagctgaagctgtcctcttgagctgagtccattcctgggtgggggccacaagaccagatgggccaatttatctatttgggtggtgccagctgatccactgaatacagggtctgtaaaagatgttaagcactcatcttaggttatcacaggagcaatttaaggaggttcagaatcccgccacctccagctgcattactcctacaccataatttctaatctcatggcaaatttgttagtcctacaaaggcagtctgatcctcaggcaggcagggactttgttttggaaaagagttgttattgtctttgtttcaaagttaaaccattgtgaaccccaaatatctgagacaggtctcagtcgatttaggaagtttattttgccaaagttaaggatgtgtgcccgtgacacagcctcaggaagtcctgacgacatgtgcccaaggtggtcgggcacagcttggttttatacattttagggagacatgggacatcaatcagtatatgtaaggtatacattggttccatccagaaaggtgggacaactcgaagcagggagggacttctgggtcataggtagataagaggcaaacggttgcattcttttgagtttctgattggcctttccaaaggaggcaggcagagacgcatctatctcagtgagcagaggtggctttgagttctgtcatttgtccacaaggaatttccttgtgagggaggtatgtagctttttaatcgtagtagctatcttttttaggaatagaatgggaggcaggtttgccctaagcagttcccagcttgactttctgctttggcttagtgattttggggccccaagatttattttcctttcacactgtaaactaagttcctcccaaagtaggttgagcctacgcccggggatgaacaaggacagcttggagattagaagcaagatggagtcggttaggttagttgtcctttcacggtcataattttctgttataatttttgcagaggcggtttcagcaccacggcggtcatggccagagcaaaaagtatgtttttgatgttgaaaggaaaggctggacctgactttggtatcagatttactgccagttccgggtggtttacatgatttgaggatcgttatgcattacataatgttaacatgaatgctgagtctgtgggtgctgatgtgaaggcagctgaagagttttggaagcttgattatggaggagatttacttgccacagcaaatcttcaatatggaggaaacctcgctattctggaaacagatgcctgaaagaacttttgtatctgcccaaggggtttttcctgaccactgcacaaagaaagaccatggcatttttgtagagaaagagtttaacagacacaagggtggccacgccatgtgggagactgagttgagaggtgacagcgtgctggcagtcctcacagccctcgctcgctctcagtgcctcctctgcctgggctcccactttggcggcacttgaggagcccttcagcccaccgctgcactatgggagcccctttctgggctggccaaggccacagccggctccctcagcttgcagggaggcgtggagggagaggcgcgagcgggaaccggtgctgcgtgcagcgcttgcaggccagctggagttccaggtgggcatgggcttggcgggccccacactcggagcagccggccggccctgccggccccgggcagtgaggaacttggcacccgggccagcggctgcagaggatgtactgggttctccagcagtgccggctcaccggcgctgtgctcgatttctcgccgggccttagctgccttcccgcagggcagggctcgggacctgcagcccgccatgcctgagccttccacccactccatgggctcctgtgcggccggagcctccccgactagcaccaccccctgctccatggcgcccagtcccatcgaccacccaagggctgaggagtatgagtgcacggcgcgggactggcaggcagctccacctgcagccccggtgcgggatccactaagtgaagccagctgggctcctgagttctttgggtccacactgcttttatgagctataacactcaccgagaagatctgcagcttctctcctgaagccagcgagaccatgagcccaccaggaggaacgaacaactccagacgtgctgccttaagagctgtaacactcacagcgaaggtctgcagcctcactccagaaggaagaaactccgaacacatctgaacatcagaaggaacaagctccagacgcaccaccttaagagctgtaacactcaccgcgagggtccgcggcttcattgttaaagtcagtgagaccaagaacccaccaattccagacacactagggcaggaagacgggctttcagcatgctggcctacgtctgagggtaaagctcttggcttcttttgttgactcacaggtgggcagtggaggaagttccagcctaaagtggcctgaccccttgggatcacagaccaggggcagttgagtttccctggtgaagcaaaccttgaaggtggggtcatgactctcatgcgcattcctttttcttgactgattctcgaaaggcttttcagtccctctgataaaaatgcactgcttccaaatgagt

SEQ ID NO: 11458 - DNA, 1893 bp, Homo sapiens
  SIMILAR (1)..(3093): 991254mologous to Homo sapiens unknown,accession number AF148856,Smith-Waterman Score=5349.
atggcaaagaagattcaactgacatataagtgtgtccagaattggtgggttcttggtctcactgacttcaagaacgaagccgcagaccctcgcagagtgaagctgcagaccttcgtggtgagtgttacagctcttaaggcggcgcacctggagttgttcattgcgcgcctggagttgttcgttcctcccagtgggcttgtggtctcgctggcttcaggagtgaagctgcagacctttgcggtgagtgttatagctcataaaagcagtgtggacccaaagagtgaacagtagcaagatttattgcaaagagtgaaagaacaaagcttccacagtgtggaaggggacccaagcgggttgccactgctggctcaggcagcctgcttttcttctcttatctggccccacccacatcctgctgattggtccattttacagaaagtcagtctgttttacagagagctattggtccatttttacagggttctgattggtgcatttacaatccctgagttagacacaaaagttctccacgtccccactagattagctagatagagtgtcgattggtgtatttacaaacactgagctagacatagagtgctgattggtccatttacaaaccttgagctagatacagagtgccgattggtgcattcacaatcccttagctagacataaagattctccaagtccccaccagattaactagatacagagtgctgattggtgcattcacaaaccttgtgctaaacacagggtgctgattggtgtatttacaaaccttgagtggggctgcaggtggagctgcctgccagtcctggtgccgtgcgcctgcactcctcagcccttgggtggtcgatgggactgggcgccgtggagcagggggtggcgctcgttcggggaggctcgggctgcacagaagcccatggagggggtgggaggctcaggcatggcgggctgcaggtcccgagccctgcccttagactcagagccacagtggatgcctgaggccagcaggcccctctgctccacaggtggaaaagcctgaggttcgccgacctccagagcccgcagctgcaccacggagaggtgagtgctgctcttccctggctgcggcatatagggcgaaggctggttgacctctggccttctggggcaggtcacacagaaggaaggctccttctcagagccttcactgtggcatctgtcaaatggtcttgtattctttaccttgttcagtgcaaggatgaatgataggatgcctgtcaagggcttttggcagtgcctagtgatgcattcagcattgccaccactgttgctgttaccgttgccgtgcttcagcagctggagcagcctctttgcaaggcagtacccatgtgagaattcagcacatgcactccatgaccctgtgcttctgacgcccagtgtgcgactcagagacgtctgtaccaggtccatatggcccctggtggtcaccgggctgccatcagcaatgaatgtgagttcctggtgctccacatcctcgccagcatttggtgtgttagtgctttggatatgagccactccagtaggtgcgtggcagtatctcatggttggtttaacttgcagctccctaatgatatacctatgtggagcatctttcaggtgcttatttgccatctgtgtatcttcttgaatgaggtgtctgtttagatcttctgcccactttttaattgggttgttttcctgggagcagcctggacacgtgatcccagggaaagtgtggggtgcccctcggaggactccgtagcaggcaccagcaacagacaagatgtgcgccaacaggaaggaacacttaacactgctgaccgtcagggtcaggtggtttagaggacatcgttctgcaagccccat

SEQ ID NO: 11459 - DNA, 1917 bp, Homo sapiens
  SIMILAR (491)..(880): 501254mologous to Human endogenous retrovirus K pol protein,accession number Y17832,Smith-Waterman Score=324.
aaaccaaaatcttcatgctgaaagatactgcaattctactttagaaagaaatgatacgccaatagaaagcttaaaaccaaaaagggagagtgaagatggactaggagaacacaatggaagtacaatggaagaagtgggtgcagaaactagggtgcagcgccactgggttagggtctccatgactgagctggccttggcaagtgatgcccatatgtggggctcaaacccaggtcaaagggtcaccggagtgatggttggagaatgtggaactatgctgggggacacccaagtactcttaagcaatccctgtgttgtttcaatttttgaaattaattggattctccctaaaataactaaatttaaaccaattgaaggtgctgaaaatgccttcacagatgggtctagtaatggtaaagctacttattctgcctcgaaaggtaaagtttttccaacgccctatacttcagctcaaaaagcggagcttgtagctgtaattgagtgttttccagtgatgcgcattccagcttctactaaaacggacaatgccccaggctatactagccaagctgtagctacatttttctctatatggaatattaaacacattactggtatcccatgtaattctcaaggacaagccatagtggaaagaatgaatctctccctgaaacagcagttgcaaaagcaaaaagggggaaatagggactatgggacaacccatatgcaattgaatctagcattatcgactttaaattttttgagcctgcctacaggccagatgctatcagcagctgaacagcatctacagaaaccagctgcaaagacagaagcagaacaactggttaggtggagagatccgataacagaaagttgggaagtagaatggccaaaattcagaaaactgacaacaaaaaatgctggcaaggatgtggagcaacaggaactatcattcattgctggtggtactgtgtccggaattggtgggttcttgggtctccctgacttcaagaatgaagctgccgaccctcgcggtgagtgttacagttcttaaaggcggcgtgtctggagttttgttccttctgatgttcggatgtgttgggagtttcttccttctggagtgaagctgcagaccttcgcggtgagtgttacagctcttaaggccgcgcgtctggggttgttcgttcctcccggtgggctcgtggtctccctgggctcaggagtgaagctgcagatcttcgcggtgagtgttacagctcataaaagcagcgtggacccaaagaactcaggagcccagctggcttcacccagtggatccagcaccagggctgcaagtggagctgcctgccagtcccggtgccgtgtgcccgcactcctcagcccttgggtggtcgatgggactgggaccccctgcagtggagcagggggtggcacttgtcggggaggcttgggccgcacaggagcccatggagtgggtgggaggctcaggcatggtgggctgcaggtcccgagccctgcccccacgggaaggcagctaaggcccggcgagaaatggagcgcagcgccagtgggccggcactgctgggggacccagtacaccctccgcagccactggcccggtgcagcggtgggctgaagggctcctcaagtgtcaccaaagtgggagcccaggcagaggaggtgcccagagcgagcgagggctgtgaggactgccagcacgctgtcacctctcctaaccacctggactcagtgatatggtttggctgtgtccccaccgaaatctcatcttcagttgtagctcccataatccccacatgtcatggaaaggaactggtgggagtaggaggtgctgctcaggcaatgcatgctcaggcacacaggactgctcaggcaatgcgtgctgagcaaatgaatacatga

SEQ ID NO: 11460 - DNA, 342 bp, Homo sapiens
  SIMILAR (1)..(342): 901254mologous to Homo sapiens Human secreted protein sequence encoded by gene 40 SEQ ID NO:101,accession number B24476,Smith-Waterman Score=539.
ctcatggtcaactccctgactgaagtggacattaagtcccgtggagtgcctgtcttagacctgttccttgcccaggaggctgagcggctgaggaaacagactggggcagtggaaaaggtggaagagcagtgccatccattgaatgggttgaacttttcacaggtcatctttgctttgaaccagaccctcctgcagcaggaaagcctgcgagcaggcagtcttcagatcccctacacgacggaggatctcatcaaacactataactgcggggacctcagctccgtcatcctcagccatgacagctcccaggagcgcatcactgctcaggagattgacagctac

SEQ ID NO: 11461 - DNA, 3084 bp, Homo sapiens
  SIMILAR (921)..(160): 391254mologous to Rattus norvegicus ribosomal protein S2,accession number U92697,Smith-Waterman Score=248.
atggcacgagatcgggtgaagaatggtctcaccaagctactagaaacaaacatactagtagataaaatgaaactagatctttcagctttagagcctgtacttttagcaaaatcagaagatgttgaagccctgatggaaaaattggcagtggatcaagaaagtgccgatcaggtccgtaacactgtgcaggaggatgaagcaacagcaaaagtcaaagctgaagaaacccaagcaatagctgatgatgctcaaagagatcttgacgaggcactacctgcactagatgctgccaataaagcactggattccttagataaggcagatatatctgaaatcagagtttttacaaagcccccagatttggtcatgacagtaatggaagcaatctccattcttttgaatgccaagcctgattggccatcagcaaagcaacttcttggtgactctaactttctaaaaaggcttttagaatatgataaggagaacataaagcctcagatattggcaaagcttcaaaagtatattaataatcctgattttgtgcctgaaaaagtggagaaagtgtccaaagcatgtaaatctatgtgcatgtgggctgaacttgacattaccatggctaccctgagagaaaagcaagcattactaagacaagtagaagatcaaatacaggccttacaagatgaatatgacaaaggtgtaaatgaaaaagaaagcctggcaaagaccatggccctgacaaaagcacgtctagtacgtgctggaaagctgacagcagcattagaagatgagcaggttcgatgggaagaaagcatacagaagtttgaggaagaaatatcaaatatcactgggaacgtgttcatagcagcagcttgtgtggcctactatggggctttcacagcccagtacaggcagtcacttatagagtgttggatccaggactgtcagtctctggagatcccaatcgatccttccttcagtctcattaacattcttggagatccctacgagatacggcagtggaacactgatgggctgccccgtgacttgatatcaacagaaaatggcattttggttactcaaggcagaagatggcctttgatgattgatccccaagatcaggtatgcattaaagttaccattatcaatttcactgtaacaaaatcaggcctggaggatcagttgttaagtgatgtggtgcgacttgaaaaacccaggttggaagaacaaagaattaagctcatcgtgaggatcaacactgataaaaaccagttgaaaactatcgaagagaaaatcctgagaatgctctttacctctgaaggaaatattctggacaatgaagaacttattgacacactccaggattcaaaggcaagttcctgcacagaggtacgtagcaggctctcaatcaatgctggttcaacacatgaaggaactcgtctttatattatatgtagacaatacctcaccactctgtttggagcagataaagctgatcggatttatgatgacatgcctgatatagagaaaactgcaaatgttctacaggactatcttgatgattataatctcacaaatcccaaagaagtaaagttggtgttcttccaggatgctatagaacatgtttcaaggattgctcggatgatacgtcaagaaagaggcaatgccctgcttgttggagtaggaggcacaggaaagcagtcactcacgagacttgcagctcatatatgcggttacaaatgtttgcagattgaactcagccggggatataattatgatagttttcatgaagacctgaggaagttgtacaaaatggctggtgtagaagacaagaatatggttttccttttcactgacacccagattgtagtggaggagttcctagaagatataaataacatcctgaactcaggtgaagtgcctaatttatttgaaaaggatgaactggagcaggttttagcggccaccagaccaagagcaaaagaagtaggaatttctgaggggaacagagacgagatttgttacctgctctggcttgtgaccaatagagggatgggaaggatgggaacacagtatggtctagagggtaccaagacagaagaggctattgtgcagaaccttggggagacgccttccagagagactggaggtgcctctgccagagaaaaggaggagaccctcctgcagcaggaaagcctgcgagcaggcagtcttcagatcccctacacgacggaggatctcatcaaacactataactgcggggacctcagctccgtcatcctcagccatgacagctcccagggcccctacaggaggtcagggaatgtgctgtcactagaggctggtagagaggggggctctgctgaagagaagagattttgggaaatgggcaggggatcttacataaatgacatgattaaaaaaaaagatgacagagtagaagatgaaggctgtcgatttgaaaatgaaagaatatcatttcgaggccgtcgcaaaaggagatctgttatccataagatggaagttaatgctgtcacagagtctgaggactttggaaagctttttgagaggctactggaagcagcagcagcaggcagggagcgcatcactgctcaggagattgacagctacttacgccgggagctgatctacaagcggaatgagagaatagggaagcgggtgaaggcccttttggaggagttccctgacaaaggcttcttctttgcctttggagctgagcaggtctttgatctgaggggaatgaaagtgctggaaagaggagagactcgctggggggcctttgtttttgacaaaaaagacatctgccggactcgaaccccctcacccaccccctcaacccctgggctaacgcaacaatgccccaactgggacttgggtctccccacagctgaacaagtctcaggaaagagaaaaaggtctgctgcaaatgtggacaggagcttaatcgattctttccacagcccagaaagaaagggagagagaagaagggctgtggggaggcaaggggagagtggaaagggggacgtgggggctagggggcaaggaagggtagaatttgaaccctga

SEQ ID NO: 11462 - DNA, 371 bp, Homo sapiens
  SIMILAR (2358)..(52): 321254mologous to Bos taurus ankyrin 1,accession number AF222766,Smith-Waterman Score=750.
atgggccttctgcttccttctcggggcctatttgctgtactgccgcacgcccagggttccctggttgtgactcctgagactacagtgggtcatttcatgggcaacaacacagtgctggatgttttgcggcgtgaaggctatgaggtagaacacgcccctgctggacgacccatccacaagagtgccagcctggcaggaataaagatgaccaaggaaggaaaaaagagggtagcggatctggtgaaagcagagacgcagactcccttcatttccactacagagaaataccagccctctgtgccaactaaccaggtttctcctttcctctcccacccccacccctccaaacacgcattaacttctgcagtctg

SEQ ID NO: 11463 - DNA, 630 bp, Homo sapiens
  SIMILAR (1)..(501): 991254mologous to Homo sapiens Human secreted protein sequence encoded by gene 40 SEQ ID NO:101,accession number B24476,Smith-Waterman Score=842.
tgggtgatgctcatggtcaactccctgactgaagtggacattaagtcccgtggagtgcctgttttagacctgttccttgcccaggaggctgagcggctgaggaaacagactggggcagtggaaaaggtggaagagcagtgccatccattgaatgggttgaacttttcacaggtcatctttgctttgaaccagaccctcctgcagcaggaaagcctggaagcaggcagtcttcagatcccctacacgacggaggatctcatcaaacactataactgcggggacctcagctccgtcatcctcagccatgacagctcccaggttcccaattttattaatgctacgctaccacctcaggagcgcatcactgctcaggagattgacagctacttacgccgggagctgatctacaagcggaatgagagaatagggaagcgggtgaaggcccttttggaggagttccctgacaaaggcttcttctttgcctttggagctgcttcacagtagccttgaaaatcaggagcctcggattacagtagctgtgaaaactgtttgcctaatggtactgggaggggacagaatgggttcaaagttcctccaaagctccatccttaaagaatcatcactatttga

SEQ ID NO: 11464 - DNA, 1523 bp, Homo sapiens
  SIMILAR (1)..(471): 821254mologous to Rattus norvegicus hnRNP protein,accession number Y16641,Smith-Waterman Score=720.
  misc_feature (1)...(1523): n = a,t,c or g
atgaccaagcagatttgttacctgctctggcttgtgaccaatagagggatgggaaggatgggaacacagtatggtctagagggtaccaagacagaagaggctattgtgcagaaccttggggagacgccttccagagagactggaggtgcctctgccagagaaaaggaggagaccctcctgcagcaggaaagcctgcgagcaggcagtcttcagatcccctacacgacggaggatctcatcaaacactataactgcggggacctcagctccgtcatcctcagccatgacagctcccagggcccctacaggaggtcagggaatgtgctgtcactagaggctggtagagaggggggctctgctgaagagaagagattttgggaaatgggcaggggatcttacataaatgacatgattaaaaaaaaagatgacagagtagaagatgaaggctgtcgatttgaaaatgaaagaatatcatttcgaggccgtcgcaaaaggagatctgttatccataagatggaagttaatgctgtcacagagtctgaggactttggaaagctttttgagaggctactggaagcagcagcagcaggcagggagcgcatcactgctcaggagattgacagctacttacgccgggagctgatctacaagcggaatgagagaatagggaagcgggtgaaggcccttttggaggagttccctgacaaaggcttcttctttgcctttggagctggtcatttcatgggcaacaacacagtgctggatgttttgcggcgtgaaggctatgaggtagaacacgcccctgctggacagacccatccacaaagggaagagtaaaaagacctccacactggcccacttctgtccaccatctttgctccaaaagtccctgaccctggggaagtacccggcaccaagaagccgtattccttcagggcactcaacggctggcctccccttggtgttcccggcctggaagttgccgacacggcccagtgaggccgaacagaggttccggaagaagccgaaggggttcacagcggaagctgctactccggcaattcaagcgatctgtgggtccgcctggaggagagtgacatagtccccgcaactccaggtccctgtcctggacaggcacatctcccactgaactgcggctcccttcgccgtgggcattcccacccacagccagatggtggcccagcagtgccctgccctgtctcttctggactcctgtgttcctgggtgctggtgctgggctttcccaaacagagacacccctcctgtaactactggaaagcaccaggctaagaacctgacccctcggacttgaagaatggccattcctgtactccacattctggtctagccttgttgggcccaatccagaagagactgctctttgaaaaagcggcccagtgttgattcttctctttccaaggaatgtgactttgggttatccaactttgggggcaggtgtacagttttgtaacataagtgagtgtgntgtgaaaataaattat

SEQ ID NO: 11465 - DNA, 576 bp, Homo sapiens
  SIMILAR (139)..(573): 861254mologous to Homo sapiens unnamed protein product,accession number AK025000,Smith-Waterman Score=650.
cccggagtctagaatcagagagacctcccgcgaggatatgctaaaagtcccatagaaaacagtggggaaaacaacttcctcttctgaacaatctttcagaggacattcctcctagagtttaaaacattacagtctccagagcccagcgccaattccgtgtcagcccacaacccgctctggttgcacagcttcacgagtcacaaggactggatggacaagtgtgtgtgcctagtgactgccttctcccagcacatgcaccatgtcccggtggcattgccggagatggtccgtgccctctcagcccagcagcagaccctcaggcagatcaccatctgtggagaccgccaggccaaggacaccaaagttctggtgcagtgcgtccaccctgtctacattcctaacatggtgctgattctggctgatggggacccctcgagtttcctgtcccactggctgcctttcctgagtaccctccgaaggcaggaagaccaggccactgcgtatgtgtgtgagaatcaagcctgctcaatgctcatcatggatccctgtgaattacgaaaactgctacatccgtga

SEQ ID NO: 11466 - DNA, 870 bp, Homo sapiens
  SIMILAR (22)..(675): 1001254mologous to Homo sapiens unnamed protein product,accession number AK025000,Smith-Waterman Score=1159.
cgcaattgcgcacgacgcagaccctgctggggcttcctggaggactacgccttcgtggtgcggggcctgctggacctgtatgaggcctcacaggagagtgcgtggctcgagtgggctctgcggctgcaggacacacaggacaggctcttttgggactcccagggtggcggctacttctgcagtgaggctgagctgggggctggcctgcccctgcgtctgaaggacgaccaggatggagcagagcccagcgccaattccgtgtcagcccacaacctgctccggctgcatggcttcacgggccacaaggactggatggacaagtgtgtgtgcctattgaccgccttttccgagcgcatgcgtcgtgtcccggtggcgttgcccgagatggtccgcgccctctcagcccagcagcagaccctcaagcagatcgtgatctgtggagaccgtcaggccaaggacaccaaggccctggtgcagtgcgtccactctgtctacattcctaacaaggtgctgattctggctgatggggacccctcgagcttcctgtcccgccagctgcctttcctgagtaccctccgacggttggaagaccaggccactgcatatgtgtgtgagaatcaagcctgctcagtgcccatcactgatccctgcgaattacgaaaactactacatccatgactgccccaacccccttggggtggggcagaaggtgaagcatcccaactgactagagactcaggccctgcagggccctatagaacctgtggccatccctgagcaccctgccaccaggtgacctcggccatactcactgccccccttgggcacccactcaccctaaaataaacttaacaggtgtcccgtggtaaa

SEQ ID NO: 11467 - DNA, 1574 bp, Homo sapiens
  SIMILAR (630)..(2087): 731254mologous to Homo sapiens carnitine acetyltransferase,accession number X78706,Smith-Waterman Score= 1632.
gctgtgcactggttaagcctgagcgcagagtctgttcaacgagttcattgtgtggtatttgcttccgcttgctgttgagttggactggcctggatgctggccaggagcccaagtggacttggtgcttctctttgacagccaggattgaaaagcccagtcaagtgggcagagcacgaggccccgggccggagcggggtgttggcggcggccggttcgggtggcgactcgcgcttctctgggcggcggcgcttggccatatcgtgtcggggaaggtaatgagccgcagagccccggggtctcggctgagcggcggcggcggcggcggcggcggcggcggcaccaacggcaccaactattcgcggagctggaatgactggcaacccagaactgatagtgcatcagctgacccaggtaatttaaaatattcttcatccagagatagaggtggttcttcctcttacggactgcaaccttcaaattcagctgtggtgtctcggcaaaggcacgatgataccagagtccacgctgacatacagaatgacgaaaaggagagatcgatgtcttattgtgatgagtctcgactgtcatatcttcttcggaggatcacccgggaaaacgaccgagaccgaagattggctactgtatagcagttgaaagaatttattcagcaaccagaaaataagctggttagagtgcagtgccaggctgtctttgactccggaacccctgatcaccttgcttcgcctcccggagtacctggatatacgcatgagcaccgtgccagcccgtcatcctatataattatttctagtgtctcccctgaagactatctctgggtctcgaaatgggacatgatggatcacgggatgtacagcagagagcctgaagttccaaccgccgtagacaggaagaaaagagtttcttcctttcgaggaaataaaattgtcctgaaagacgtcattactctacggagacatgtggaaacaaaagttagagctaaaatccgtaagaggaaggtgacaacgaaaatcaaccatcatgacaaaatcaatggaaagaggaagaccgccagaaaacagtaagatgtgccttgacacaaatactgttgtatgaaccatgtgccaatcaaagtagacaactgtaaagtccttgagaatattttctacaatatttgtggcaaattcagtgggttcaaaattgagtttgtcctttctgcttcattagtttaagctgtataattcctttcccttcctacattcttgtttgtaattttttcgggggaagaggagttgctagtactggcattggttttcctttctctctttttttttttttttttcctgagatggagctttgctgttgttgcccaggctgttagtgcaatggcacaatctcagctcactgccttttgggttcaagcaattctcctgcctcagcctcccaagtagctgggattacaggtgcccaccaccacgcccagctaatttttgtatttttactagagatggggtttcaccatgttgtccaggctggtctcgaacttctgacctcaggtaatccacctgcctcagcct

SEQ ID NO: 11468 - DNA, 375 bp, Homo sapiens; identical to SEQ ID NO: 7778
  SIMILAR (33)..(587): 1001254mologous to Homo sapiens ribosomal protein,accession number D23660,Smith-Waterman Score=969.
  misc_feature (1)...(375): n = a,t,c or g

SEQ ID NO: 11469 - DNA, 547 bp, Homo sapiens
  SIMILAR (2)..(121): 971254mologous to Homo sapiens heat shock cognate protein 54,accession number AB034951,Smith-Waterman Score=198.
caaccgaatgggcaaccattttattgcggagtttaagcgcaagcataagaaggacatcagtgagaacaagagagctgtaagacgcctccgtactgcttgtgaacgtgctaagcgtaccctctttccagcacccaggccagtattgagatcgattctctctatgaaggaatcgacttctatacctccattacccgtgccccatttgaagaactgaatgcctgggggatttcctggtggtggagcctccctcctcctgtgggtgcttcctcaggccccaccattgaggaggttgattaagccaaccaagtgtagatgtcgcattgttccacacatttaaaacatttgaaggacctaaattcgtagcaaattctgtggcagttttaaaaagttaagctgctatagtaagttactgggcattctcaatacttgaatatggaacatatgcacaggggaaggaaataacattgcactttataaacactgtattgtaagtggaaaatgcaatgtcttaaataaaactatttaaaattggcaccataaaaaaaaa

SEQ ID NO: 11470 - DNA, 1662 bp, Homo sapiens; identical to SEQ ID NO: 8614
  SIMILAR (3)..(491): 981254mologous to Rattus norvegicus hnRNP protein,accession number Y16641,Smith-Waterman Score=939.

SEQ ID NO: 11471 - DNA, 1056 bp, Homo sapiens
  SIMILAR (431)..(249): 731254mologous to Homo sapiens steroid receptor RNA activator isoform 3,accession number AF293026,Smith-Waterman Score=215.
gctgggaaaccccactgtggtggggaattttgcaccccgaatgtccaccatttttttcgctgattttaagccaaccctaagaggacaatcattggaacaaagaagctttaacccccccccctactgtttttgacgggctaagcctaccctctcttccgcaccccgggcagtaattgaatcgattcttcctaagaagaatcggactctatacctccattacccctccccgatttgaagaactgaatgctgacctgttccttgcacccttgaccccagtagagaaagcccttcgaaatgcccaaactagacaagtcacagattcatgatattgtcctggtttggtggttctactcgtatccccaagattcagagctttctccaagacttcttcaaatggaaaagaactgaataagagcatcaaccctgatgaagctgttgcttatggtgcagctgtccaggcagccatcttgtctggagacaagtctgagaatgttcaagatttgctgctcttggatgtcactcctctttccctgggtattgaaactgctggtggagtcatgactgtcctcatcaagcgtaataccaccattcctaccaagcagacacagaccttcactacctattctgaccaaccagcctggtgtgcttattcaggtttatgaaggcgagcgtgccatgacaaaggataacaacctgcttggcaagtttgaactcacaggcatgccaggaggaatgcctgggggatttcctggtggtggagctcctccctctggtggtgcttcctcagggcccaccattgaagaggttgattaagccaaccaagtgtagatgtagcattgttccacacatttaaaacatttgaaggacctaaattcgtagcaaattctgtggcagttttaaaaagttaagctgctatagtaagttactgggcattctcaatacttgaatatggaacatatgcacaggggaaggaaataacattgcactttataaacactgtattgtaagtggaaaatgcaatgtcttaaataaaactatttaaaattggaaaaaaaa

SEQ ID NO: 11472 - DNA, 2424 bp, Homo sapiens
  SIMILAR (697)..(1896): 921254mologous to Homo sapiens amyloid precursor interacting protein type I,accession number AF224710,Smith-Waterman Score=1901.
  misc_feature (1)...(2424): n = a,t,c or g
cccacgcgtccgcccacgcgtacgccccgcgtccgctcgcctgcagctcttgggttttttgtggcttccttcgttattggagccaggcgctacaccccagcaaccatggtccaagggacctgcagttggtattgatcttggcaccacctactcttgtgtgggtgttttccagcacggaaaagtccgagataattgccaatgtatcagggaaaccgaaccactccaagctatgtcgcctttacggacactgtaacggttgatcggtgatgccgcaaagaatcaagttgcaatgaaccccaccaacacaagtttttgattgccaaaccgtcttgattggacggcagatttgattgatgctgttgtcccagtctgatatgaaacattgggccctttatggtggtgaatgatgctggcaggcccaaggctccaagttagaataccaagggagagaccaaaagcttctatccagaaggaggttgtcttctatgggttctgacaaagatgaaaggaaatttgcagaagccttaccttggggaagactgttaccaatgcttgtggtcacagtgcccagtttactttaatgacttctcagcgtcaggctaccaaagatgctggaactattgctggtctcaatgtacttagaatttattaatgaggccaactgctgctgctattgctttacggcttagacaaaaaaggtttggagcagaaagaaacgtgctcatctttgacctggggaggtggcactttttgatgtgtcaatcctcactattgaggatggaatctttgaggtcaagtctacagctggagacacccacttgggtgggaggaagattttgacaaccgaatggtcaaccattttattgctgagtttaagcgcaagcataagaaggacatcagtgagaacaagagagctgtaggacgcctccgtactgcttgtgaacgtgctaagcgtaccctctcttccagcacccaggccagtattgagatcgattctctctatgaaggaatcgacttctatacctccattacccgtgcccgatttgaagaactggaatgctggacctgttccgtggcaccctgggacccagtagagaaagcccttccgagatgccaaactaggacaagtcacagatttcatgatatttgtcctgggttggtggttctacttcgtattccccaagattgcagaagtcttgctgccaagacttctttcaatgggaaaaagaacttgaattaaggagcatcaaccctggatggaaggctgttggtttattggtgccagctgttccagggcagcccatctttgtctgggagacaagtcttgaggaatgtttcaagatttgctgctcttgggatgtcactcctctttcccttgggtattgaaactgctgggtggagtcatgactgtcctccatccaagcgtaataccaccattcctaccaagcagacacagaccttcactacctatttctggacaaccagcctgggtgtgcttattcaggtttatgaaggcgagcgtgccaatgacaaagggtaacaacctgccttggcaagttttgaactcacagggcatacctcctggcaccccgagggtgtttcctcaggattggaagttcacttttggacattggatggccatgggtatccttcaatgtctctgctgtggacaagagtacgggaaaagagaacaagattactatcactaattgacaagggccagtttgagcaagcaagacattgaacgtatggtccaggaagcttgagaagtaccaagctgaagatgagaagcagagggacaagggtgtcatccaagaattcacttgagtcctatgccttcaacatgaaagcaactgttgaagatgagaaacttcaaggccaggattaacgatgaggacaaacagaagattctggacaagtgtaatgaaattatcaactggcttgataagaatcagcactgctgagaaggaagaatttgaacatcaacagaaagagctggagtatagtttgcaaaccccatcatcacccaagctggtacccagagtgccaggaggcatgccagggaggaatgcctgggggatttcctgggtggtggagctcctccctctggtggtgcttcctcagggcccaccattgaagaggttgattaagccaaccaagtgtagatgtagcattgtttccacacattttaaaaccattttgaagggacctaaatttcgtaggcaaaatttcttttgggcaagttttaaaaaagtttaaggctngcttattagttaaggtttacttgggcattcttcaattactttgaattttgggaacatatggcacaggggagaggaaataacattgcactttataaacactgtattgtaagtagaaaatgcaatgtcttaaataaaactatttaaaattggaaaaaaaaaa

SEQ ID NO: 11473 - DNA, 879 bp, Homo sapiens
  SIMILAR (1)..(300): 851254mologous to Homo sapiens Interleukin 1-beta converting enzyme isoform beta,accession number U13697,Smith-Waterman Score= 452.
atgacgatgctgctgcaaaatctggggtacaaggtggacgtgaaaagaaatctcactgcttgggaaatgactacagagctggaggcatttgctcaccgcccagagcacaagacctctgacagcaccttcccggtgttcttgtctcatggtgttcgggaaggcatttgtgggaagaaatactctgaacaagtccctgatatattacaattcaatgaaatatttaaaatgttgaatagcaagaactgcccaagtttgaaggacaaacccaaggtgatcatcttcgaggcctgctgtggtgacaaggtcctgaaggagaagagaaagcagtttatccgttcagtgggcgaaggtacaataaatggcttactgggtgaattattggagacaagggtgctgagccaggaagagatagagatagtaaaatgtgaaaatgctacagttatggataaggcccgagctttgcttgactctgttattcggaaaggggctccagcatgccaaatttgcatcacatacatttgtgaagaagacagtcacctggcagggacgctgggactctcagcaggaaatgactacagagttggaggtattttctctgcaccaagagcacaaggcctctggtctcatggtattcgggaaggcatttgtgggaagaaatactctgagcaagtcccagatgtattacaactcaatggaatctttaaaacgttgaatagcaagaactgcccaagtttgaaggacaaacccaaggtgataatcatccaggcctgccatgttgagacacatgaatggactctaatttccctgtgtccctcatggacattagatccaaccacagatttaaaacgccctgaggagagtgattcaatgcttagataa

SEQ ID NO: 11474 - DNA, 1203 bp, Homo sapiens
  SIMILAR (52)..(867): 1001254mologous to Homo sapiens Fe65L2,accession number AB018247,Smith-Waterman Score=1483.
aatagacagctttgaagcattccgcacgagccatggccggtgagtcttttactgttccaagaacaggtccctgggaagaaagagttgcggaaagggctggctcttctggaagccataattagtatctgtggaagtttagacaaggtcctgaaggagaagagaaagctgtttatccattccatgggtgaaggtacaataaatggcttactggatgaattattacagacaagggtgctgaaccaggaagagatggagaaagttaaacgtgaaaatgctacagttatggataagacccgagctttgattgactccgttattccgaaaggggcacaggcatgccaaatttgcatcacatacatttgtgaagaagacagttacctggcagagacgctgggactctcagcagatcaaacatctggaaattaccttaatatgcaagactctcaaggagtactttcttcctttccagctcctcaggcagtgcaggacaacccagctatgcccacatcctcaggctcagaagggaatgtcaagctttgctccctagaagaagctcaaaggatatggggaacaaaagtcggcagagatttatccaataatggacaagtccagcccgcacaccgggttgctctcattatctgcaatgaagaatttgacagtattcctagaagaactggagctgaggttgacatcacaggcatgacaatgctgctacaaaatctggggtacagcgtagatgtgaaaaaaaatctcactgcttcggacatgactacagagctggaggcatttgcacaccgcccagagcacaagacctctgacagcacgttcctggtgttcatgtctcatggtattcgggaaggcatttgtgggaagaaacactctgagcaagtcccagatatattacaactcaatgcaatctttaacatgttgaataccaagaactgcccaagtttgaaggacaaaccgaaggtgatcatcatccaggcctgccgtggtgacagccctggtgtggtgtggtttaaagattcagtaggagtttctggaaacctatctttaccaactacagaagagtttgaggatgatgctattaagaaagcccacatagagaaggattttatcgctttctgctcttccacaccagataatgtttcttggagacatcccacaatgggctctgtttttattggaagactcattgaacat

SEQ ID NO: 11475 - DNA, 654 bp, Homo sapiens
  SIMILAR (17)..(646): 811254mologous to Homo sapiens checkpoint suppressor 1,accession number U68723,Smith-Waterman Score=855.
cgcgggtcctgagctgagaggactgtttcctggtgtgcggcagctgccgatcagtcccattgagatgacggctgccatgatgtacggcatcaccagctgccggatgcggactgagagcgagccatcgtgtggctccccggtggttagcggagaccctaaggaggatcacaactgcaccaatgccaaatcctccaacgcccggagcaccttgcccaccagcgactccatcccctcctcctccttggccgacgaccactacaagtttgccagcaaggagagccaggagggcaatgagggcagcgaggggagcttccggagccacgagagccacagcgacagggaagaggacgacaggaaacacagccagaaggagcccagggatgctctgggggacagcgggtacgcatcccagcacaagaaacgccaggactttgctaaggccaggaaggtccccagcgacacactgcccctcaaaaagagacgcactgtaaagcaccgcccccgcaccgccccccaccagggcgaagaagaggagattaaagaagcggcggggtcgctcctgcacttagcagagatccgatcctgtttgaataacatcaccaatcggacggcaaaggggcaggaagagcaaaacgaaatcacaaaaaaattaaa

SEQ ID NO: 11476 - DNA, 480 bp, Homo sapiens
  SIMILAR (133)..(291): 1001254mologous to Homo sapiens ribosomal protein L27,accession number L19527,Smith-Waterman Score=278.
  misc_feature (1)...(480): n = a,t,c or g
ccttgatcccccctcttttgagaccactagtccagagtgggggaattcccgaaatgggcaagttcatgaaacctgggaaggtggtgcttgtcctggctggacgctactccggacgcaaagctgtcatcgtgaaggtactctgtggatatccccttggacaaaactgtcgtcaataaggatgtcttcagagatcctgctcttaaacgcaaggcccgacgggaggccaaggtcaagtttgaagagagatacaagacaggcaagaacaagtggttcttccagaaactgcggttttagatgctttgttttgatcattaaaaattataacgnnnnnnnnnnnnnnnnnnnnnnnnnnnnnnnnnnnnnnnnnnnnnnntaaattaataaaaaaacaaaaaacnnnnnnnnnnnnnttaaaatttaaaaccaaataaagggttttccgcccccttggaaaaaaaagcccctcccannnnnnnnnng

SEQ ID NO: 11477 - DNA, 386 bp, Homo sapiens
  SIMILAR (268)..(348): 1001254mologous to Homo sapiens ribosomal protein L27,accession number L19527,Smith-Waterman Score=133.
ttgggttgaatctttcaatctgctgccatccgcggcttgggggtcgaaggtccgggcggcgccgggtgcattccttccctaggtctctggcggctacgtatccgatcctgtcctgcgagcagggccctcgggcggccttgaccaaggcgacagtgaacacagtctgaagttccggcccaagacctgggcttgctggcaggagtcagctctgggcatctttggctttacggatttttaagtggccctttctccttgctctctgcagaaatgggcaagttcatgaaacctgggaaggtggtgcttgtcctggctggacgctactccggacgcaaagctgtcatcgtgaaggtatcagcctcgcgggactctgcgtccttgcatgccgg

SEQ ID NO: 11478 - DNA, 591 bp, Homo sapiens
  SIMILAR (80)..(445): 771254mologous to Homo sapiens Human secreted protein, SEQ ID NO: 5436,accession number G01355,Smith-Waterman Score=454.
tttctggcaggagtcagcttctgggcatctttggctttccggatttttaagtggccctttctccttgctctctgcagaaatgggcaagttcatgaaacctgggaaggtggtgcttgtcctggctggacgctactccggacgcaaagctgtcatcgtgaagaacattgatgatggcacctcagatcgcccctacagccatgctctggtggctggaattgaccgctacccccgcaaagtgacagctgccatgggcaagaagaagatcgccaagagatcaaagataaaatcttttgtgaaagtgtataactacaatcacctaatgcccaccaaggtactctgtggatatccccttgggacaaaactgtcgtcaataaagatggctttacagatcctagctcttaaacgcaacgcccgaatggaggcccaaggtcaagtttgaagagagatacaagacaggcaagaacaagtggttctttccagaaactgcgggttttagatgcttttgttttgatcattaaaaattataaagaatagctcgaacttaatgtcttggcggcgaggacctaattcagaagggggtagaattagtat

SEQ ID NO: 11479 - DNA, 426 bp, Homo sapiens
  SIMILAR (43)..(405): 611254mologous to Homo sapiens G16,accession number U89336,Smith-Waterman Score=348.
ttggggggactgaagggtacgtggggcgaaacaaaaccggccatggcagcagcggaggaggaggacgggggccccgaagggccaaatcgcgagcggggcggggcgggcgcgaccaagaccctcttgtatactggaaaccaccttttttctccccagtggctggagacacggccagaacggcaagagtgtccagtatgtaaagctgggatcagcagagagaaggttgtaggagaaaaatccctgttaactttctctctccacttcctcagattaaaaactccacagatttgccggcttcccgtctgactttttctgcctccctagggattccagccatttggtgataccgggggcttccacttctcatttggtgttggtgcttttccctttggctttttcaactccccatcttactgatttaattta

SEQ ID NO: 11480 - DNA, 657 bp, Homo sapiens
  SIMILAR (91)..(261): 871254mologous to Homo sapiens G16,accession number U89336,Smith-Waterman Score=275.
atggcagcagcggaggaggaggacgggggccccgaggggccaaatcgcgagcggggcggggcgggcgcgaccttcgaatgtaatatatgtttggagactgctcgggaagctgtgggccagagaccagctccagagagcagagggggattccagccatttggtgataccgggggcttccacttctcatttggtgttggtgcttttccctttggctttttcaccatcgtcttcaatgcccatgagcctttccgccggggtacagctgccactcaaaaaagcatttgttctgtggctccttttccagatccaggctttttctactacagggtccgcaaggttatttctgctccagtcggggagccagctagcttgtggtctgttactcctctgcattcaaaaggattcatctttgtcagtgcctttctgggagagtgggcctggcttggagatgtcactgtggatccaggattttgccactggatatggaacgaagacctcgtcagtcaatcttccatgatcccggccaccgcaattggctcagccttccaagaggccgtggttgtcaccagggcgcccccacccctacccctgaatcccagctgcagggactgccattcaaacatccacgtgtccaagatggctgcggcattggcatga

SEQ ID NO: 11481 - DNA, 1151 bp, Homo sapiens
  SIMILAR (28)..(1695): 1001254mologous to Homo sapiens extraneuronal monoamine transporter,accession number AJ001417,Smith-Waterman Score=2906.
  misc_feature (1)...(1151): n = a,t,c or g
atcgtgggcaggaggtggtttctggtttgttggggcgtgtgtatgtgtatttggggggactgaagggtacgtggggcgaaacaaaaccggccatggcatcagcggaggaggaggtctggggcccccaatgttccaaatcgcgagcggggcggggcgggccgccngaaaacccccttcgaatgtaatatatgtttggagactgctcgggaagctgtggtcagtgtgtgtggccacctgtactgttggccatgtcttcatcagtggctggagacacgggccagaacggcaagagtgtccaagtatgtaaagctgggatcagcagagagaaggttgttccgcctttatgggcgagggagccaagaagcccccaggatcccagaattaaaaactccccccgccccccagggggcagaggaccagctccggagaagcagagggggatcccagccaatttggtgatacggggggcttccacttcttcatttggtgttggtgcttttccctttggctttttcaccaccgtctttcaatgcccatgagccttttcgccggggtacaggtgtggatctggggacagggtcacccaagcctccaacttggcaaggaattccctcttcctggtttctcggcaatcttcttccttttttggctgctcagtaattgagctaatgtctgcttcctgcccacctccagccagagaagaatcaagtattgagggtcccctgctgacccttccgtactcctgggacccccttgaacccctctatttctgttgggtaaaggccagccctgggacattgtccaggaaggcctggggaggaggagtgaagtctgtgcatagatgggagagccttctactcagaggctcactcagtaacgttgtttaattctctgccctggggaaggaggatggattgagagaatgtctttctcctctcctaagtctttgctttccctgatttcttgatttgatcttcaaaggtgggcaaagttccctctgactcttcccccactccccatcttactgatttaatttaatttttcactccccagagtctaatatggattctgactcttaagtgcttccgccccctcactacctcctttaatacaaattcaataaaaaaggtgaaatataaaaaaaaaaaaaa

SEQ ID NO: 11482 - DNA, 369 bp, Homo sapiens
  SIMILAR (13)..(189): 401254mologous to Myxococcus xanthus response regulator FrzZ,accession number AF049107,Smith-Waterman Score=92.
ctgccttcccacggggcagggctcgggacctgcagcctgccatgcctgagcctcccacccactccatgggctcctgtgcagcccgagcctccccgacgagcaccaccccctgctccatggcgcccagtcccattgaccacccaagggctgaggaatgcgagcacagggtgcaggactggcaggcagctccacctgcagccccactcaaggtttgtaaatacaccaatcagcaccctgtgtttagcacaaggtttgtgaatgcaccaatcgacactctgtatctagctgctctggtgaggacgtggagaacctttatgtctagctcaaggattgtaaatacaccaatcggcactctgtatctagctcaag

SEQ ID NO: 11483 - DNA, 1083 bp, Homo sapiens
  SIMILAR (733)..(1458): 851254mologous to Sus scrofa 130 kDa regulatory subunit of myosin phosphatase,accession number AB019559,Smith-Waterman Score= 1068.
ctaaatgagaaaagctaaattcaagcgagttatgcaaacgaggcgtttggcaacttttacttgcatgcttatggttttctggggaaattcaaatgcgggctccggagccgcagccctgagcgtcccgggggtggccatggcgccaccttggcctcccaaagtgctggaattacaggtgtgagccaccgcccctggcttgggcagctgatttttaaaccatttgatgaagtgactttctttaaaggaaacatacttagcatcgccaccacagtcccatagctcgaattcacagcccgtgcctttgttgttgctggtaacatgcgggttctcaaattctaggatcctcactccttgggttgggctgtattcagtgatgtcagaagattctgtcagaaagttggccaaaacagtttttccactctgtgaaaatgagtgcaaataaaggtctttgcttgggccttcggggctcattaacaccgggctcgcctccactacctcctccgggcagtggttggaatcaaggtctccagaatagggggcagcgggcgagagattccccagcggcgttgcaggagcccacgtggagcccacgtggagcccacgggcttccttgccctgagcagctgcagctgcagcccctgccaccccgagagtccagccccgagggcagctcctgccttgcctgcggttaccgccgccgccagacaaagacaggcttcctttatcatctccagagcctggtttgtggtgtgcaattagcatacactgtgtgtcctgtaaggacggctgttggacaaagcaggaataccacatctccatttccttccggtggcttgggatgtcagcattgaagacgatcaccactccatgagcatccttcatcagggccggccagcaggactcaaaccgagccttagctgccttcccgcggggcagggctcgggacctgcagcccgctatgcctgagcctcccacccactccatgggctcctgtgcagcccgagcctccccgacgagcaccaccccctgctccagggcgctcagtcccatcgaccacccaagggctgagaagtgcgagcgcat

SEQ ID NO: 11484 - DNA, 930 bp, Homo sapiens; identical to SEQ ID NO: 2757
  SIMILAR (223)..(381): 691254mologous to Homo sapiens PRO1722,accession number AF119851,Smith-Waterman Score=192.

SEQ ID NO: 11485 - DNA, 845 bp, Homo sapiens
  SIMILAR (645)..(187): 211254mologous to Vibrio mimicus OrfU,accession number AF207858,Smith-Waterman Score=91.
tcatgtattcatttgctcagcacgcattgcctgagcagtcctgtgtgcctgagcatgcattgcctgagcagcacctcctactcccaccagttcctttccatgacatgtggggattatgggagctacaactgaagatgagatttcggtggggacacagccaaaccatatcactgagtccaggtggttaggagaggtgacagcgtgctggcagtcctcacagccctcgctcgctctgggcacctcctctgcctgggctcccactttggtgacacttgaggagcccttcagcccaccgctgcaccgggccagtggctgcggagggtgtactgggtcccccagcagtgccggcccactggcgctgcgctccatttctcgccgggccttagctgccttcccgcggggcagggctcgggacctgcagcccgccatgcctgagcctcccaccccctccatgggctcctgtgcggcccaagcctccccgacgagcgccgccccctgctccacggcgcccagtcccatcgaccacccaagggctgaggaatgcgagcgcacggtgcaggactggcgggcagctccacctgcagccccagtgcgggatccactagaaacagggaaaattgaccaagagattcacaaatacaacaccccaggattcactggttgcctctccagagtccagttcaaccagatcgcccctctcaaggccgccttgaggcagacaaacgcctcggctcacgtccacatccagggcgagctggtggagtccaactgcggggcctcgccgctgaccctctcccccatgtcgtccgccaccgacccctggcacctggatcacctggattcag

SEQ ID NO: 11486 - DNA, 2378 bp, Homo sapiens
  SIMILAR (1)..(729): 1001254mologous to Homo sapiens peptide deformylase-like protein,accession number AF239156,Smith-Waterman Score=1300.
  misc_feature (1)...(2378): n = a,t,c or g
gagaaatggcgtggcaggggacccagcgagcccagagggattttgccgctgcttcctctacccctgtatttcacgcagctctctaaattgactcagctccaggctagtgtgagaaacaccaacagcaggcccatctcagatcttcactatggcaacttatgcaagaaactgttgaattagacccgtttcctatagatgagaaaccatacaagctgtggtatttatgagcctccatttcttatactactgcagtgaaccaacattggatgtgaaaattgccttttgtcagggattcgataaacaagtggatgtgtcatatattgccaaacattacaacatgagcaaaagcaaagttgacaaccagttctacagtgtggaagtgggagactcaaccttcacagttctcaagcgctaccagaatctaaagcctattggctctggggctcagggcatagtttgtgccgcgtatgatgctgtccttgacagaaatgtggccattaagaagctcagcagaccctttcagaaccaaacacatgccaagagagcgtaccgggagctggtcctcatgaagtgtgtgaaccataaaaacattattagtttattaaatgtcttcacaccccagaaaacgctggaggagttccaagatgtttacttagtaatggaactgatggatgccaacttatgtcaagtgattcagatggaattagaccatgagcgaatgtcttacctgctgtaccaaatgttgtgtggcattaagcacctccattctgctggaattattcacagggatttaaaaccaagtaacattgtagtcaagtctgattgcacattgaaaatcctggactttggactggccaggacagcaggcacaagcttcatgatgactccatatgtggtgacacgttattacagagcccctgaggtcatcctggggatgggctacaaggagaacgtggatatatggtctgtgggatgcattatgggagaaatggttcgccacaaaatcctctttccaggaagggactatattgaccagtggaataaggtaattgaacaactaggaacaccatgtccagaattcatgaagaaattgcaacccacagtaagaaactatgtggagaatcggcccaagtatgcgggactcaccttccccaaactcttcccagattccctcttcccagcggactccgagcacaataaactcaaagccagccaagccagggacttgttgtcaaagatgctagtgattgacccagcaaaaagaatatcagtggacgacgccttacagcatccctacatcaacgtctggtatgacccagccgaagtggaggcgcctccacctcagatatatgacaagcagttggatgaaagagaacacacaattgaagaatggaaagaacttatctacaaggaagtaatggattcaggaagaaaagacttaaaaatggtgttagttaaaaggacagccttctcctttcagcacaggtgcagcagtgnaacagcagtgagagtctccctccatcctcgtctgtcaatgacatctcctccatgtccaccgaccagaccctggcatctgacactgacagcagcctggaagcctcggcaggacccctgggttgttgcaggtgactagccgcctgcctgcgaaacccagcgttcttcaggagatgatgtgatggaacacacacacacgcagacacacacacacacacaaatgcagacacacaacatcaagaaaacagcaagggagagaatccaagcctaaaattaaataaatctttcagcctgcttcttccccagggttctgtattgcagctaagctcaaatgtatatttaacttctagttgctcttgctttggtcttcttccaatgatgcttactacagaaagcaaatcagacacaattagagaagccttttccataaagtgtaattttaatggctgcaaaaccggcaacctgtaactgcccttttaaatggcatgacaaggtgtgcagtggccccatccagcatgtgtgtgtctctatcttgcatctacctgctccttggcctagtcagatggatgtagatacagatccgcatgtgtctgtattcatacagcactacttacttagagatgctactctcagtgtcctcagggctctaccaagacataatgcactggggtaccacatggtccatttcatgtgatctattactctgacataaacccatctgtaatatattgccagtatataagctgtttagtttgttaattgattaaactgtatgtcttataagaaaacatgtaaagggggaatatattgggggagtgagctctctcagacccttgaagatgtagcttccaaatttgaatggattaaatggcacctgtatacca

SEQ ID NO: 11487 - DNA, 1564 bp, Homo sapiens
  SIMILAR (21)..(128): 481254mologous to Pseudomonas aeruginosa similar to E. coli protein PolB/DinA, Swiss-Prot Accession Number P21189,accession number U15370,Smith-Waterman Score=73.
tcaggatgttcgcaggctccattgacaaaagtgacttcccacgctttgcccacagagggcatccctgcgcattgatacgcagaccaggcaaatgcagctcctggaagcctcctcggtccgctcttttttccctaagccatagtctgtctgcccccacccccttcccgtggaatctttgcctgatccagttcgtttccctccggtctccacattttcccttccagccctccacttctccggatcaatgtgtagtacggttccaactcccagctcgcacaccgcggggctcgggatctcttggaccgaatggaactttttgctgcctgcttttgctgctgattctgtcagtggacaaggaaaaaggcttcgaaggcagcagaggcgcaggggaggtggagaaagaggtggaggaagaggacgaggaggaggaggaagccgaaggggctcggcgcgtgtgtgtgcatgtgtgcatgcgtgtgtgagtgcatgtgtgtgagtgctgccgctgcccgcgacccctggccccgaaggtgttggctccccaccagactcaggagcccagctagcttcacccagtggatcccgcaccagggctgcaggtggagctgcctgccagtcccgtgccgtgcgctcgcactcctcagcccttgggtggtcgatgggactgggcgccgtggagcagggggtggtgctccttggggaggctcgggccgcacaggagcccatggagtgggtgggaggctcaggcatggcgggctgcaggtcccgagccctgccccgcaggaaggcagctaaggctcggcaagaaatcgagcacagccccggtgggccggcactgctgggggacccagtacaccctccgcagccactggcccgggtgctaagtcccccattgcccggggccagcagggctggccggctgctccgagtgcggggcccaccaagcccaagcccacccggaactccagctggcccgcaagcgccgcacgcagccccggttcccgctcgtgcctctccctccacacctccctgcaagctgagggagtgggctccagccttggccagcccagaaaggggctcccacagtgcaggggggaggctgaagggctcctcaaatgccaccaaagtgggagcccaggcaggggagaagaattgtggcattcacgatagaagtgggggtgttgagggaagatctgttttgaatggtgatcctactttgaacattttgggtgtagagcagtacgaggccatcaggtatccaggtggagatggcatactgctgagccagcaggaaaaggcaacaggacgaggggcaggatttgccactggaatgtcagcaggccatacctcaggcgttcagctccatggagcaaagacagtagtgatcacgttccttgacaacagtgctagtgtgcggggagcttttagttttccttttctctgctccttgaaccaagaatccagcatcagcatcagcatcagcatcagcatcagcatctgctcagctgtaggccatgattgtctgtactgtttaccagcagctcatgtaatatgcttgatgtaa

SEQ ID NO: 11488 - DNA, 1111 bp, Homo sapiens
  SIMILAR (25)..(1452): 811254mologous to Homo sapiens putative p150,accession number U93572,Smith-Waterman Score=1883.
atggataggcctgaaacctgggtacacaagggcagacctgacgcctatgtctgcaaatatttgcctacatctgtagaggctggccttatccttgggtccacagggggctacttggctctgggattggctttgagtctgagtctgcaggaaatagtcagttactgggatggatctgatgtccaggattataggggacagcccagtgctggagaagttccagaggctgggctgctaaggggtcctggacaaggtcgcttggatagcggcctaaccacagcattatacatgctcaggaagaggcaaagccggaaatttaccacttggcaaagcgtctttacaaaaccagagtttggctttgtggtagcttccttagaacttatctacaaggaagtaatgaattcagaagaaaagactaaaaatggtgtagtaaaaggacagccttctccttcagcttgcagggaggtgtggagggagaggcacgagcgggaacccgggctgcgtgcggcgcttgcgggccagctggagttgcaggtaggcgtgggcttggcgggcccccgcactcgggacagccagccagccctgctggccccgggcagtgagggacttagcacccgggccagtggctgcggaaggtgtactgggtcccccagcagtgccggcccaccggcgctgtgctcgatttctcgccgggctgtagctgccttcctgcggggcaaggctcaggacctgcagcccgccatgcctgagcctcccacccactccatgggctcctgtgcggcccgagcctccccgacgagcaccaccccctgctccatggcgcccagtcccagcgaccacccaagggctgaggaatgcgagcgcacggcaccgggactggcaggcagctccacttgcagccctggtgctggatccactagcccgagcctccccgatgagtgctgtcccctgctctactgcggccagtcccattgaccacccaagggctgaggagtgcgggcgcatggcgcaggactggcatgcagctgcacctgcagtcccggtgcagaatccagtgggtgaagccagctgggtttctgagtctggtggggacgtggagaacctttatgtctag

SEQ ID NO: 11489 - DNA, 906 bp, Homo sapiens
  SIMILAR (247)..(44): 971254mologous to Homo sapiens Similar to ubiquinol- cytochrome c reductase hinge protein,accession number BC001426,Smith-Waterman Score=350.
  misc_feature (1)...(906): n = a,t,c or g
atgggctcgccaggggtccacaggaaaacaggaaccaataaaatggatggatggattggagggatggatggaaggaatggatggatgaatagaggtgaagtcccaaagtctgctgtctgcaaggctgtatacccaggaaagtctgtggtattgttcaaaggcctgagagccagagaggcaacagatggtgtagattccactcaagatctgaaggctggagaactaggagcactgaaaaccactgaggaccggagattgatgtcccagcttaaggagnatgaattaaaccttgctgattctgaagtggataaccaaaaacgagggaaacgacattatgaagaaaaacaaaaagaacacttggataccttaaataaaaagaaacgagaactggatatgaaagagaaagaactagagaaaattcagaaatttggaggcacagtagttaggattcaggccaaactggtaaatgacgaaggggcttcttccagagccaaggaggaagggttgtccggttgctttgacagcatcttggcaagattccctaaattagcgacactctctgttattggttatcagaacagactcatttcagaactggttggcaggtccaggtggggccatctgttgttagaaatgcaaaaatctgaaaagacatctcaaaaagcagatcttaggttcacaatagtgatgttaccttcaagagtgattgaggaagttgcaaattttatgaccgccaaaaaaatcattcggaatatggcaaacacaagacaaaataacctagagtgtaccaaccaccgagtgcatgataaaagctcaggacctaattttgaaggtcctccaatgcccagcggaggagtcaacactgtttccactaggtaccgaggggcaggaaacagagaagagtga

SEQ ID NO: 11490 - DNA, 768 bp, Homo sapiens
  SIMILAR (767)..(585): 601254mologous to Homo sapiens reverse transcriptase,accession number L27428,Smith-Waterman Score=221.
tcatggtaaacggcatccttttgcttccatgtttagagctcccttgagtattccttgtagggccagtgtagtgatgaggaatttccgcagcttttgcttatctggatgtgaaaagtaaagtagaggttcctctttgaaggctttcctccccatctttctcagcattccacaagttacttcctccttcctttggtctcctctgcctttgcctcttttaaaaagttctaagttgctagccagttgggacaaatacagaatgtgagatcccattccagccaatggaaaccggacacagcagcagggtggatgcgtcaggttataaatgaccctgtctcctttgttcagtgtactctcgtggcaaaactgctggcgagtgtacccttttttaagttcatcattttctttcatcactttgtccagtgaatttaggagcaaacaaccaacttcattatattccttggttctccacagatggttaaaggtattatgtatagagtcactaaactccttgcctctcaagagcggtgaatcaggagtatcaaatgcatttattttgcttaactctccaaacaggcatgtaagaatacgcagtatttgtttttctgctactgtggcattttgcttaggaaaatggcttctagctccatccatgttgctgcgaatgacatgatcatgttcctttttatggctgcatagtgttccatggtgtatatgtaccatattttcattatccaattcacagtggatgggcaccgaggttgattccat

SEQ ID NO: 11491 - DNA, 648 bp, Homo sapiens
  SIMILAR (2195)..(1842): 291254mologous to Caenorhabditis elegans strong similarity to thw P13/P14 family of kinases,accession number U97189,Smith- Waterman Score=141.
atgggaccaaatagcaccttagagaacctcctgaagggggccacttcggtcttttataatagggaccaggaggaggcccaaaagaaagagagaaagctcaggggaaggacaaaggctctagcagcagctttgcaggctggcaaagtccaggagccccaagatgcatccattagttgctatcagtgtggcaggccagggtattttaaagaggaatgcccaggcagcaagacgaagccacctcaaccctgtccatccagtggcaaaaaccagtggagacagaactgtccccagatatggaggtcactgggttcagagccagtctcacagatgaaagggtacacttgccagaagttttgccacaagagtacaccgaacaaaggaggcagggtcatttataacctgacgcatccaccctactgctgtgtccagttccagtttccattggctggaatgggacctcacattttgtatttgtcctgattggctagcaacttagaacttttaaaaagaggcacagacctagaagtagagcatcattctaaatcctcaccacgtgcaaccttgttagacaagtacgacaaccagatctctgacctctctttgacatctctggctttccaggcttttgtagcctttttaccaacttag

SEQ ID NO: 11492 - DNA, 1135 bp, Homo sapiens
  SIMILAR (12)..(689): 941254mologous to Homo sapiens dynactin p62 subunit,accession number AF195120,Smith-Waterman Score=1088.
  misc_feature (1)...(1135): n = a,t,c or g
atggagaaaatccccatactgaggagcctccgcgcccgagagcagcaggctgggaaggatgtcaccctccagggtgagcaccagcaccttccggaaccaggctgccagcagacagtgcccctgagtgttggcaggaggcccccggacacacccggaccagaaaccaattccatggaggcagcccctggctccccaccaggggaggggtgccccgcttgcagccgatgtttacgttgggaacctccccggggacgcccgtgtgagtgacctgaagagagccctgcgggaactcggctccgtgcccctgcggctcacctggcagggcccgcggcgcagagccttcctccattacccggactctgccgcagcccagcaggccgtctcctgcttgcagggcctgcgcctgggcaccgacaccctgagggggaggcctgtggggacagttcccaaggagcgtggctggagaatcgggaagggagaaggctacgccgatctggaatatgccatgatggtatccatgggcgccgtcagcaaggagacgccggtggtcaccatcgtccacgactgccaggtcgtggacatccntgaagagcttgttgaggagcacgacatcactgtggactacatcctcactccaaccagagtcatcgccacaggctgcaagcgcccaaagcccatgggaatcacctggttcaagaccagtctaatacacgctctgtttgagtgcagttactgtaaacagcgcatctccttgattgaccatcaacatccggtgggctcttctcagcttgtgtctcatgattttaaagaaaggaaaccaggtggccactacaccaaggatctctgccaggctggagatggtaccagagacctgggcctgaagctggaacgtggtcctgaacctctgggcagttcgtccagctccattgatcttctgatccttggagacagtcgtgcgatgtctctccctgtgacagccgtgtgtcagtggcagatgggagtcaatgcaacagagaccatacggcacacagagatgaaaatatttactatccagaccttcacaaaaggtttgccaacccttgccttagaaaaaagagaagctatagtatctatcaaacaaagacagcaagaatag

SEQ ID NO: 11493 - DNA, 840 bp, Homo sapiens
  SIMILAR (4)..(123): 901254mologous to Homo sapiens dynactin p62 subunit,accession number AF195120,Smith-Waterman Score=180.
atggaagcaggcgaggcctcaagctctgaggaagagcctccatctccagaggacaaagaaaaccaggtccccaaacgggttggtccacacctgcgctttgagatcagcagtgatgatggcttcagtgtggaggcagagagcttggagggaatgagtggagcgcggctcctgggcatccaccacgatgctgtcatcttcctggcagagcagctccctggggcccagcgctgccagcattataagttccgctaccaccagcagggagagggccaggaagagccacctctgaatccccatggggctgctcgtgctgaggtctatctccggaagtgtacctttgacatgttcaacttcctggcctcccagcaccgtgtgctccccgagggagccacctgtgatgaagaagaggatgaggtgcagcttcggtccaccagatcagctatccatggacgaggtctgttttgtaaacgcaacatcgatgcgggagagatggtcattgagtactctggcattgtcattcgctctgtgctgactgacaagcgagagaagttctatgatgggaagggtattgggtgctacatgttccgcatggatgactttgatgtggtggacgccaccatgcacggcaatgctgcccgattcatcaaccactcatgtgagcccaactgcttctctcgtgtcatccatgtggaaggccagaaacacattgtcatctttgccttgcgccgcatcctgcgaggtgaggagctcacctatgactacaagtttcctatcgaggatgccagcaacaagctgccctgcaactgtggcgccaagcgctgccgtcgctttcttaactga

SEQ ID NO: 11494 - DNA, 1054 bp, Homo sapiens
  SIMILAR (83)..(286): 891254mologous to multiple sclerosis associated retrovirus element gag polyprotein,accession number AF123881,Smith-Waterman Score=321.
ttgccagcactataagttccgttaccaccagcagggagagggccaggaggagccgcccctgaatccccatggggctgctcgggcagaggtctatctccggaagtgcacctttgacatgttcaacttcctggcctcccagcaccgggtgctccctgagggggccacctgtgatgaggaagaggatgaggtgcagctcaggtcaaccagacgtgccaccagcctggagctgcccatggccatgcgttttcgtcaccttaagaagacgtccaaagaagctgtgggtgtctacagatcagccatccacgggcgaggcctgttctgtaagcgcaacatcgacgcgggggagatggtcatcgagtactctggcattgtcatccgctcggtgttgactgacatgcggaagaagttctacgatgggaagggcatcgggttgctatatgttctccatggatgactttgatgtagtggacgccacgatgcatggcaatgccgcccgcttcatcaaccactcctgtgagcccaattgcttctctggggtcatccccggtggagggccagaaaacaaaattgttatcttcggcctgcgccgcatcctgggtggtgaggaggtcaaccttcggactaaaaagttccccatcgaaggatgccaagaaacaagttgccctgcaaactgtggcgccaagcgctgccgtcggttccttaactgaggccgtggctgccccaccacgacccctcacacctcctgatgccgtcgttgccattttgcccctagcctgggggctcccctagcccctcccaagagcatctcacaacccaccctcatgttacagggtggatgtgggcatgcaggtgaccaagggccctgcctccacccctccagcccatccagcaatcgccccctttctgccctgggggcccaggatgtaaatattgtacaaaggtttctaaatcccttcttttctatgcacttttttatttaagaaggtggggtcccaggtgggaacccccccacaaataaagtctgtcaatgtttgggaaaaaaaaaaaaaaaaaa

SEQ ID NO: 11495 - DNA, 1050 bp, Homo sapiens
  SIMILAR (1)..(111): 831254mologous to Homo sapiens PRO1546,accession number AF116638,Smith-Waterman Score=159.
ggtttattttccagatgcaatcaatgccccagtcacctgctgttataacttcaccaataggaagatctcagtgcagaggctcgcgagctatagaagaatcaccatcagcaagggtcccaaagaagctgcgatgtgagttcagcacaccaaccttccctggcctgaagttcttccttgtggagcaagggacaagcctcatagaacctatagtcacatagtgcactatttaacttaatgtacaaaggttcccaatgggaaaactgaggcaccaagggaaaaagtgaaccccaacatcactctccacctgggtgcctattcagaacaccccaatttctttagcttgaagtcaggatggctccacctggacacctataggagcagtttgccctgggttccctccttccacctgcgttcctcctctagctcccatggcagccctttggtgcagaatgggctgcacttctagaccaaaactgcaaaggaacttcatctaactctgtcctccctccccacagcttacagaccattgtgggccaagggagatctgtgctggaccccaaggcaggaagttgggtttcagggtttccatgggaccacctggggcaaggcaaacccaaactccttgaagacttgaacactcaactccacaaccccaagaatctggcagcctaaccttattttcccccctagctttcccccagacacccctgttttattttattaataaatgaattttgtttgttggatgtggaaacatttatgcccttaagtaatggttaattccttatttaaggttattggatgttttaaagtttatcctttccatggtactaagtgttttttagatacagagaccttggggaaattgcttttcctcttttgaaccacagttctaccccctgggatgttttgagggtctttgcaagtatcattaatacaaagaattttttttaacattccaatgtcattgctaaaatattattgtggaaatgaatattttggtaactattacaccaaataaatatatttttgtacaaaaaaaaaaaaaaa

SEQ ID NO: 11496 - DNA, 551 bp, Homo sapiens
  SIMILAR (266)..(373): 1001254mologous to Homo sapiens initation factor 4B,accession number X55733,Smith-Waterman Score=204.
gccattttgtatgccaagagggccagtgtcttcgtcaaattacagaagccaaatgctgccatccgagactgtgacagagccattgaaataaatcctgattcagctcagccttacaagtggcgggggaaagcacacaggcacagaaaattgcagaacatcggagaaagtatgagcgaaaacgtgaagagcgagagatcaaagaaagaatagaacgagttaagaaggctcgagaagagcatgagagagcccagagggaggaagaagccagacgacagtcaggagctcagtatggctcttttccaggtggctttcctgggggaatgcctggtaattttcccggaggaatacctggaatgggagggggcatgcctggaatggctggaatgcctggactcaatgaaattcttagtgatccagaggttcttgcagccatgcaggatccagaagttatggtggctttccaggatgtggctcagaacccagcaaatatgtcaaaataccagagcaacccaaaggttatgaatctcatcagtaaattgtcagccaaaaaa

SEQ ID NO: 11497 - DNA, 807 bp, Homo sapiens
  SIMILAR (130)..(288): 1001254mologous to Homo sapiens cone photoreceptor cyclic nucleotide-gated channel beta subunit,accession number AF272900,Smith-Waterman Score=272.
atggagaacagcaagagcaaggacctagggacaaggtactcagaggacccaagaccttccatctgcgacactgccctatcaaacaccctggaaggggatgagagctgccgctcatcagattccccagaagcagactttgagatggagttgtccgcatacctcatccttcctgaatgtgggacaagaactcaggacctgctgaatggtgggactggaagacctgtaacacaaacagggctgaaacacatccccctgcttgccacattgcagggctctgtagtttctggcatctttgagctttcaggtgctatcatgttccccctgcccagacactggtgcctgcagcagaagccacttgtggtatgtctggttcagctgcagccttgcatggaggcggtgcctgtgccagtgcctggagctgcctgcgccactgcagcagctggggtctgcaggagtgaggtcacccatgctgtctggcagctgagggtcaggcagccagaagatgagggcagcaaggaagacctgccacatacaaaattggtgcctgtcaagtggaactcatttttcaagcggcttcaccgcccctttcatggaatgggagggggcatgcctggaatggccggaatgcctggactcaatgaaattcttagtgatccagaggttcttgcagccatgcaggatccagaagttctggtggccttccaggatgtggctcagaacccagcaaatatgtcaaaataccagagcaacccaaaggttatgaatctcatcagtaaattgtcagtcaaatttggaggtcaagtgtaa

SEQ ID NO: 11498 - DNA, 1675 bp, Homo sapiens
  SIMILAR (111)..(1): 761254mologous to Homo sapiens Human secreted protein, SEQ ID NO: 7217,accession number G03136,Smith-Waterman Score=140.
ctgcaggaattcggcacgagcggtcacgccgagccagcgcctgggcctggaaccgggccgtagccccccagtttcgcccaccacctccctaccatggacccccgcaaagtgaacgagcttcgggcctttgtgaaaatgtgtaagcaggatccgagcgttctgtacaccgaggaaatgcgcttcctgagggagtgggtggagagcataggtggtaaagtaccacctgctactcagaaagctatatcagaagaaaataccaaggaagaaaaacctgatagtaagaaggtggaggaagacttaaaggcagacgaaccatcaagtgaggaaagtgatctagaaattgataaagaaggtgtgattgaaccagacactgatgctcctcaagaaatgggagatgaaaatgcggagataacggaggagatgatggatcaggcaaatgataaaaaagtggctgctattgaagccctaaatgatggtgaactccagaaagccattgacttattcacagatgccatcaagctgaatcctcgcttggccattttgtatgccaagagggccagtgtcttcgtcaaattacagaagccaaatgctgccatccgagactgtgacagagccattgaaataaatcctgattcagctcagccttacaagtggcgggggaaagcacacagactttttaggccactgggaagaagcagcccatgatcttgcccttgcctgtaaattggattatgatgaagatgctagtgcaatgctgaaagaagttcaacctagggcacagaaaattgcagaacatcggagaaagtatgagcgaaaacgtgaagagcgagagatcaaagaaagaatagaacgagttaagaaggctcgagaagagcatgagagagcccagagggagggaagaagccagacgacagtcagggagctcagtatggctctttttccaggtggctttctggggggaaatgcctggtaattttccccggaggaaatgcctggaatgggagggggccatgcctggaatgggttggaatgcctggactcaatgaaattcttagtgatccagaggttcttgcagccatgcaggatccagaagttatggtggctttccaggatgtggctcagaacccagcaaaatatgtcaaaataccagagcaacccaaagggttatgaatctcatcagtaaattgtcagccaaatttggaggtcaagcgtaatgtccttctgataaataaagcccttgctgaagggaaaagccacctagatcacccttagggatgtcgcaataatacaaaccagtgttacctctggaccttcttcattcaaggagagctgggggtgctttggaaggattaatcccttacccctctcccccaaatgcagctggaaggctttttacagtggtttgccattaggggtattcctttcaggtaatgttttcctattagggattacaaactttaaacactttttaaatcttcaaaatatttaaaacaaatttaaagggcctgttaattcttatatttttctttactaatcattttggatttttttctttgaattattggcagggaatatacttatgtatggaagattactgctctgagtgaaataaaagttattagtgcgaggcaaacataactcatttgaggataaagtttgtgttggatatgtgaaa

SEQ ID NO: 11499 - DNA, 356 bp, Homo sapiens
  SIMILAR (1)..(219): 1001254mologous to Homo sapiens ubiquitin-52 amino acid fusion protein,accession number X56998,Smith-Waterman Score=375.
gtcaaagccaaaattcaagacaaggagggtatcccacctgaccagcagcgtctgatatttgccggcaaacagctggaggatggccgcactctctcagactacaacatccagaaagagtccaccctgcacctggtgttgcgcctgcgaggtggcattattgagccttctctccgccagcttgcccagaaatacaactgcgacaagatgatctgccgcaaaagtgtggtcacaccaacaacctgcgtcccaagaagaaggtcaaataaggttgttctttccttgaagggcagcctcctgcccagccccgtggccctggagcctcaataaagtgtccctttcattgactggagcagcaa

SEQ ID NO: 11500 - DNA, 403 bp, Homo sapiens
  SIMILAR (3)..(314): 1001254mologous to Homo sapiens ubiquitin-52 amino acid fusion protein,accession number X56998,Smith-Waterman Score=553.
agaatgtcaaagccaaaattcaagacaaggagggtatcccacctgaccagcagcgtctgatatttgccggcaaacagctggaggatggccgcactctctcagactacaacatccagaaagagtccaccctgcacctggtgttgcgcctgcgaggtggcattattgagccttctctccgccagcttgcccagaaatacaactgcgacaagatgatctgccgcaagtgctatgctcgccttcaccctcgtgctgtcaactgccgcaagaagaagtgtggtcacaccaacaacctgcgtcccaagaagaaggtcaaataaggttgttctttccttgaagggcagcctcctgcccaggccccgtggccctggagcctcaataaagtgtccctttcattgactggagc

SEQ ID NO: 11501 - DNA, 489 bp, Homo sapiens
  SIMILAR (20)..(244): 411254mologous to Homo sapiens KIAA0742 protein,accession number AB018285,Smith-Waterman Score=136.
ttatgaagatttttcaactttcttggtggaataccacttaatctgggccaaaaggaatgaccctagccagactcagggatcaaagagcaaacagattcagtggcctgcattgactttcaaacctctggttgaaagaaatatacccagttcagtcactgcagtagaattccttgtagataagcaactggattttttaactgaagatagtgcctttcagccctaccaggtaagaaattttagattactttttaaaattaaaggttaattaaactttattgatattcagacattctttaaacaatattctttaaatatcatttcatctaacttctagttgtgtgaaaaacccaatgaatgcagtcagttgattttgcttataggataaacggtttattaattcaattaacaatatatactgagaacctactatgagccaggcagtgttctgtgcaaggaatacagaatacgaaatcgtcgacccgggaattc

SEQ ID NO: 11502 - DNA, 2112 bp, Homo sapiens
  SIMILAR (1223)..(1651): 791254mologous to Homo sapiens p40,accession number U93564,Smith-Waterman Score=592.
atgatccgcctgccttggcctcccaaagtgctgggattacaggtcacggcagttgcacaacagaatcaaggagaggtccctgaaccccaagatatgaaagtggctgaggttctctttgatgctgcagatgcaaatgccattgaggaagtaaaccttgcttatgagaacgtcaaggaagtggatggactggatgtttccaaagagggcacggaagcctgggaggctgctatgaagaggtacgatgagaggatcgacagagtggagacccggatcaccgctcgccttcgggatcagcttggcacagccaagaatgccaacgagatgtttaggattttctccaggtttaatgcactgtttgtcaggcctcacatccgtggggccattcgcgaataccagacccagctgatccagcgcgtgaaagatgacattgagtctcttcacgacaagttcaaggtccagtacccacagagtcaggcttgtaagatgagtcacgttcgtgacttgccccctgtgtcagggtctatcatctgggctaaacagatcgacaggcagctgacggcctacatgaagcgggtggaagatgtccttggcaagggctgggagaatcacgtggaggggcagaagctgaagcaggatggagacagcttccgcatgaagctcaacacgcaggagatctttgatgactgggcaaggaagcacgccatagtgactggcgatgctgtcggaatggacgatatcccgcaagaggcccggcagtaccggcataaccaagcctatgcctacagcatccagggtgacggtgccgaggatgacgatgagcgcattgttagatttcatacacgggtcaccgtcgacagcgacacacttgcatcggatgcagcccggttaacgtgccggcacggcctgggtaaccagtacacagtgtatagtcaagccagcaccatgagcattccggttgcaatggagacagatgggcctttatttgaagatgtgcagatgctgagaaagacagttaaggacgaggctcatcaggttctccagctctatcagatcacccagatcaatcatggcctgatgatggtggggccctcgggaagtgggaagagcatggcctggcgtgtcctgctgaaggcattggagagactcgagggtgtggaaggtgtggcccatatcatcgaccccaaggccatcagcaaagaccacctctacggaaccctggaccccaacaccagggaatggacagatgggctcttcacacacgtgctgagaaagtacgtcttctttgatctgtctattttaaaatccttcccaaccaggatcatcgacagcgtgagaggcgagctgcagaagcgccagtggatcgtcttcgatggcgatgtggatccagagtgggttgagaacttgaactcagtgctggatgacaataagctcctaactttgcccaatggagagcgcctcagtcttccacccaataaactacccacccccccaccaccccccaaccatctgtggaaaaatcgtcttccacgaaactggtccctgttgccaaaaatgttgagggccactgatatagaaagcaaagcaaagcatggtctaaaacaggctttggaaactgtgaatgactacaatcctctgatgaaagatttccctctgaatgatttgctgtctgccacggagctggacaaaataagacaggcgcttgttgccattttcacacatttgagaaagatccgaaacacaaaatatcctattcagagggcactgcgtttggtggaggcaatttcaagagacttgagttctcaattactcaaagtattgggcactaggaaattgatgcatgttgcttatgaagaatttgaaaaagttatggtagcatgctttgaagtttttcagacttgggatgatgagtatgagaaacttcaggtattgttgagagacatcgtcaaaagaaaaagggaagaaaatctgaagatggtgtggcgtatcaaccctgcccacaggaagctgcaggcccgccttgaccagatgagaaaatttagacgccagcatgaacagctaagagctgttatcgtcagggtcctgaggccacagagtgctggattacatgcatga

SEQ ID NO: 11503 - DNA, 448 bp, Homo sapiens
  SIMILAR (3)..(140): 361254mologous to Homo sapiens Secreted protein encoded by gene 12 clone HPMFI71,accession number W88545,Smith-Waterman Score= 68.
ccacgactagagagtgctcatgccagcagcttgagccacttagcgctagcacaccagcaacaacaacagttgttacagcaccagtcacctcatcttcttggacaagcccatccttctgcttcatataatcagcttggactttatccaattatttggcagtatccaaatggaacacatgcatactcaggacttggtttgccttcttctaagtgggttcacccagaaaatgcagttaatgctgaagcttcattaaggaggaattctcccagtccttggctacatcagcccacccctgtgacctcagcagatggtattggattacttagtcacattcctgtcagaccttccagtgcagacgctcatcggcctcttaaaattacagcccattccagtccaccattgacaaaaactttagtagatcatcataaggaagaattagaaagaaaaa

SEQ ID NO: 11504 - DNA, 2435 bp, Homo sapiens
  SIMILAR (880)..(2841): 941254mologous to Homo sapiens putative p150,accession number U93572,Smith-Waterman Score=3183.
atgggtaacgttagaccttcaagagaagacagggacaagcggactcacaatgtgctgttttgcataaaagcatgtgacagggcaaggaggaagggaagtccaggtggggaaagcagagccaaggtggccgcgcagctgccagtggcttgggtgccactccacatgtcacagaagccttcacgtccctgccaggaacagagcatgaaggctgccagggcggcctgccatgcctctgatgagggagttcagtgccaggacccactcaggccttcagctgcaggcccagccccccaactcgccctcgtctgtgtcccccacgcacgcttgcgcccatcttggcttctgcttcttagaggacctgatcagcacagacgaggctgtgtgggacctgctcatgctcttatctcacagagacacgccatcataccgtccccaccatcaccaggatgtgtcactacctcgcaacatcctggagtcagatgccttagaggcaagctgaccagagaagctcgacgcggtacctccacccgtgtatattatgagcgcagacgagcacaacgagcaagaacgcaaacaaaacaaaaaccgcagagaaaacagaaccacacagagaaagcaaagaaatcaagtaaaatacagacaaaaagcagcagcgaattccagtacgacaaaaagcgaagagcccgaagagaagcccatgcctgtatcccagcagctcaggaggcaaggcaagaaaatcgcttgaacacgagagacggacgaggcaaactatctgcagatcctggcatgagtcttcacccgggcgaagtacgagcagacgagtccaaaccaacgccgacgacagcagattccgaaagcgaggccagacagacaagagtacgcagcggcaccaccggcagcgacggacgggccccgaggtcacgcagagagcagtctagacgggggccccacgcacgcaccaccacgcgaggaacagacgacgcgggcagggcaaggaccgcacacgacggggcacccggacgaagacacgataccatacgagaactcacgcaagccggcagcccgagacacgacccgcagcatcggagcgccagcgcggcgacggatgcgcagagcgcgaggcgaacgcgctccgcaaaagagaacgacagcgaacacacccccacccacccaccccccacagggagaaaatggtctggaatgacacacagcaaactccaggcagcagtcactttgagatgtggggatggtagaccaatctcaggggataagtacacagtgtatagtcaagccagcaccatgagcattccggttgcaatggagacagatgggcctttatttgaagatgtgcagatgctgagaaagacagtgaaggacgaggctcatcagactttcaaacctctggttgaaagaaatatacccagttcagtcactgcagtagaattccttgtagataagcaactggattttttaactgaagatagtgcctttcagccctaccagaattctcccagtccttggctacatcagcccacccctgtgacctcagcagatggtattggattacttagtcacattcctgtcagaccttccagtgcagagcctcatcggcctcttaaaattacagcccattccagtccaccattgacaaaaactttagtagatcatcataaggaagaattagaaagaaaagcttttatggaaccattacggtctgttgcatccacatcagccaaaaatgacctggatctaaataggtcacagactggaaaagattgtcacttacataggcattttgtggatccagtattaaatcagttacagaggccaccccaggagactggagagaggttaaacaaatacaaagaggaacaccgtcgaattcttcaagaaagtattgatgttgctccctttacaacttaaaatcaagggacattgagggtgagagagagaattattccagagtggcatcatcatcttccaagtcctaaaagccatatcatcaaacaagatattggatgtagaacgctcagtatcagatctttataaaatgaagcactcagtgcctcagagtttaccccaaagtaactatttcactacattgtctaatagtgtggtcaatgaaccaccaagatcgatacccatccgaaagaagtttcaaatatttacgggtgataaacagagtaatgcccttgcagcggcagcagctaatcctcaaactctgacttcatttataacatctctttcaaagcctccacctttgattaaacaccaaccgagaaagtgaaggtttagaaatggataagcaaatggtgttacttttatataatgagacaacactgagaaggaaaaggaacaaactgtgtgacaacatggacgaatgtccaatgcatcaagctaagcgaaagaagctagacccaaaggctatacactga

SEQ ID NO: 11505 - DNA, 481 bp, Homo sapiens
  SIMILAR (145)..(53): 351254mologous to Drosophila melanogaster homeodomain- containing protein,accession number L31626,Smith-Waterman Score=55.
atggtgggcaaacgtcagtacacatttgtccaaaccacagaatgcacaacgagtgagccctcccagctgcttagtgtccgcgaggaggccgtccggatgcgcgatgattcaggccttctccgccagctccacccgggacgcgagcacccggcgtggacctctgcgtcccgggcccacgacgcccgcgcgggattccggggcagacgcaggggggggacaccagctggctcctctgactcagtaccagaatcggcactggagggcagacctggggccaccgtctcctgccctacctgagcaggagttccatgggaaacctctatggagaatcggctgcggctgcccttgtgatggacattctcatccaagttatctcccatgtacctctgaggactcaggacacccctgcacggcggccgaccctgacagctgcttcacgcctgtgtctccgcagcacttcatcgacctcttcaagttttaa

SEQ ID NO: 11506 - DNA, 1142 bp, Homo sapiens
  SIMILAR (209)..(412): 1001254mologous to Homo sapiens type II membrane protein,accession number AB015632,Smith-Waterman Score=349.
ctaattttaacttctgtgttgcttttccagaggcatggctattgcaccttgggagaagcctttaatcggttagacttctcaagtgcaattcaagatatccgaacgttcaattatgtggtcaaactgttgcagctaattgcaaaatcccagttaacttcattgagtggcgtggcacagaagaattacttcaacattttggataaaatcgttcaaaaggttcttgatgaccaccacaatcctcgcttaatcaaagatcttctgcaagacctaagctctaccctctgcattcttattagaggagtagggaagtctgtattagtgggaaacatcaatatttggatttgccgattagaaactattctcgcctggcaacaacagctacaggatcttcagatgactaagcaagtgaacaatggcctcaccctcagtgaccttcctctgcacatgctgaccaacatcctataccggttctcagacggatgggacatcatcacctttaggccaggtgaccccccacgttgtatatgcttagtgaagacagacagctgtggaagaagctttgtcagtaccattttgctgaaaagcagttttgtagacatttgatcctttcagaaaaaggtcatattgaatgggaagttggatgtaactttgcaactttcaggaaacattacccagcgaaggagcagtacgggagacaacactgcattttctgtcggcactgcagcattctcttttggaaggactcaggacatcccctgcacggcggccgaccctgacagctgcttcacgccttgtgtcttcccagcaattcatcgccctcttccaggttttaagggctgccccctgccatccctattggagatttgtgaatcctgctgtctgtgcagggctcatagtgagtgttctgtgaggtgggtggagactcctcggaagcccctgctttcagaaagcctgggaagaactgcccttctgcaaaggggggactggatgggtgcattttcatcacttgaaggccgaaggccaaggaaatcatttttacttctttaaaaactccttctaagcatattaaaatgggaaattttgcgtactctctctctctctatatatatagttcaaaaataaaaaaaaaaaaaaaaggtttt

SEQ ID NO: 11507 - DNA, 1038 bp, Homo sapiens; identical to SEQ ID NO: 6439
  SIMILAR (112)..(360): 451254mologous to Mus musculus caspase-12,accession number Y13090,Smith-Waterman Score=196.

SEQ ID NO: 11508 - DNA, 652 bp, Homo sapiens
  SIMILAR (77)..(559): 411254mologous to Mus musculus ribosomal protein L21,accession number U93863,Smith-Waterman Score=195.
atccttaattaaattaatcccccccccccgccctttcggccggaaccgccatcttccagtaattcgccaaaaatgaacgaacacaaaggggaaagaggagaggcaacccgatatatgttctctaggcccttttagaaaaccatggagttgttcctttgggcccccatatatgccgcatctcataggaaaggtgatattgtagacactcaagggaatggggtactgttcaaaaaaggaatgccccacaagtgttacccatggccaaaactggaaggagtcttacaattgttaccccagcatgcttgttgccattgttgtaaaccaaccagttttagggcaaagttttttcccaagagaataaattgtgcgtattgagcacatttaagcactctaagagcccgagataagcttccctgaaaccgttttgaaggaaaatgattcagaaaaagaaagaagcccaaatgagaaaggtacctggggttccaacttaaagcgccaccttgctccaccccagaagaagcacactttgtgaagaaccaatgggaaggagcctgagcttgctggaacctattccctatgaatttcatgggcataataggtgttaaaaaaaaaaaataaaggacctttgggctacaaaaaaaaaaaaaaaaaa

SEQ ID NO: 11509 - DNA, 559 bp, Homo sapiens
  SIMILAR (96)..(434): 571254mologous to Homo sapiens TX protease precursor,accession number Z48810,Smith-Waterman Score=316.
atgatgaatacaaaggcaaaaaggaaaggcactggatatatgttctctaggcctttacaaaaacatggagttgttcctttggccacatatatgctaatctataagaaaggtgatattgcagacatcaagggaaggggtactgttcaaaaaggaatgccccacaggtgttaccatggcaaaactggaagagtctacaattttacccagcatgcttttggcattgttttaaacaaacaagttaagggcaagattcttgccaagagaattaatgtgcatattgagcacattaaacactctaagagccgaggtagcttcctgaaatgcgtgaaggaaaatgatcagaaaaagaaggaagccaaagagaaaagtacctgggttcaactgaagcaccagcctgctccacccagagaagcacactgtgtgagaaccaacgggaaagagcttgagctgctggaatctattccctatgaattcatgcataataggtgttaaagaaataaaataaaagacctctggactatttaaaaaaaaaaaaaaaaaaaggccaggcgcggtggct

SEQ ID NO: 11510 - DNA, 536 bp, Homo sapiens; identical to SEQ ID NO: 6447
  SIMILAR (222)..(374): 981254mologous to Homo sapiens ribosomal protein L21,accession number X89401,Smith-Waterman Score=256.

SEQ ID NO: 11511 - DNA, 691 bp, Homo sapiens
  SIMILAR (336)..(461): 921254mologous to Homo sapiens ribosomal protein L21,accession number X89401,Smith-Waterman Score=209.
  misc_feature (1)...(691): n = a,t,c or g
cccacgcgtccggaaattatgagtttatcaagttggaaaggaacgccttagtgcaaagtttaattattgatgaagattactattactatgattaaaaaccctcctagtgaaagctgtgttcttctgtgacctggatttaaatgtatcttggcactcgagcttaatgatgactgttttttttgattgcttgaagcaatgtgaaaaacacatttcaccggctctgaaagctcttgagttgccatttgaaagaaatcttagaatactttacagttacttaaagtcagaattttaaaggaaggggaaatgctggtatataacattggtttctttaatagggaatgggtactgttcaaaaaggaatgccccacaagtgttaccatggcaaaactggaagagtctacaatgttacccagcatgctgttggcattgttgtaaacaaacaagttaagtaagtagtgttgtagttctttgtggctaaccagtattccctcatatacccccttttcactttgccagttggacttatgtctttattggtcattcaagtggggcaaaggaaatatccttttaaaactcaggcaaactgggtgtttgtctgtatcctgtcagaggaaacaaattgaaatagatttactggaaagtcttacacagttagttactaagcggnttgtttgttttgtttcgagacgga

SEQ ID NO: 11512 - DNA, 686 bp, Homo sapiens
  SIMILAR (376)..(1086): 961254mologous to Homo sapiens 3-ketoacyl-CoA thiolase beta- subunit of trifunctional protein,accession number D16481,Smith- Waterman Score=1133.
tgggcctttcggccggaaccgccatcttccagtaaattcgcgcaaaatgacggaccacaaaggggaaagaggagaggcaccccgatatatgttcctctaggcccttttaggaaaaccatggagttgtccctttggcccacatatttatgcgaaatctataagcaaaggtgatattgttagacatccaaggggaatggggtactgttcaaaaaagggaatgccccccacaagttgttacccatggcaaaaacttggaagagtcttacaatgttaccccagcaatgctgtttggcattgtttgtaaacaaacgaagcttaagggcaacgattctttgccaaggggaatttaatgtggcgtatttgagcacatttaaggcacttttaaggagcccgagataagcttccctgaaaacgtgtggaagggaaaatggatccaggaaaaaggaaaggaagcccaaaggaggaaaggttacctgggggtttcaacttaaaaggcgccaccttggcttcccaccccaggaggaagccacatttttgttgaaggaacccattgggggaagggagccttgagcttgcttggaaccctatttcccctattggatttcatggggcattaataggtgttaaaaaaaaaaataaaaaggaccctctgggctacaaaaaaaaaaaaaaaaaaaagtcgacgc

SEQ ID NO: 11513 - DNA, 843 bp, Homo sapiens; identical to SEQ ID NO: 11206
  SIMILAR (1138)..(1821): 921254mologous to Escherichia coli BETA-LACTAMASE PRECURSOR (EC 3.5.2.6) (CEPHALOSPORINASE),accession number D90872,Smith- Waterman Score=1159.

SEQ ID NO: 11514 - DNA, 1254 bp, Homo sapiens
  SIMILAR (135)..(398): 481254mologous to Homo sapiens put. HMG-17 protein,accession number X13546,Smith-Waterman Score=189.
  misc_feature (1)...(1254): n = a,t,c or g
actgagatcgctagacagtgcggnggaattcgaagaagaggcgagaacgacccccggaccgaccaaagcccgcgcgccgctgycatgcccgsgtkccagcacctacgtcccgctgccgtcgccgccgcgcaccattgcccaaaaaaaaggctgaaggggatgctaagggaaataaagcaaaggtgaaggacgaaccacagagaagatccgcgaggttgtcgtgctaaacctgctcctccaaagccagagcccaagcctaaaaaggcccctgcaaagaagggagagaaggtacccaaagggaaaaagggaaaagctgattgctggcaaggagggggaataacccttgcagaaaaatggagatgccaaaacagaccaggcacagaaagcttgaaggtgcttggagatgccaagtgaagttgtgtgcattttttgattaactgtgttacttctgggtgactgtacagtttgaaaatactattttttatccaagttttattaaaaatgcagaatttttgttttactttttttttttttttttaaaagctatgttgttagcacacagaaacactttcattgttgtttttttgggggaaagggggcataatgtcactaataagaatgtctccaaagctggattgatgtgggagaaaacacctttcccttctaagttttgagagacttcctcttggctcccaggaggagggattccctgactttgacacacatggccaccttggcacaaaaagccttgtggtatagaaaaacaaatttgtttttatgtcctcttctccctttccatctttcagcatagacttaactcccttaagcccagacatctgttgagacctgacccctagtcattggttaccagtgtgtcaggcaatctggactttccagtgatgccactgagatggcacctgtcaaaagagcagtggttccatttctagattgtggatcttcagataaattctgccattttcatttcacttcctgaaagtcagggtcggcttgtgaaaagttgttaaacaacatgctaaatgtgaaatgtcaaccctcactctaaactttccctgttcagagcatcagatgaagacttcattgggttttatagtggctttctgatttttggtagtccattgaagaagggagtttgaaagttgttgtatactgttaacgattgtctgcccatgtcctgcctgaaataccatgattgtttatggaaagtatctttaataaagctggatacagtttggc

SEQ ID NO: 11515 - DNA, 493 bp, Homo sapiens
  SIMILAR (1374)..(271): 971254mologous to Escherichia coli caiA,accession number X73904,Smith-Waterman Score=1906.
tgcggccgctcctgctgctgctactgccgccgccgcagcggctgctcgggctgagcacgccccggaacaggccgccgcgcgctgcgcgccggacccgctgcccctgccggcccggccgggtcgggcggcccgagggaccgacagacttgacaacgtgtgacagcactggggcggcaccttcctacttctgcccagccacagtcctcccctcacagttgagcacctgtttgcctgaagttaatttccagaagcaggagtccccagagccaggcagggggatgaaccgcgaggatgctcccgagaagagtctcggagcagatgtacattcagcagaaggtccgagtgctgctcatgctgcggaagatgggatcaaacctgacagccagcgaggaggagttcctgcgcacctatgcaggggtggtcaacagccagctcagccagctgcctccgcactccatcgaccagggtgcagaagacgtggtgaatggcgttt

SEQ ID NO: 11516 - DNA, 759 bp, Homo sapiens
  SIMILAR (518)..(273): 671254mologous to Homo sapiens beta-catenin-interacting protein ICAT,accession number AB021262,Smith-Waterman Score=256.
ttctgttggtcaagatttaaaaaaaaaaaaagtttcttcctgcagccaatcacaagtccatccctttaagccaattataaacgcaccactggtgtctcccttgatgccagccccactgagtagctgtgaggtggggtggggcagggcagggttgggtaggggaaggcggaggtggggcaaggggggctgctgccactcagccggcccaggagccacaacagatctcttggccctcaacagcatccaggggtgttccaagggctttgcagctactgcctccggtcttccgtctccgacctggaaaacgccatcaccacgtcctctgcaccctggtcgatggagtgcggaggcagctggctgagctggctgttgaccacccctgcataggtgcgcaggaactccttcctcgctggctgtcaggtttgatccccatcttccgcagcatgagcagcactcggaccttctgctgaatgtacatctccttcaggactcttcccgggagctccctcgcggttcatccccctgcctggctctggggactcctgcttctggaaattaacttcaggcaaacaggtgctcaactgtgaggggagggctgtggctgggcagaagtaggaaggtgccgccctgggccgcccgacccggccgggccggcaggggcagcgggtccggcgcgcagcgcgcggcggcctgttccggggcgtgctcagcccgagcagccgctgcggcggcggcagtagcagcagcaggagcggccgc

SEQ ID NO: 11517 - DNA, 1002 bp, Homo sapiens
  SIMILAR (373)..(561): 1001254mologous to Homo sapiens beta-catenin-interacting protein ICAT,accession number AB021262,Smith-Waterman Score=318.
atgcatgccttgcgctccccaacacgaggagcccgatgtagctctcaggccctggcggcaccttcctacttctgcccagccacagccctcccctcacagttgagcacctgtttgcctgaagttaatttccagaagcaggttaggtccctgctgcatgtggacacgctgctggccttcccagctgcctgcaggagctaccctctgacaggtagaaacaaccagcagtccaggtcatctcagttttcctggacgcagcagcttcatgcacagaggcagcaggcagtccagcccttgcagcgcctgctggagaacagagctgctcagttcagcctgctgggaccagcatgggagtccccagagccaggcagggggatgaaccgcgagggagctcccgggaagagtccggaggagatgtacattcagcagaaggtccgagtgctgctcatgctgcggaagatgggatcaaacctgacagccagcgaggaggagttcctgcgcacctatgcaggggtggtcaacagccagctcagccagctgcctccgcactccatcgaccaggggagggtcgctttgaccccagctgcttactcagcacctggctgcggctccagggagggtcgctttgaccccatcaccccgcgtcatgggttctgttgtttagaactgagaacagatgcccgaatggcctcagagaagtccttgtgggactctacacttcccccctcaagccctggggcaaagctggcattgggcataggatgggagggcctgctggataccctgtcctggtttagaaagctgcgcctttgccagtgtcctggccctggtttccagggcagcctttctgagtttcttcctagcgaggccgagagggtctttgaggaaaatcccgcatccggacacgccttgagggatggcgtcaaacccagaggcttggaaaagcccacatcccatccattgcaaatcacattggctgtatgttccaaatacacccagaattga

SEQ ID NO: 11518 - DNA, 648 bp, Homo sapiens; identical to SEQ ID NO: 3931
  SIMILAR (58)..(834): 831254mologous to Escherichia coli K12 putative peptidase,accession number AE000339,Smith-Waterman Score=1138.

SEQ ID NO: 11519 - DNA, 739 bp, Homo sapiens
  SIMILAR (205)..(522): 401254mologous to Human endogenous retrovirus K gag protein,accession number Y10392,Smith-Waterman Score=230.
gaggaacaagagtatagtgaagtaacagaagaggttacagagcaggtttatttgccagctaaagccaaagtggcaaaggagggagaggttcatccctacccttctgcaccccctcattattattttgaagaaaatgaccccccaaatctttcttttccggaggacactgggcgaaaagtagttgcccccgtgactgttcgagcagcacctcgagggactgctcttagttctattcaggcaggcattcagcaagctagacaagagggtgatttagaggcttggcagttccctgttagaatacaccccccagatcaacagggaaatattatagctacatttgagccttttccttttaaattactcaaagaattcaaacaagcaataagtcagtatggaccaggttctccctttgtaatgggactgttaaagaatgttacagtttccagtcagaagattcctactgactgggacactcttactcgagcttgtctaactcctgctcagttcttacaatttaaaacttgtgctatgaaacagggaccaagggaaccatatgttgattttatagctcggttacaggagtctcttaaaaagatgattgcagattcggctgctcaggagatagtgttgcagttactagctttcgacaatgctcatcccgattgccaggctgctctgcgacctatcagagggaaagcacatttagttgattatgtcaaggcctgtgatggtattggag

SEQ ID NO: 11520 - DNA, 747 bp, Homo sapiens
  SIMILAR (1)..(432): 1001254mologous to Escherichia coli caiA,accession number X73904,Smith-Waterman Score=757.
atgggacaggtgtggggtctggttcatttcaccttggatctttttcacactgatgatgaggaggaacgagagtacagtgaagtaatagaagaggttacagagcatgtttatttgccagctaaagctaaagtggcaaaggagggagagataagatgtcttcagcacccaggctcagcagcaccacacacgctgacttctgagggtctgagagagctaaggaaagcaacagcctggatgatgaatccactcaggatgtgggccaaagctgtacaaccaaaagatgatgagaaacaatgcttagaagtaagatcaatacaggagactagaacccaaatccgtcctggaatttggcacatgtatgggatatggatagaaaataagagcaaagaggaattcaagataatgaagcaatataaacaaaagttgaaaagagaaaatgagcatgcagtgcctagagatgccaaggaatccagatcactgaggtcggatagatgtgtctttccagaatttgatgaggttaaccaggtagagccagatgggttacctaccatgggatctgaagcaggagctggaaacgttctcaaaactgtcctgaaagcaagtaatgctttcagtcgttgtcaccttcgtgaggaacatgctgcaacttcgctttctgacttcattctccgggtgacatttttcacgcaggctctgacagagacagcaattataaagacatccaggttggcattcaaggattcttga

SEQ ID NO: 11521 - DNA, 1185 bp, Homo sapiens
  SIMILAR (1)..(735): 961254mologous to Escherichia coli O-SUCCINYLBENZOIC ACID-- COA LIGASE (EC 6.2.1.26) (OSB-COA SYNTHETASE) (O-SUCCINYLBENZOATE- COA SYNTHASE),accession number D90856,Smith-Waterman Score=1238.
tcatccatgaatctcacccctgagtttttctgagagtgaatgtagctggaaggtgtttagggaggcagcaagccctttccgactggacagcagcatattctggagcttcttgcctgggtccagtgccaagacttccgttcggactttggagccatgtgtgaccacatctgtgccatgtgtgatcctcagtagagctttcttctggttcagtggggagattgtaacccagcaggaacagcgccctgggggtggctgcacaagtgcttctgctctggggcctccctcctggccccctgccagccccagtatggaggggaaggggctttgaaaagcttctcgcctgttagctgtccaatatgctccgataacatcacaggccttgataaaatcaactaaatgtgctttgcctctgataggtcgcagagcagcctggcagtcaggattagcattgtcaaaagctaataactgcagcactatatcctgagcagccaaatctgcaatcacctttttgttttgagatgaaatctcactctgtcgcccagcctttttaagagactcctgtaaccaagctataaaatccacatatggttcttttggtccctgttttatagcactaaaggaagcgtattgttctccacataaagggattttttcccaagctctaatgcacactcctctaagctgttctatggcatcatcctgcatgaccacttgtgcatctaaaccagcccagccgccaacccccaaaagttggcctgtagttatattaatttgaggctgggcctgggcgttgcaagcagcctgaatggaagcttcatgggcccaccaagttttaaattgtaagaactgagcaggagttagacaagcctgagtaagagcatcccagtcagtaggaatcatctgactggaaacagcaacattctttaacagtcccattacaaaatgagaacctggtccatactgatttatagcttgtttaaattctttgagcaatttaaaaggaaaaggctcaaatgtagctgtaatatttccccgttgttctctctcctttaccgctttagctttagctggcaaataaacctgctctgtaatctcttctgttacttcgttatactctccttcctcctcatcatcagtgtgaaaaagttccaaggtggaacgaaccacagcccacacttttcccat

SEQ ID NO: 11522 - DNA, 1467 bp, Homo sapiens
  SIMILAR (1281)..(58): 501254mologous to Homo sapiens Gag-Pro-Pol protein,accession number AF164614,Smith-Waterman Score=1001.
ttattcattgtgactgtttgtcccgctttcctcaggttttcttccgccatctgtgacagcttcttgatctgtccacaggtgggtggctgtgttcgacgggtgttgctcgtgacagttggggtcctcctcagcatcagtctcgacatggctgcaactggggtgtccttgggatcttcctggagtctcttcctcggcatctggctcatgataaggtttcaggtgtcttgatggtatccaaattggctgttgattttgtcctggagaaatataagcataacctctaccccaagttattattttacctatttcccaactttttgttatcagatctctccaccaaatcagttgttctgtttttgtctttgcagctggtttctgtagatgctgttcagctgctgaaaacatctggcctttgggcaggctcaaaaaatttaaagttaataatgctaggttcagttgcatctgtggggttccatattctctgtctcttcctttctgcttttgcaactgctgttttagggagagattcattctttccactatggcttgttcttgagaattgtatgggataccagtaatgtgtttactattccacatagagaaaaatgtagctagagcttggccagtatagcctggggcattatctgttttactagaagctggaatgcccatcaccgcaaaacactgcaaaagatgacgtttaacacaggcagaagactctcctgattggtatgtagcccagacaaagtgagaaaaggtgtccacacatacatgtacataagctagtctcccaaatgagggaacatgtgtgacatccatttgccaaagagagttaggttccagtcctcgaggattaactcctcctgtaaaagatgaggaatgtaccatttggcaagttgggcattgctggataatagctttagcttctttccaggtaatgctgtatctgcgtttgagaccagaggcattaacatgggttaaattgtgaaagtgtctagcattagatattgcattagcaactaggcaatcagccatttgattcccttcagtcaaaggtcctccgataccatcacaggccttgatataatcaactgaatgtgctttcccgaatttaaaaggaaaaggctcaaatgtagctataatatttccctgttgatctggggggtgtattctaacagggaactgccaagcctctaaatcaccctctcgtctagcttgctgaattcctgctttttgcccagtgtcctccagaaaagaaagatctggagggtctttgtcttcaaaataataaggagggggtgcagaagggtagggatgaacctctccttcctttgccgctttagctttagctggtaaataaacatgctctgtaacctcttttgttacttcgctatactcttgttcctcctcattatcagtgtgaaaaagttccaaggtgatacaaaccagacaccatacctgtcccat

SEQ ID NO: 11523 - DNA, 783 bp, Homo sapiens
  SIMILAR (34)..(186): 511254mologous to Homo sapiens hypothetical protein,accession number AL390173,Smith-Waterman Score=111.
atgcccaaacaccaacaaacatctacaagcatcaagatcatgcaggaaaacatggcctcaccaaaagaactaaataagcatgaaggagaaataaagaccttcccagacaagcaaaagctgagagatttcatcaacaccagacctgtcctacaggaactgctaaaaggagttcttccatctgaaagaagagaggatgttaacggcaagaagaaatcatctgaagatacaaaactcactgaactttttcacactgataatgaggaggaacaagagaatagtgaagtaacagaagaggttacagagcaggtttatttgccagctaaagctaaagtggcaaaggaaggagaggttcatccctacccttctgcaccccctccttattattttgaagaaaatgaccccctggatctttcttttccggaggacattgggcgaaaagtagttgccccagtgactcttcgagcggcacctcgagtgacggctcttagttctattcaggcaggaattcagcaagctatacgagagggccaaaatcaacagccgatttggataccatcaagacacctgaaaccttatcaggagccagatgccgaggaagagactccaggaggatcccgaggaccccccggttgcagccatgtcgagaccgatgctgaggaggaccccaacagttacgagcaacacccgtcaaccacagccacccacctggggacagatcaagaagctgtcagagatggaggaagaaaacctgaggaaagcgggacaaccagtcacaatgaataa

SEQ ID NO: 11524 - DNA, 1464 bp, Homo sapiens; identical to SEQ ID NO: 4531
  SIMILAR (2022)..(1378): 961254mologous to Escherichia coli caiA,accession number X73904,Smith-Waterman Score=1093.

SEQ ID NO: 11525 - DNA, 2304 bp, Homo sapiens
  SIMILAR (493)..(1446): 391254mologous to Homo sapiens similar to pig tubulin- tyrosine ligase,accession number D79995,Smith-Waterman Score=570.
atgggctgggactgcggcttggctcgctgggcaagggtagggctgcgggagcgagcggcggtccagcccctggcgcccgggtgcgcggccatgtcttttgcctttcctccttttattcctcaaggctacaagactgcttttggtgttggcaccaacaaaattgttacgcaagacaataggtgggaactaccaggggcctggtatttccccagagcctcctcccaggccagggagatgccacagtgcccgactttggaaagccaggaaggggaaaactccgaagagaagggggacagttccaaagaagatccaaaagaaaccgtcgcgctggcttttgtgagagagaacccaggggcacaaaacggacttcagaatgcccagcagcaaggcaagaagaagaggaagaaaaagaggttaggattgaaagctggggaatggggagccatgttgatgattggtgatcaatctatccagctgccggcctttctttcttcaatagtgcgcagggctgcccaacagtacggctttagagagggaggggaagacgatgactggactctctattggacagattactcagtgtcactggagcgggtgatggaaatgaaaagttaccagaagatcaatcacttccccgggatgagtgaaatctgccggaaggacttgctggccaggaacatgagccgcatgttaaagatgttccctaaagatttccgctttttccctaggacctggtgtcttcctgctgactggggagatttgcagacctacagcaggtcaagaaaaaataagacatacatttgtaagccggattcgggctgccaagggaaaggtatattcatcacccggacagtgaaagaaatcaaaccaggggaggatatgatctgtcagctgtatatttcaaagccctttatcattgatgggtttaagtttgacctacggatttatgtactggtgacatcctgtgaccctctcaggatttttgtgtacaatgaaggactggcccgctttgcgacgacctcttactcccgcccttgcacagacaacctggatgatatctgcatgcacctgactaattattccattaataagcacagttcaaatttcagtcgagatgcacactctggcagtaagaggaagctctccaccttcagtgcatacttggaggaccacagctacaacgtggagcagatatggagggatattgaggacgtcatcatcaagaccctcatctcggcccaccccatcatcaggcataactaccacacctgcttccccaaccacacactcaacagcgcctgctttgagatcctgggctttgacattttgttggaccacaaactcaaaccctggctgctggaggtcaaccactctccaagcttctccaccgactctcggttggataaagaggtgaaagatggtctgctgtatgacaccttagtcctgatcaacctggaaagctgtgacaagaagaaagtcttggaggaggagagacaacgggggcagttcctgcagcagtgttgttctcgggagatgaggattgaggaagccaagggtttccgggccgtgcagttaaagaaaactgaaacgtatgagaaggaaaactgtggagggttccgactgatttatcccagtctgaattcggagaagtatgagaagtttttccaggacaacaactccctcttccagaatactgttgcttccagggctcgggaggagtatgcccggcaactgatccaggagctgagactaaaacgggagaaaaagcccttccaaatgaagaagaaggtagagatgcagggggaatcggcaggcgagcaagtgagaaagaagggcatgaggggctggcaacagaaacaacagcagaaagacaaggccgccacccaagcctccaaacagtacatccagccattgacattagtatcctacacacctgacttgctcttgagtgtcagaggtgaaaggaaaaatgaaacagacagcagcctcaaccaggaggctcccacggaggaggccagctctgttttccccaagctgacgtctgcgaagcccttcagttctctacccgatctgaggaatatcaatctcagcagctcgaagttggagcccagtaaacccaacttcagcatcaaggaggccaagtctgcctctgcagtgaacgtattcactggcactgtggtaagtattctggaggctgagaagtccaagatcaaggtgctggcaagtttgatgtctggtgagggcctattcctcatagacggcagcttcttgctgtgtcctcacacagtggaaggagctagttaa

SEQ ID NO: 11526 - DNA, 381 bp, Homo sapiens; identical to SEQ ID NO: 4562
  SIMILAR (60)..(308): 1001254mologous to Homo sapiens glyceraldehyde-3-phosphate dehydrogenase,accession number X01677,Smith-Waterman Score=435.

SEQ ID NO: 11527 - DNA, 732 bp, Homo sapiens
  SIMILAR (1447)..(2253): 951254mologous to Escherichia coli caiA,accession number X73904,Smith-Waterman Score=1336.
atggtgaaggtgaaggccagagtcaacgaatttggctatactgggtgcctggtcactagggctgcttttaactctggtaaagtggatattgttgccatcaatgaccccttcattgacctcaactacctggcctacatgctccagtatgattccacccatggcaagttccatggcaccatcaaggctgagaatgggaagcttgtcatcaatggaaatcccattaccatcttccaggacatcttcaccgccatggagaaggttggggctcatttgcagaggggagccaaaagggtcatgatctttgccccctctactgaagccatcatgttcatgatgaaagtgaattatgagaagtatgacaacagccttaagatcatcagcaatgcctcctgtaccaccaactgcttagcgcccctggccaaggtcatccatgacaactctggtgttggtcgtggacccgacctgccatctggaaaacctgccaaatattatgacatcaagaagatgatgaagcaggcttcagaggatcctatcaagggcatcctgggctacactgagcaccagattgtctcctccgacttcaacagtgacacacagtcttccacctttgatgctggggctggcattaccctcaacgaccactttgtcaagctcatttcctggtatgacaatgaatttggctacagcaacagggtggtggacctcatggcccacatggcttccaaggaataa

SEQ ID NO: 11528 - DNA, 1007 bp, Homo sapiens
  SIMILAR (3)..(191): 531254mologous to Escherichia coli Thermostable carboxypeptidase (EC 3.4.17.-),accession number D90772,Smith- Waterman Score=141.
atggtgaaggtgaaggccagagtcaacgaatttggctatactgggtgcctggtcactagggctgcttttaactctggtaaagtggatattgttgccatcaatgaccccttcattgacctcaactacctggcctacatgctccagtatgattccacccatggcaagttccatggcaccatcaaggctgagaatgggaagcttgtcatcaatggaaatcccattaccatcttccaggagtaagatcccaccaaaatcaaatggggcgatgctggcactgagtacgttgtggagtccaccagcatcttcaccgccatggagaaggttggggctcatttgcagaggggagccaaaagggtcatgatctttgccccctctactgaagccatcatgttcatgatgaaagtgaattatgagaagtatgacaacagccttaagatcatcagcaatgcctcctgtaccaccaactgcttagcgcccctggccaaggtcatccatgacaactctggtattgttgaaagactcatgattacagtccatgtcatcactaccacccagaaaactgtggatggcccttgcaggaaactgcggcctgatggccacagggctctccagaacatcatacctgcatctactagcactgccaaggcaatggtcaaggtcatccctgagctgaacaagaagctcactggcatggcctcccatgtccccactgccaaggtgttggtcgtggacccgacctgccatctggaaaacctgccaaatattatgacatcaagaagatgatgaagcaggcttcagaggatcctatcaagggcatcctgggctacactgagcaccagattgtctcctccgacttcaacagtgacacacagtcttccacctttgatgctggggctggcattaccctcaacgaccactttgtcaagctcatttcctggtatgacaatgaatttggctacagcaacagggtggtggacctcatggcccacatggcttccaaggaataa

SEQ ID NO: 11529 - DNA, 509 bp, Homo sapiens
  SIMILAR (1)..(387): 921254mologous to Escherichia coli O157:H7 putative PTS component,accession number AE005600,Smith-Waterman Score=599.
caccccaggccaagatcatccatgacaactttggtactgtggagggactcgtgaccacagtccacaccatcactgccacccagaaaactgtggatggcccctccaggaaactgtgtcataacagccgcagggctctccagaacatcatccttgcctctaccggcactgccaagcctgtgggcaagggcatcctggcctacactgagcaccaggctgtctcctccgacttcaacagtgacacccactcctccacctttgatactggggctggcattgccctcaatgaccactttgtcaagcttatttcctgttatgacaatgaatttggctacagcaacagggtggtggacttcatggcccacatggcctccaaggagaacctgagctccacaggactcaatgaaaaagcaactgtaacagaagagatagatgtctacctggattctggagctccaggaaagaacccccctgtgttcacaatggcggtccctggtgcctgcagaacttag

SEQ ID NO: 11530 - DNA, 5101 bp, Homo sapiens
  SIMILAR (1)..(834): 931254mologous to Escherichia coli anaerobic class I fumarase (EC 4.2.1.2),accession number M27058,Smith-Waterman Score=1369.
atgacaacccctgtgcagtcaaaaatctgcatatcttttcaggctgcctttcgagctcaggggcccctggctatgctgcagcactttgatactatctacagcattttgcatcactttcgaagtatagatcctggcctcaaagaagatactctgcaattcctgataaaaggtgtttatgggtcaggggtggtatcccgccactcccaggagcttccagctatcctggatgatacaactttgagtggatcagatagaaacgcccatctaaatgccctcaaaatgaactgttatgctctgatacgtctcctggaatcctttgagaccatggccagccagacaaaccttgtggacctggaccttggtgggaagggtaagaaagctcggaccaaggcagcccatggctttgactgggaagaagagaggcaaccaattcttcagcttttaacacagctacttcagttggacatccgtcacctgtggaaccactcaataattgaagaagaatttgtcagtttggttactggctgttgctaccgccttctggagaatcccaccattaatcaccagaagaaccgccccactcgggaagccataacacacctgcttggtgtagccttgacccgttataaccatatgctcagtgctacagtgaagatcatccagatgctgcagcactttgaacacctggcacctgtactggttgcagccgtgagtctatgggcaactgactatggaatgaagagcatagtgggagagattgtaagagagattggacaaaagtgtccccaagagctgagtcgagacccttcagggacaaagggctttgcagcattcctgacagaactagcagaacgtgtcccagctatcctgatgtccagcatgtgcattttgctagatcacctggatggagaaaattacatgatgcgtaatgctgtgctggcagccatggcggagatggtgctgcaggttctcagtggcgatcaactggaagcagcagcccgagacaccagagaccagttcttggatactttacaagcccatggccatgatgtcaactcctttgtgcggagccgtgttttgcagctcttcacccgaattgtccagcagaaggctctccccctgacacgtttccaggcagtggtggctttagctgtgggacgtctggcagacaagtcagtgctagtatgtaaaaatgccatccagctgctggccagttttctagccaataatcctttctcctgcaagcttagtgatgctgaccttgccggaccactgcagaaggagacccagaaattacaagagatgagggcccagaggcgaactgcagcagctttgctggacccagaggaggagtgggaagccatgctgccagagttgaagtctaccctgcagcagcttctacagcttccccagggagaggaggagattcctgagcaaattgccaatacagagacaactgaagatgtgaaaggacgcatctatcaactgcttgccaaagctagttacaaaaaggccatcattctcactcgagaagccacaggccacttccaggagtccgaacccttcagtcatatagacccagaggagtcagaggagaccaggctcttgaatatcttaggacttatcttcaaaggcccagcagcttccacacaagaaaagaatccccgggagtctacaggaaacatggtcacaggacagactgtctgtaaaaataaacccaatatgtcggatcctgaggaatccaggggaaatgatgaactagtgaagcaggagatgctggtacagtatctgcaggatgcctacagcttctcccggaagattacagaggccattggcatcatcagcaagatgatgtatgaaaacacaactacagtggtgcaggaggtgattgaattctttgtgatggtcttccaatttggggtaccccaggccctgtttggggtgcgccgtatgctgcctctcatctggtctaaggagcctggtgtccgggaagccgtgcttaatgcctaccgccaactctacctcaaccccaaaggggactctgccagagccaaggcccaggctttgattcagaatctctctctgctgctagtggatgcctcggttgggaccattcagtgtcttgaggaaattctctgtgagtttgtgcagaaggatgagttgaaaccagcagtgacccagctgctgtgggagcgggccaccgagaaggtcgcctgctgtcctctggagcgctgttcctctgtcatgcttcttggcatgatggcacgaggaaagccagaaattgtgggaagcaatttagacacactggtgagcatagggctggatgagaagtttccacaggactacaggctggcccagcaggtgtgccatgccattgccaacatctcggacaggagaaagccttctctgggcaaacgtcacccccccttccggctgcctcaggaacacaggttgtttgagcgactgcgggagacagtcacaaaaggctttgtccacccagacccactctggatcccattcaaagaggtggcagtgaccctcatttaccaactggcagagggccccgaagtgatctgtgcccagatattgcagggctgtgcaaaacaggccctggagaagctagaagagaagagaaccagtcaggaggacccgaaggagtcccccgcaatgctccccactttcctgttgatgaacctgctgtccctggctggggatgtggctctgcagcagctggtccacttggagcaggcagtgagtggagagctctgccggcgccgagttctccgggaagaacaggagcacaagaccaaagatcccaaggagaagaatacgagctctgagaccaccatggaggaggagctggggctggttggggcaacagcagatgacacagaggcagaactaatccgtggcatctgcgagatggaactgttggatggcaaacagacactggctgcctttgttccactcttgcttaaagtctgtaacaacccaggcctctatagcaacccagacctctctgcagctgcttcacttgcccttggcaagttctgcatgatcagtgccactttctgcgactcccagcttcgtcttctgttcaccatgctggaaaagtctccacttcccattgtccggtctaacctcatggttgccactggggatctggccatccgctttcccaatctggtggacccctggactcctcatctgtatgctcgtctccgggaccctgctcagcaagtgcggaaaacagcggggctggtgatgacccacctgatcctcaaggacatggtgaaggtgaaggggcaggtcagcgagatggcggtgctgctcatcgaccccgagcctcagattgctgccctggccaagaacttcttcaatgagctctcccacaagggcaacgcaatctataatctccttccagatatcatcagccgcctgtcagaccccgagctgggggtggaggaagagcctttccacaccatcatgaaacagctcctctcctacatcaccaaggacaagcagacagagagcctggtggaaaagctgtgtcagcggttccgcacatcccgaactgagcggcagcagcgagacctggcctactgtgtgtcacagctgcccctcacagagcgaggcctccgtaagatgcttgacaattttgactgttttggagacaaactgtcagatgagtccatcttcagtgcttttttgtcagttgtaggcaagctgcgacgtggggccaagcctgagggcaaggctataatagatgaatttgagcagaagcttcgggcctgtcataccagaggtttggatggaatcaaggagcttgagattggccaagcaggtagccagagagcgccatcagccaagaaaccatccactggttctaggtaccagcctctggcttctacagcctcagacaatgactttgtcacaccagagccccgccgtactacccgtcggcatccaaacacccagcagcgagcttccaaaaagaaacccaaagttgtcttctcaagtgatgagtccagtgaggaagccgagccacatcgctcagacaccatggggaaggtgaaggtcggagtcaacggatttggtcgtattgggcgcctggtcaccagggctgcttttaactctggtaaagtggatattgttgccatcaatgaccccttcattgacctcaactacatggtttacatgttccaatatgattccacccatggcaaattccatggcaccgtcaaggctgagaacgggaagcttgtcatcaatggaaatcccatcaccatcttccaggagcgagatccctccaaaatcaagtggggcgatgctggcgctgagtacgtcgtggagtccactggcgtcttcaccaccatggagaaggctggggctcatttgcaggggggagccaaaagggtcatcatctctgccccctctgctgatgcccccatgttcgtcatgggtgtgaaccatgagaagtatgacaacagcctcaagatcatcagcaatgcctcctgcaccaccaactgcttagcacccctggccaaggtcatccatgacaactttggtatcgtggaaggactcatgaccacagtccatgccatcactgccacccagaagactgtggatggcccctccgggaaactgtggcgtgatggccgcggggctctccagaacatcatccctgcctctactggcgctgccaaggctgtgggcaaggtcatccctgagctgaacgggaagctcactggcatggccttccgtgtccccactgccaacgtgtcagtggtggacctgacctgccgtctagaaaaacctgccaaatatgatgacatcaagaaggtggtgaagcaggcgtcggagggcccccctcaagggcatcctgggctacactgagcaccaggtggtctcctctgacttcaacagcgacacccactcctccacctttgacgctggggctggcattgccctcaacgaccactttgtcaagctcatttcctggtatgacaacgaatttggctacagcaacagggtggtggacctcattggccacattggcctccaaggagtaagacccctggaccaccagccccagcaagag

SEQ ID NO: 11531 - DNA, 758 bp, Homo sapiens
  SIMILAR (412)..(654): 621254mologous to Macaca mulatta alpha-tubulin,accession number AF141923,Smith-Waterman Score=259.
ttaacatgtcagggatggtaacagagacccagtatcttctgacttttgcttttctaacctgtagccactacgtgtgagtgcatcttcatccaccttggcgaggctgatgtctggattggcaatgctgccgggagctctactacctggaacaaagcatccagcacgatagcccaatgccaagtgacaagaccactgggtaaggagataattgattctacgcctcttcagtgagcaggcaagtttgtgtccagggcagtgtttataaacctggaacccatagtcactgatgaagtttgcactggcacctaccaccagctcttccaccctgagcagctcatcacagacaaggaagacgctgcccataactatgcctgggggcatcacgacattggcaagatcattggctgctattccactaacaagaccaaatgcaccatccagtttgtggattggtgtttcactagcctcaaagttggcattaattgccagcttcccactgtggtacctgctggaaatctggccaacataaagagagctgcgtgcatgctgagcaacaccatagccattgctgaggcctgggtttgcctgggccacaagtctgacttgagttatgccaactgttcctttgttcaccaatttttcaacaagtctatccattgatattttgaatactagggatctgaaagaattaggatctattttacatggactcaatagaacaacggcagttatataactgaaacctacatcagtcattc

SEQ ID NO: 11532 - DNA, 1173 bp, Homo sapiens
  SIMILAR (436)..(819): 1001254mologous to Homo sapiens sperm protein 10,accession number M82968,Smith-Waterman Score=685.
ttaggagtaaaagtccaaaattgagatttttttaatcattgtgtaagatctgtattccagattgttttggtcaagatcagtttttggtttcttattggcactaggccttgttagtgatagccagattatggggaccacaggagccccgtagtttctccaagccactctatccggatcttctgctgttgggtcctggcttgggtaatcatagaaggcacctgggagcatcagggcaggagctgagattccagggcttctagctggaatggggagctcctgcctgtatgaacccacagctgaaacttgtacactaagcagagcaggcactgatgggtaaacacatgtgtttgtggctgcagtctgtctcctaacacgctctggggtctctgaggctcttctccagctctgctgtagctgcagttctgactgtggcactgtctcctcttctggagagggagaggaagggagcgtgcagagtatgctccctgatggtgatgtgtgcgtctgtgaatcttcacatgtgcaggtgggttccagtgcgcccgtatgtgcatagagcctgggctgctgtccactgtagccactacgtgtgagtgcatcttcatccaccttggcgaggctgatgtctggattggcaatgcctgccgggagctctactacctggaacccatagtcactgatgaagtttgcactggcacctaccaccagctcttccaccctgagcagctcatcacagacaaggaagacgctgcccataactatgcctgggggcatcacgacattggcaagatcattggctgctattccactaacaagaccaaatgcaccatccagtttgtggattggtgtttcactagcctcaaagttggcattaattgccagcttcccactgtggtacctgctggaaatctggccaacataaagagagctgcgtgcatgctgagcaacaccatagccattgctgaggcctgggtttgcctgggccacaagtctgacttgagttatgccaactgttcctttgttcactgggaaatgggtgaggagatgggagaagaagcattttctgaggcctgtgaggacatggctgcccttgaaaaagattatgaggaggttggtgtggattctttcagttttaggattatacgtgtatttttccccttctttgtagtgcat

SEQ ID NO: 11533 - DNA, 532 bp, Homo sapiens
  SIMILAR (438)..(178): 371254mologous to Kluyveromyces lactis WSC4 homologue,accession number AJ243800,Smith-Waterman Score=97.
attggtgtgatggtccacaaaacaggtatgcacttatatgtcagcagtgttttctcataatggcatggctttgaaggaagaatttgaatacattgcttttcgatgtgcctactgttttttcttgaaccctgcaagaaaaaccagacctcaggctccaagacttcctgagtttagttttgagaagaggcaggtggtggaaggttcaagttcagttggtcccttgccatcaggaagtgtgctttcatcagacaaccagtttaatgaagaatctttagaacacgatgttcttgatgataatacagagcagacagatgacaaaataccagctacagaacagacaaaccaagtgattgaaaaagcatctgactcagaggaaccagaggagaaacaagagactgagaatgaggaagcctcagtgattgaaaccaactccacagttcctggagctgattctattcctgatcctgaactaagtggagaatctttgacggcagagtagtaaatgcttccacgtgccttcaactggaaaaaa

SEQ ID NO: 11534 - DNA, 766 bp, Homo sapiens
  SIMILAR (128)..(430): 331254mologous to Arabidopsis thaliana putative protein,accession number AL161578,Smith-Waterman Score=144.
ggcagccctatcatcaaatgtgttaccaagacatcttggatcccctgctacttcagtgcctggaatgggtcttcatcctccaggtccacctttagcaagacctattctcccccgagaacgaggtgctttggatagaattgttgaatatttggttggtgatggtccacaaaacaggtatgcacttatatgtcagcagtgtttttctcataatggcatggctttgaaggaagaatttgaatacattgcttttcgatgtgcctactgttttttcttgaaccctgcaagaaaaaccagacctcaggctccaagacttcctgagtttagttttgagaagaggcaggtggtggaaggttcaagttcagttggtcccttgccatcaggaagtgtgctttcatcagacaaccagtttaatgaaggaggagcaataccccagacgtctcattttctgtctgaaattcctggaaagaagtcttactggctcaaacccaaccccaataaggcaaaggagcactgcattgagtgtggaattcaagatccagaaatgacagccagatttgtctggagggaggaaaaagtgctcttaggtttgatgatgtcctacaaaagaacatgcaaagtactggggatgaaggtgccagttgagcacaggatgaccaccgaaggatgtgtgaagaaggaagggaaaagcagaaaacctagaggcacaagaaaatccaaagatttcttcattcgagtaccccaaatgtcagacgaggtgcggatctga

SEQ ID NO: 11535 - DNA, 447 bp, Homo sapiens
  SIMILAR (91)..(243): 1001254mologous to Homo sapiens HSPC223,accession number AF151057,Smith-Waterman Score=282.
atgagcggttctaggggcttccacttggtccttgctaccacaattttcacctcgcagggaaaggaaccaatgtggggcacctgcaaattagttccatctcaggatgattccaaaccaacccagaggcaatttactattctcaactttaatgatttaatgtcatctgccgttcccatgacacctgaagatccttcattttgggactgtttttgcttcacagaagaaattccaatacgaaatggaggagcaggagaaggagaaggaggaggaggaggagaagcagaagcagaagaagaggaggagggggaaggggaagaggaaaaggaaggggaagaggaggaggaaggtgaggaggaagaaggagaagaagaagacaacaagaggaagaggaagaggaaggaggaggagaagaaggaggaggaggaggaggagaaggagaagaaataa

SEQ ID NO: 11536 - DNA, 2469 bp, Homo sapiens
  SIMILAR (2468)..(1815): 621254mologous to Homo sapiens HSPC223,accession number AF151057,Smith-Waterman Score=590.
tttttttttttttttttttcataataaatgttcatttttttattattataatgacaagacaaagtttttcatatcaccattacactcatgctagggataacaatacttcctctattataaatgctacttgacctttatttactatgcttggcataactgggcatgcttaataaaataaaaaaaaaaacattcaaatttttttcttttactaatcgaagtacctaattttatacaatttgcacacttttaatgttagtaacagaaacaatgaaattattttacttcttgatacttaagagtttaactccaagacatgcactacaaccacataatagatttttgtcatcaatatgatggtcctggcatcttatatattaagttcacactttaaattaagtactacttgctaaaacgaaaacaggtaaaaacaatgaacagacggatcacgttaagaggaatacgaaaagccaataacaatactgacataacaatcttatttgtaatgaaagaaatacaaattttaaaaatgacataccattttttaattacattggcaaaaattaaaccaaaaagaatacctacaattgaccaaggagtattctggcagggggagggaagtcacatacatatagtactaattagaggggtaaattgtataattaaagccctatgaaccagtcaaaccaatcattccactattagaaactttctcaaggacataattaagcatgtaactcaaaatgtacaaggacattcactctgccactgcttgtagtaataaactgcagataatcaaaatgtctaacacagaaaaaagtaagtaaattatggtaaacctttcttatgggaaggcagtgggcttccaattccattctccacacctagcttagcttctttcttttcaacagagtctacttctaacagagaccaaaaatgtcagacattgcctttctctgtaacctgatctaagtcaatggaaactgaggggaaatcttctggaggcttttgttaaaaatcttcctcatggataaaacaaatgagagacgaaatggccttttctgcctttgagatacaattttacaaagatgtaaaactggaagttatagcagcagctcttgtgatcgagaggtggaatagcctaaggcaaaacaaaccaactgaggtcaaggcaaaaaaagtgtgtctttaatgacacccctgaaccctgtgttatgtcaaacaatttcctaggttacttaggccaattatatttggacactgttacctctggccaaaagcatcctaacttgtattagctatacaacagagtacattagaaccacaaaaagttatgttacagaggtatatttatgaacagtagatgtgcagttaaaaagaatttacaaaacagtacgtttccatgtttttaaaaaaaatcaaatatgtcaatatggattcatttgccaagaaaaaggtctgaaaagatactcaaggttttaagagtagttatctttgaaagatagcatttaaatgtttccttttgcttatgtgcattttctatttttttctacagttagcatgtatcactttaagattccgccatccttcctatcaattcaatgcaatttaggaaagaaagaggtaaacatgtattccagtgagctatcttgaaccagaagtctgctttttttttttaattggaaaagtttctgttctttaaaaaaactttcgtgaaataaaatttgatactaatacattcatttatttttcagtgaatacggaagatcacaaacagtttcaattccccttggttaaccccagggaatccatcatggactttgtacccatttccgtaatgggaatttcctcctgtggaagcaaaaacagtccccaaaatgaaggatcttccaggtgtccatgggaacggcagatggacattaaatccattaaagttgagaatagtaaattgcctctgggttggtttggaatcatcctgagatggaacatcctgatgtcctagatccatcggggtttcctaagagcaactgcaacaaaatggtgctcatctattttgctttcccccaaatgccccattcctttttcctcctctccatccagggaataaaccgtgtttctttataaacttgggcctatatccaaggttttaatgggagatagattcaaattcaagccgctggcaattcaaatcctagtccaacaccaatggcttttatgaagctttccttaagtgcccaattcctataaaacatatccagctgagtccactcatccttaaagcttctgattgtttcccattctttgttggtaaactttcttttcataatatgaaagaattctggaattgaaccacgacctggaaaactagtcttcattatatcaattccaacttgcagctcaggttcagcagcaagcactgcatagtctccttgatgagagatgttaaagttgaaattcgggtatggattcgat

SEQ ID NO: 11537 - DNA, 1134 bp, Homo sapiens
  SIMILAR (5517)..(4627): 851254mologous to Homo sapiens putative p150,accession number U93569,Smith-Waterman Score=1316.
atgtctcacagaaagttctccactcccagacatgggtccctcggcttcctgccttggaagcacagcagcaggcatcgtgggaaggtgaagagcttccctaaggatgacccatccaagccggtccacctcacagccttcctgggatacaaggctggcatgacccacatcgtgcgggaagtcgacaggccaggatccaaggtgaacaagaaggaggtggtggaggctgtgaccattgtggagaggccaccagtgggcattgtgggctgcgtggaaacccctcaaggcttccggacttgcaagactgtcttcgctgagcacatcagtgatgaatgcaagaggcgtttctataagaactggcataaatctaagaagaaggcctttaccaagtactgcaagaaatggcaggatgaggatggcaagaagcagctggagaaggacttcagcagcatgaagaagtactgccaagtcatctgcgtcattgcccacacccagatgcacctgcttcctctgtgccagaagaaggcccacctgatggagatccaggtgaatggaggcactgtggctgagaagctggactgggctggcgagaggctcaagcaccaggtacctgtgaaccaagtgtttgggcaggatgagatgatcgacgtcatcagggtgaccaagggcaaaggctacaaaagggtcaccagtcattggcacaccaagaagctgccccgcaagacccaccaaggcctgtgcaaggtggcctgtattggggcatggcatcctgctcgtgtgggcttctctgtgggctaccttatcaaggatggcaagctgatcaagaacaatgcctccactgactatgacctgtctgacaagagcatcaaccctttgggtggcttcgtccactatggtgaagtgaccaatgactttgtcatgctgaaaggctgtgtggtgggaaccaagaagtgggtgctcaccctccacaagtccttgctggtgcagacaaagcagcgggctctggagaagattgaccttaagttcattgacacctcctccaagtttggccatggccgcttccagaccacggaggagaagaaagcattcatgggaccactcaagaaagaccgaattgcaaaggaagaaggagcttaa

SEQ ID NO: 11538 - DNA, 552 bp, Homo sapiens
  SIMILAR (244)..(549): 821254mologous to Homo sapiens muscle specific gene M9,accession number AB019392,Smith-Waterman Score=416.
atggtgatatttgagcagatgagagccaatgtgggcatgttgctccagggtatcaacaggaacaatcctgagaagctggccaccctggagtgctacgtggagatgcaggccaaggacactgcctatgatctggaagccaacccagttgtcctgaagctgtaccagtccaacccagtgttttttcagaccacggacactgcccagatccagctgaaggccctcaccaacctgccacataccaacttcaccccgtccctggatgaaaacgtggacctcttggaaggtataactggctttgaagactctgtccgaatgtgtatctgccctgtcgtgggtatcacttaccagcacatcgaccactggctgctggccgagatgcctgggtatctgtcggacagccagctgaaggtgtggatgagaaaatacacctggagggctgatgagtcccagcagatcttcatctgtagccaggaagagaacattaagcccaagaaccctgtggagaagatagactttgacagtgtgtccagcatcatggccttcttccagtaa

SEQ ID NO: 11539 - DNA, 589 bp, Homo sapiens
  SIMILAR (582)..(1154): 1001254mologous to Homo sapiens alpha2,3-sialyltransferase ST3Gal VI,accession number AB022918,Smith-Waterman Score=1032.
tgggcggatcacttgagccccaggagtttgaaatcagcctgggcaatattagtgagccctcgtctatgtaaccaacagcagcaacaaattcttagcactttggggggctgaggcgggaagatcacttgagcccagaaattcgagaccagcctgggcaacgtagtgagaccccatctctataaataaataaaaataaaagcaaataatttaaaagaataaacattgtgaacatcaattcccatcacagcacgccctggatgaaaacatggacctcttggaaggtataactggctttgaagactctgtccgaaagtttatctgccatgttgtgggtatcacttaccagcacattgaccgctggctgctggccgagatgctcggggatctgtcggacagccagctaaaggtgtggatgagcacataccgctggagtgccgacgagtcggggcagatcttcatctgtagccaagaagagagcattaaacccaagaacattgtggagaagattgactttgacagtgtgtccagcatcatggcctcctcccagtaacttcaggtgtttaataaagatgtgttgactcaaaaaaaa

SEQ ID NO: 11540 - DNA, 1010 bp, Homo sapiens
  SIMILAR (279)..(548): 751254mologous to Homo sapiens muscle specific gene M9,accession number AB019392,Smith-Waterman Score=316.
gaaagcgtggcggctgctgctagagcctttccctttaccgcacccaaggagctggagcgacaacaacgacgtcgtttccgtttccaccacctcttcctgttcccgtccttgaggacgccgtgccgggtcagtgttagcctccagccctggttgtggaaggcgacagaagtcatggcgatgtttgagcagatgagagccaacgtgggcaagttgctcaagggtatcgacaggtacaatcctgagaacctggccaccctggagcgctaatgtagagacgcagggccaaggaaaatgcctatgatctggaacccaacctggctgtcctgaagctgtaccagttcaacccagccttctttcagaccacggtcaccgcccagatccttctgaaggccctcaccaacttgccgcacacagacttcaccctgtgcaagtgcatgatcgaccaggccaccatccaagaaagaaacggcccaattccggaccagatttttgtaccctcggggaccttgctggaagaccctgcccatttcccaggccctttctggcaaacccctggaaatggcagggcttgccagaaggcctgggatgaaaaccattggaccctctttggaaaggtattaacttggcttttgaagacttcttgtccgaaagtttatctgcccatgttgtgggctatcacttacccagccacattgaccgcttggctgctggccgagatgctcggggatcttgtcggacaagccagctaaaaggtgttggatgagcaaaatacggctgcgagaagacgacagaagggggcagatcttcgatctgtagcccaagaatgagagcatttaaacccaagaaacaattgtggagaagattgactttgacagtgtgtccagcatcatggcctcctcccagtaaacttcaggtgttttaataaagatggtgttgactcagcctgaaaaaaaaaaaaaaaaaaaaaaaaaaaaagtcgtatcgatgtcgagcgatcatgatgattggat

SEQ ID NO: 11541 - DNA, 500 bp, Homo sapiens
  SIMILAR (287)..(385): 541254mologous to Homo sapiens Human 5' EST secreted protein SEQ ID NO: 198 from WO 9906553,accession number Y12533,Smith- Waterman Score=62.
gcatggttggggggcatcagcaggacaaaccaacaggtactccgcaagtgtactggcacagcaagcccaccaattattagcagctcttcatcagcctgctgtctactcagacgcttgcctactgaagggacctgtccagagatcttctggaatcccaggttgggaatctctgcagaatgtcgtgacagttgtggcccaactagcttctgagtagaaacaaggaagctaccctgagatatagtcagctgcccacctgccatagtatttgctactgaatgccagccttttaacataccatttcagatttgtccttcaacaaaaatataaattgcaagtcataccatttaagggtcttttacaaatatgtctaaattgtgtgtcatttttaagttccaaaggtctactggactaagtactatcagaccagctgtagaacctgatggcgctgatccggggtggaataaccctcagtactggtgtgtagaagatgaattgtaggc

SEQ ID NO: 11542 - DNA, 3646 bp, Homo sapiens
  SIMILAR (1226)..(2605): 901254mologous to Homo sapiens putative p150,accession number U93574,Smith-Waterman Score=2122.
ctgcctttggagaaagtggagtgtggcgcttggttgtcgttatttcttcggactgcttcgcggtgcacggattcagcttctgcccagtggggctttcagctgtttgcgcgtctctctgtccccctcccctccccccggcacacctctgtctacgatgaggaaaggtctgcgggcgacagcggcccgctgcggactgggactgggatacttgctgcaaatgctcgtgctacctgccctggccctgctcagcgccagcggcactggctccgccgcccaagatgatgacttttttcatgaactcccagaaacttttccttctgatccacctgagcctctgccacatttccttattgagcctgaagaagcttatattgtgaagaataagcctgtgaacctgtactgtaaagcaagccctgccacccagatctatttcaagtgtaatagtgaatgggttcatcagaaggaccacatagtagatgaaagagtagatgaaacttccggtctcattgtccgggaagtgagcattgagatttcgcgccagcaagtggaagaactctttggacctgaagattactggtgccagtgtgtggcctggagctccgcgggtaccacaaagagccggaaggcgtatgtgcgcattgcatatctacggaagacatttgagcaggaacccctaggaaaggaagtgtctttggaacaggaagtcttactccagtgtcgaccacctgaagggatcccagtggctgaggtggaatggttgaaaaatgaagacataattgatcccgttgaagatcggaatttttatattactattgatcacaacctcatcataaagcaggcccgactctctgatactgcaaattacacctgtgttgccaaaaacattgttgccaagaggaaaagtacaactgccactgtcatagtctatgtcaacggtggctggtccacctggacggagtggtctgtgtgtaacagccgctgtggacgagggtatcagaaacgtacaaggacttgtaccaacccggcaccactcaatgggggtgccttctgtgaagggcagagtgtgcagaaaatagcctgtactacgttatgcccagtggatggcaggtggacgccatggagcaagtggtctacttgtggaactgagtgcacccactggcgcaggagggagtgcacggcgccagcccccaagaatggaggcaaggactgcgacggcctcgtcttgcaatccaagaactgcactgatgggctttgcatgcagactgctcctgattcagatgatgttgctctctatgttgggattgtgatagcagtgatcgtttgcctggcgatctctgtagttgtggccttgtttgtgtatcggaagaatcatcgtgactttgagtcagatattattgactcttcggcactcaatgggggctttcarcctgtgaacatcaaggcagcaagacaagatctgctggctgtacccccagacctcacgtcagctgcagccatgtacagaggacctgtctatgccctgcatgacgtctcagacaaaatcccaatgaccaactctccaattctggatccactgcccaacctgaaaatcaaagtgtacaacacctcaggtgctgtctccccccaagatgacctctctgagtttacgtccaagctgtcccctcagatgacccagtcgttgttggagaatgaagccctcagcctgaagaaccagagtctagcaaggcagactgatccatcctgtaccgcatttggcagcttcaactcgctgggaggtcaccttattgttcccaattcaggagtcagcttgctgattcccgctggggccattccccaagggagagtctacgaaatgtatgtgactgtacacaggaaagaaactatgaggccacccatggatgactctcagacacttttgacccctgtggtgagctgtgggcccccaggagctctgctcacccgccccgtcgtcctcactatgcatcactgcgcagaccccaataccgaggactggaaaatactgctcaagaaccaggcagcacagggacagtgggaggatgtggtggtggtcggggaggaaaacttcaccaccccctgctacattaagctggatgcagaggcctgccacatcctcacagagaacctcagcacctacgccctggtaggacattccaccaccaaagcggctgcaaagcgcctcaagctggccatctttgggcccctgtgctgctcctcgctggagtacagcatccgagtctactgtctggatgacacccaggatgccctgaaggaaattttacatcttgagagacagacgggaggacagctcctagaagaacctaaggctcttcattttaaaggcagcacccacaacctgcgcctgtcaattcacgatatcgcccattccctctggaagagcaaattgctggctaaatatcaggaaattccattttaccatgtttggagtggatctcaaagaaacctgcactgcaccttcactctggaaagatttagcctgaacacagtggagctggtttgcaaactctgtgtgcggcaggtggaaggagaagggcagatcttccagctcaactgcaccgtgtcagaggaacctactggcatcgatttgccgctgctggatcctgcgaacaccatcaccacggtcacggggcccagtgctttcagcatccctctccctatccggcagaagctctgtagcagcctggatgccccccagacgagaggccatgactggaggatgctggcccataagctgaacctggacaggtacttgaattactttgccaccaaatccagcccaactggcgtaatcctggatctttgggaagcacagaacttcccagatggaaacctgagcatgctggcagctgtcttggaagaaatgggaagacatgaaacggtggtgtccttagcagcagaagggcagtattaaccaccatgctggaaggggaaatgaaggacaaaaatgcacagggagtctgtggccgtccaggtgaatcacagctgaggaggaaatccagatgagaccaatgcacttcacaggcaagaatgcagcaggagccagaaggaaaacagatacaactgcccatgtacatgcccactttactcggagatcatcacgggagttaagaaaaattgtgtaaatttgtaccttgaatttagctatcaacctaattttcctcttagttgggctgtatgctgtgtggtacaggatcttacagtttcctaggaaacgctttttattgctatccagatatatggataaactttcttaacaaacccaatttctacaaatgttgtttacatcaaattggacagggatgcagacactgtccatggctcgttctatttttgttcaaatcatttgaagttgaagctgtggacggtttgttgtgtctatttcagattagtaatttacagagaaatcacagacttttgctacaaatcgtgtgcatcaagtgtctcagataatcctcccatcagtgttctgtttctagaacttgtagaaccagtgttactgtttgtatcagggaagtggagaatctaagtgtaaaaaagaaataactaagactcctattccttggagggacccttctggtgccctttgggaataaagctgtagcactgc

SEQ ID NO: 11543 - DNA, 1108 bp, Homo sapiens
  SIMILAR (1)..(417): 661254mologous to Homo sapiens transmembrane receptor UNC5C,accession number AF055634,Smith-Waterman Score=419.
atgagggaagtagaagaggacagtcctcatgaaagcccccttgtacttgtgagtgactgggacgtgggcatcgttactctttggccatgtcttctaggaagctttctgcaccatgtcaccactaggggataccggaggctttcctttgtcctggagaaagcagctgctttccaggatgtggtggtggtcggggaggaaaacttcaccaccccctgctacattcagctggatgcagaggcctgccacatcctcacagagaacctcagcacctacgccctggtaggacattccaccaccaaagcggctgcgaagcgcctcaagctggccatctttgggcccctgtgctgctcctcgctggagtacagcatccgagtctactgtctggatgacacccaggatgccctgaagaagctagttgggccacaactgtcacgacattctgcagagattcccaacctgggattccagaagatctctggacaggtcccttcagtaggcaagcgtctgagtagacagcaggctgatgaagagctgctaataattggtgggcttgctgtgcccagtacacttgcggagtacctgttggtttgtcctgctgatgccccccaaccatgctaaataggtcctgaaggccacacattaacatttggttgaaatgaagcccgttaatatccctacccacagatgaaatacaatgaggtgacaggaaaacctaggaaccatgacttatgaagactggctgttaaagtagcatttatgaaaatggggtaagcacaaggctgataaaactaaaggatctggaagctcatggctagacttagtctgcagagaaaacccacccagttctacacaaagccatctccccacttttcaaaaataggtttttcacactagaattctggaaatgacttcatttggctttcctggcctgtatggatatgggtttacataacattggttacaatatatttattcccccttatgccttattccattaaaaagaaataattagagatgcaaaggaaatcttccaaagtggatcattacagccagagattattacaaataggatatcttaggggtaggaggaaacattacttcattgccc

SEQ ID NO: 11544 - DNA, 660 bp, Homo sapiens
  SIMILAR (133)..(585): 561254mologous to Homo sapiens putative p150,accession number U93563,Smith-Waterman Score=369.
atgatgaagtacactgagacagagctaaagaagaggaaagggattgtggaacatgaggaacagaaagtcaagccaaggaatgcagaggattgtctttatgaacttccagaaaacatccacatttcctcagcaaagaagaccaagaagatgttttccaaccagatgctgagtggcattcctgagttggaccttggcatcaatgctagaataaaaaatatcatttcttcagaggatgccaagcagaacagattttatcatgaggagctcaacgttcccatacagagaaacacagaagaacccaaaaccagactcttgagggtaggcgacacggagaagctaggtgacacagagaaggcagaggctgagaggtcccctcctaaccacaagcatcctgataagcagaaggccactgatgactatcgttataaaaagaaaccatcttcttatggaagcaccccttttcactcctacttatgtgttcttgtggagcacttcctgtcactactacagattggacccaacatcaacatttgcatcatcctttatttcatggtaattaattcctggttcagagtcaaggtaagaacaagaccttgtcttgaagaggaagaagaagaagatgaaggaggaggaggaggaggtgaaggagaagaagaataa

SEQ ID NO: 11545 - DNA, 842 bp, Homo sapiens
  SIMILAR (19)..(648): 941254mologous to Homo sapiens hepatocellular carcinoma- associated antigen 59,accession number AF218421,Smith-Waterman Score=985.
aactcggccgttgtcaccatgccggtcgttcggaagattttccgtcgccgccggggcgactcggagtcagaggaagatgagcaggactcagaggaggttcgattaaaactggaagagaccagagaagtacagaacttgaggaagaggcccaacggggtgagtgctgtggccttgctggtgggagagaaggtacaagaggagaccactctagtggatgatccctttcagatgaagacaggtggtatggtggatatgaagaaactgaaggaaaggggcaaagataagatcagtgaggaggaggacctgcacctggggacatcgttttctgcagaaaccaaccgaagggatgaggatgcagacatgatgaagtacattgagacagagctaaagaagaggaaagggatcgtggaacatgaggaacagaaagttaagccaaagaatgcagaggactgtctttatgaacttccagaaaacatccgtgtttcctcagcaaagaagaccgaggagatgctttccaaccagatgctgagtggcattcctgaggtggacctgggcatcgatgctaaaataaaaaatatcatttccacggaggatgccaaggccccgtctgctggcagagcagcagaacaagaagaaagacagcgagacctccttcgtgcctaccaacatggctgtgaattatgtgcagcacaacagattttatcatgaggagctcaacgcgcccatacggagaaacaaagaagagcccaaggcccggcccttgagagtaggtgacacggagaagccagagcctgagcggtcccctcctaaccgcaagcgtcctgctaacgagaaggcaactg

SEQ ID NO: 11546 - DNA, 300 bp, Homo sapiens
  SIMILAR (1)..(297): 911254mologous to Homo sapiens ribosomal protein L26,accession number X69392,Smith-Waterman Score=467.
atgcccatccaaaaggatgatgaagttcaggttgtacgaggacactataaaggtcaacaaattggcaaaatagtcaaggtttacaggaagaaatatgctatctacattgaacgggtgcagcgggaaaaggctaatggcacaactgtccacgtaggcattcaccccagcaaggtggttatcactaggctaaaactggacaaagaccgcaaaaatatccgtgaacggaaagccaaatcttgccaagtaggaaagcaaaagggcaaatacaaggaagaaacaattgagaagatgcaggaataa

SEQ ID NO: 11547 - DNA, 1290 bp, Homo sapiens
  SIMILAR (1)..(627): 781254mologous to Homo sapiens eukaryotic initiation factor 4AI,accession number D13748,Smith-Waterman Score=792.
atgaaactgattcctcaactctcaccttatacaaaaatcaactcaagatggattaaggacttaaacataagacctgaaactataaatattctagaagacaacattggaaaaccccttctagatattggcttaggcaaggatttcatgaccaataacccaaaagcaaatgcaataaaaacaaagatcaatagctgtgacctaattaaactaaagagatttttcactgcaaaaggagcagtcagagtaaacagacaacccacagagtgggagaaaatcttcacaatccatatgtctgacaaaggactaatatccagaatctataacgaactcaaacaaatcgaaaatctacaagaaatggataaattcctcgacacatacactctcccaagactaaaccaggaagaatttcaatctctgaatagaccaataacaggctctgaaattgaggcaataattaatagcttaccaaccaaaaaaagtccaggaccagacggattcacagctgaattctaccagaggtacaaggaggagctggttttcagctgtctcacggagttagaagcaggaagccacttctttcaaaaggtctgtgaattctttcgggtttcctggtatgttcctatggtagttcatggagtaaaagttcatgacaaggctggaaacacggcttttccttatggaggatttgagagtttcttgaaaactgaagacacgctcctttataagagtgtccccaatcccgggggccgtggaccagtactgctctctggactgttaggaactgggctgcacaacaggagccgatgttcaatcggatggttaccggtcggagaacaggttttccgttatcggtcggcaaataacgttcgggcgcggcgatcaccagaattttatgtttaccgcgataaggttttggatagtccacgccatcaagatcagagacaggactgggtagtcactatatttgcgactgagctggtcgctatttttaaccaggctggaaaattgagtcaatatatcgaaagcggtagtcggcggctttcctggtaccagagctcgattcgtgcttgcgtggaatattcgcccccgcctctaatagtggtgggggcccccctcctcttgaaaaagatacccgagaacagggctctcgtgtttgcccccacctccgagaaacaaacaaaagtgtgcagacacctggacaaaccctatacccgcaccttggggccacagcccgggaacaacagggcacagattacaacacctccggcacaacgggaactggggagttga

SEQ ID NO: 11548 - DNA, 665 bp, Homo sapiens
  SIMILAR (432)..(647): 881254mologous to Homo sapiens NAG13,accession number AF194537,Smith-Waterman Score=335.
gaagaatcaaatagacgcaataaaaaatgataaaggggatatcacccaccggatccccacagaaatagaaactatcatccagagaatactacaaacacctctgtgcaaataaactagaaaatcctagaagaaatggataaattccttgacacatacaccctccccaagactaaacccaggaagaagttgaatctctgaatagaccaataacaggctctgaaattgaggcaataattaatagcttaccaacgaaaaaaaagtccaggaccagatggattcacagccgaattctaccagaggtacaaggaggagcttgtacccattccttctgaaactattccaattaatagaaaaagagggaatcctccctaactcattttatgaggccagcatcatcctgataccaaagcctggcagagacacaacaacaacaaaaaaagaattttagaccaatatccctgatgaacatcgatgcaaaaatcctcaataaaatactagcaaaccgaatccagcagcacatccaaaagcttatccaccatgatcaagagggcttcatccctgggatgcaaggctggttcaacatacacaaatcaataaacgtaatccagcatataaacagaaccaaagacaaaaaccacatgagaatactataaacacctctatgc

SEQ ID NO: 11549 - DNA, 916 bp, Homo sapiens
  SIMILAR (88)..(459): 291254mologous to Homo sapiens SLP-76 associated protein,accession number U93049,Smith-Waterman Score=107.
ttaggtcttgctgaggggctcccttgccaattggcagggcaccctctgcagagaggttcaggcactggttcatctcctcagggcctttgggaaagtccagttcctgctccgtgaagccctgagctagttttaaactcaagtccagaggctgtgtgtgtgtgtgtgtgtgtataggaactttatccctcttaaccgtttccctcaaattattttgctgcctccattggtgcactatgttggtgcaaggccatccctgggaggcacacatcctggactttgttttctcactgccaaatttgctgtgtggccttgagccctggccctctctgggcctcagtttctccagttctttctccaaaagcacccccagaaaaaatggccacgcagaccattcttctgctcgtgagttgctttgtgattgtgtatgttttggactgtgttgtcgcctcctgctcaggactggtgtggaacagtgatccagtccgtcatcgagtccagatgctggtggacaatggctatgccaccatcagtccttcagtgctactcccgtttcggcccacagcgggttgcgtcgggtacaggtcggctccatcgggcctgcttccctccccttcttcggtcacctacgaggtcagctcgtgcacctgtctccccctcacctacccgacagctctagggcagctcggttcgaaacgacccaggaggggtcttgcaaagtcttccatcatcgtgggcaccgctcaggctgaggaacgaactgagctccggggtatcttgacttggcgacgcgtctcgggacccccacatcacacctggatgccctggggtagccctcgcacatctgagtctccccatctgcaaaatgcagctgttgctaattctgctctcccgggcccggcgggaggattaggggcca

SEQ ID NO: 11550 - DNA, 2172 bp, Homo sapiens
  SIMILAR (260)..(337): 531254mologous to Homo sapiens CTG26 alternate open reading frame,accession number U80761,Smith-Waterman Score=100.
atggagggactaaactggttaagtcttctggccttcatctttctcctgtgctggatgctttctgccctcaaacatcagactccaaattcttcagcttttggactcttggacttacaccagtggtttgccacaggctctcggatgaataaaaacaacaaaccttccagtttcatagccataagaaatgctgctttctctgaagtcggcattgggatctctgccaatgccatgctccttctcttccacatcctcacgtgccttctcaagcacaggaccaagcccgctgacctgatcgtttgtcatgtggctctaatccatatcatattgctgctacccacagagttcatagctacagatatttttgggtctcaggattcagaggatgacatcaaacataagtcagttatctacaggcgtaacaggcagtcccagcattttcacagcaccaacctttctccaaaagcacccccagaaaaaatggccacgcagaccattcttctgctcgtgagttgctttgtgattgtgtatgttttggactgtgttgtcgcctcctgctcaggactggtgtggaacagtgatccagtccgtcatcgagtccagatgctggtggacaatggctatgccaccatcagtccttcagtgctacccaggctgactgccccaaacgagtggagagccagtgtgtacctgaatgacagcttgaacaaatgcagcaacggacggctgctctgtgtagacagggggcttgatgaggggccccggtccgtcccaaagtgctctgagtcagagaccgacgaggattacatcgtcctcagggctccgctgagggaggacgaacccaaggacgggggcagtgtggggaatgcagccctggtgtctcccgaggcctctgcagaagaggaagaggagcgtgaggagggaggcgaggcatgtggcctggagaggacaggagctggtggggagcaggttgaccttggtgaactacctgaccatgaggagaaaagcaaccagaaagtggcagctgccaccctggaggaccgcacacaggatgagcctgctgaggagagctgccagatcgtccttttccagaacaactgcatggacaactttgtgacttccctcacaggaagcccctacgagttcttcccaaccaagagcacctctttttgcagggagagctgttctcctttttctgagtcagtgaaaagcttagaatcagagcaggcaccaaagttggggctgtgtgcggaggaggaccccgtggttggggctttgtgtggccagcatggacccttgcaagatggagtggcggagggtcccacagcccctgatgtggtggtcctgccgaaggaggaggagaaggaggaggtcattgtggatgacatgctggccaacccctatgtgatgggagatgagggggaggaggaggaggaggagttcgtggatgacacactggccaacccctatgtgatgggagtgggcctgccaggaagaggaggggaggaggaggaggaggaggaggtcgtggatgacacgctggccagcctctataagatgggagaagaacatcgacacaagggcctggccccactctgggaaggtggccagaaaccgtcccagaaactgcccccaaagaaaccagatctgaggcaggttcctcagcccctggcatcggaggtgccgcagaggaggcaggaaagagctgttgtcactgaagggaggcccctggaagccagcagggccttgccagcaaagcccagggccttcactttataccctcggtcgttctccgtggaaggccaagagattcctgtttccatctctgtgtactgggagccagaagggtcggggttagatgaccacaggataaagaggaaagaggaacatctctctgtcgtgtctgggagtttctcccagagaaaccaccttccatccagcggcacctccacgccttcttccatggtcgacatcccacctcctttcgacctggcctgcatcaccaagaagcccatcacaaagagctctccctctctcctgatcgacagcgactccccggacaagtacaagaagaagaagtcatcctttaagcggttcctggcgctgatgtttaacaagatggagaggccaggcacgatggctcatgcctgtcatcccagcactttgggaagctga

SEQ ID NO: 11551 - DNA, 618 bp, Homo sapiens
  SIMILAR (280)..(615): 851254mologous to Mus musculus ribosomal protein,accession number M76763,Smith-Waterman Score=478.
atgctaatctcaggcttcacccagaccggcttgagtaagaaactgcatttgacaaaatcctcagatgattttcctttgcatactgaagaaggatgtttctggctgcaagtaattaaaggccagactcaaagtggcttccgcaatgaaggaaatttattagctcacaaagctaaaaagtgcaagaggcagtcaggtttcagttctggaggctgggaagttctagatcaaggtgcaggctgtttccacaggaggcctacgtgctgccactgtgctgctgccatgtctctagtgatccctgaaaagttccagcgtattttgagagtattcaaaaccaacattgatgagtggtgtaaaataacctttgccatcactgccattaagggtgtgggtcaaagatatgctcatgtggtgttgaggaaagcagacatcgacctcaccagcagggtgggagaactcactgaggatgaggtagaatgtgtgatcaccatgatgcagaatccacaccagtacaagatcccaggctggttcttgaacagacagaaggatgtaaaggatggaaaatatagccaggccctagccaatggtctggacaacaagctccatgaagacctggagtga

SEQ ID NO: 11552 - DNA, 802 bp, Homo sapiens
  SIMILAR (91)..(552): 531254mologous to Mus musculus ribosomal protein,accession number M76763,Smith-Waterman Score=280.
gggggaggggaattgacggcttaatagaccgcctgtagaattcggcatgggcacgccggccgcttgtgctgcctctcatgtctctagtgagtccctggaaaagttcccagcatatttttccgagtactcaaccccccaaacctcgatggccggcggaaaaatagccctttgcccatcacttgccatttaagggtgtgggcccgaagatatgctcatgtggtgtttgagaaaagcagaccattgacctcaccaaagagggcgggagaactccactgaggatgaggtggaacgtgtgatcaccattttgcaggaatccacgccagtacaagatcccagacttggttcttgaacagacagaaggatgtaaaggatggaaaatacagccaggtcctagccaatggtctggacaacaagctccgtgaagaccttggagcgactgaaagaagattcggcgcccatagagggcttgcgtcacttactggggccttcggtgtccgaggccagcacacacaagaccaactgggccgccgtggccgtcaccgtggggcctccgctggggccaggaggtgacgaacagtggccggctctccccaggcaaggaggcgatgtaggcccggagcccagagggccgcatcgggcgtgcccgaggcaggtctgggcccaacacctggccggccacgccaaggacgtcacgaccccgcccaacaaccatcgagtttttggggccagccggcgtggtggcagcctagagcggtcccgaggaatgaaaagaggccgccttcggaagcggaagtggatgtga

SEQ ID NO: 11553 - DNA, 381 bp, Homo sapiens
  SIMILAR (1)..(276): 891254mologous to Homo sapiens laminin-binding protein,accession number J03799,Smith-Waterman Score=438.
atgcctgatctctacttctacagagatcctgaagagattgaaaaagagcaggctgctgctgaaaacactgtgaccaaggaggaatttcagggtgaatggactgctccagctcctgagttcactgctactcagcctgaggttgcagactggcctgacggcgtgcaggtgccctctgtgcctattcagcagctccctactgaagactggagcactcagcctgccacggaagactggtctgcagctcccactgctcaggccactgaagggggttccacccacggcttcgagggccttgcgcatggcagaggacacggcagcctgctcttcacgctcaactacacctcctgcgagagctttgcccacttgggaggcaggatctag

SEQ ID NO: 11554 - DNA, 225 bp, Homo sapiens
  SIMILAR (1)..(222): 911254mologous to Mus musculus ribosomal protein,accession number M76763,Smith-Waterman Score=353.
atgccagcctggttcttgaacagacagaaggatgtaaaggatggaaaatatagccaggtcctagccaatggtctggacaacaagctctgtgaagacctggagcgactgaaaaagattcgggcccgtagagggctgcgtcacttctggggccttcgtgtccgaggccagcacaccaagaccacaggctgccgtggccgcatcgtgggtgtgtctaagaagaagtaa

SEQ ID NO: 11555 - DNA, 369 bp, Homo sapiens; identical to SEQ ID NO: 7968
  SIMILAR (2)..(364): 911254mologous to Homo sapiens p40,accession number U93569,Smith-Waterman Score=577.

SEQ ID NO: 11556 - DNA, 394 bp, Homo sapiens; identical to SEQ ID NO: 6145
  SIMILAR (807)..(1628): 691254mologous to multiple sclerosis associated retrovirus polyprotein,accession number AF009668,Smith-Waterman Score=947.

SEQ ID NO: 11557 - DNA, 633 bp, Homo sapiens; identical to SEQ ID NO: 6977
  SIMILAR (1)..(489): 591254mologous to Homo sapiens p40,accession number U93571,Smith-Waterman Score=475.

SEQ ID NO: 11558 - DNA, 717 bp, Homo sapiens; identical to SEQ ID NO: 6976
  SIMILAR (286)..(714): 471254mologous to Homo sapiens ORF1; putative,accession number M19503,Smith-Waterman Score=301.

SEQ ID NO: 11559 - DNA, 939 bp, Homo sapiens
  SIMILAR (690)..(613): 691254mologous to Homo sapiens Human secreted protein, SEQ ID NO: 7678,accession number G03597,Smith-Waterman Score=95.
atgaaggaaatgggaactccagatgtgcacattgataccaggctcaacacagctgtctgggccaaaggaataaggaaagtcccaaaccgaatccgtgtttggttgtccaggaaatgtaatgaggatgaagattcaccaaataagctctatactttggttacctatgtacctgttaaccactttcaaaaatctacagatagtcaatgtggaggagaactaatcgctgaccactgcctcctcaagtgggtccctgaccccgtgcccctgactgggagacatctcctagcaggggtcaacaggcacctcatacaggagagccccagctggaatctggcaggtgctcctctggaacaaatcttccagaggaaggagcaggcagcaatctttgctattctgcagcctctgctggtgatatccaggcaaacaggatctggagtggacccccagcaaactccagcagacctgcagaagaggggtctgactgtcagaaggaaaactaataaacagaaagcagtagcatcaacatcaacaaaaaggatgaccatgcaaaaactccatccaaaggatcacaactcctctccagcaagggaacaaaacaagacagagaatgagtttgacgagttgacagaaataggctgcagaaggtgggtaataacaaactcctctgagctaaaggagcatgttgtaacccaatgcaaggaagctaagaatcttgaaaaaatgttacaggaattgctaactagaataaccagtttagagaagaacataaatgacctaatggagctgaaaaacacagcacaagaacttcgtgaagcatatacaattatcaatagccaaactgaccaggcagaagaaaggatatcagagattgaagatcaacttaatgaaataaagggtgaagacaacattagagaaaaaacagtgaaaaggattgaataa

SEQ ID NO: 11560 - DNA, 3452 bp, Homo sapiens
  SIMILAR (109)..(222): 861254mologous to Homo sapiens Human secreted protein, SEQ ID NO: 5576,accession number G01495,Smith-Waterman Score=172.
atgcaggaacaacagcaagcctccagcctgatcaggagcggcaatgggcgcctccctggatcaggagcacagcggacaccctgccatatccggagggatggaagtcagcggcgggtctgcgatgactgcaaacagcagtggtggaaggcaaaatacaacataccatctggcttgcatgcttgcactgcgactctagaagaaacccatattttagactcgggggcacatgtgcaagttttttacaagggtcaactgcatgtcatgagagttccatgtacagattattttgacacccagaagaaccccaacttgtcacacttacatggatctgtcatggcggaaacagcggttatcaatcacaagaaacgtaaaaatagcccgcgaatcgtccagtcaaacgacctcactgaggcggcatatagtctctcccgggatcaaaaacgtatgctgtatctgttcgttgaccagatcagaaaatctgatggcaccctacaggaacatgacggtatctgcgagatccatgttgctaaatatgctgaaatattcggattgacctctgcggaagccagtaaggatatacggcaggcattgaagagtttcgcggggaaggaagtggttttttatcgccctgaagaggatgccggcgatgaaaaaggctatgaatcttttccttggtttatcaaacgtgcgcacagtccatccagagggctttacagtgtacatatcaacccatatctcattcccttctttatcgggttacagaaccggtttacgcagtttcggcttagtgaaacaaaagaaatcaccaatccgtatgccatgcgtttatacgaatccctgtgtcagtatcgtaagcccgatggctcaagcatcgtctctctgaaaatcgactgggacatagaaccgtaccccgctggcctaaaagagcagattaagtctgatgttttcttgttaagttcctgtgtggaagttctccccaatgctgaaattgggttcttaaaatgtctagctattattggattatgggctgtttctctcttcagctacaataattgctttatatgtacaccggcgttcggtcgaagagtatctggtgtcatagaaattgccgatgggagtcgccgtcgtaaagctgctgcacttaccgaaagtgattatcgtgttctggttggcgagctggatgatgagcagatggctgcattatccagattgggtaacgattatcgcccaacaagtgcttatgaacgtggtcagcgttatgcaagccgattgcagaatgaatttgctggaaatatttctgcgctggctgatgcggaaaatatttcacgtaagattattacccgctgtatcaacaccgccaaattgcctaaatcagttgttgctcttttttctcaccccggtgaactatctgcccggtcaggtgatgcacttcaaaaagcctttacagataaagaggaattacttaagcagcaggcatctaaccttcatgagcagaaaaaagctggggccataaacacacaactggttgaaaccctgctctctgactctagaagaatccccgacttcatgtctaaaacaccaaaagcaatggtaacaaaagctaaaattgacaaatgggatctaattaaactaaagagcttctgcacagcaaaagaaactaccatcagagtgaacaggcaacctacagaatgggagaaaattttcgcaacctactcgtctgacaaagggctaatatccagaatctacaaagaactcaaacaaagttacaggaaaaaaacaaccctgtcaacaagtggtggccatgagaagtggagacgaaatctgaaactcaatgttgctctgctgatatggttttgctgtgaccccacccaaatttcatttttaattgtagctgccaaaattcccatgtcatgtgagggatctggtgggagaagaaaccccatgataaccaggcaaacaggatctggagtggacctccagcaaactccagcagacctgcagaagagggactttactggtagaaggaaaactaacaaacagaaaggaatagcaccaacatcaacaaaaattacgtccacatggaaacctcatccaaagggatcacaactgctcgccagcaagggaaccaaaactggatggagaatgagtttgacaaattgacagaagtaggcttcagaaggtggacaataacaaactcctccaagctaaaggagcgtgttctaacccaatgcaaggaagcaacgaaccttgcaaaaaggttagagaaattgctaactagaataaccagtttagaaaagaacaaaaatgacctgatggagctgaaaaacacagcacaagaacttcgtgaagcatacaccagtatcagcggccgaatcaatcaagcagaacaaaggacatcagagattgaagatcaacttaatgaaataaagcgcagaggcgtctccgtgtgtccacaaccatcagaagacaccccgaggagtactgccagggtcccaaaggggatggtccccttccggccccgggtccccttggtcactccacccagagagaaaaaagaagctccttggcttgcatgccttcgcactagggctctaaggatcctcatagaccctccgagccaggtgtgggatatagtctcgtgtgatgcggagaatgaaaccaagttggaaaacactctgcaggatattatccaggagaacttccccaatctagcaaggcaggccaaccgttcagattcaggaaatacagagaacgccacaaagatactcctcgagaagagcaactccaagacacataattgtcagattcaccaaagttgaaatgaaggaaaaaaatgttaagggcagccagagagaaaaggtcaggtaacccacaaagcgaagcccatcagactaacagcagatctctcagcagaaaacctacaagccagaagacagagtgggggccaatattcaacattcttaaagaaaagaatttttcaacccagaatttcatatccagccaaacctaagcttcataagtgaaggagaaataaaatactttacagacaagcaaatgctgagagatttttgtcaccacaaggcctgcccttaaaagagctcctgaaggaagcactaaacattggaaagggacaacccggtaccagcccgctgcaaaatcatgccaaatttgtaaagaccattgaggctagggaagaaacttgcatcaacttaatgtgccaaataaccagctaacattcttaattgacaggatccaaattcacacataacaatattaactttaaatgtaaatggggctaaatgctcccatttaaagacacgaccagcaattgcaattgcttaagagtcaagacccatcagtgtgctgtattcaggagacccatctcacgtgcagagacacacataggctcaaaataaaaggatggaggaagatctaccaagcaaatggaaaac

SEQ ID NO: 11561 - DNA, 421 bp, Homo sapiens
  SIMILAR (1)..(177): 1001254mologous to Rattus norvegicus tropomyosin,accession number L24775,Smith-Waterman Score=296.
tatgaggaagaaatcaagattcttactgataaactcaaggaggcagagacccgtgctgagtttgctgagagatcggtagccaagctggaaaagacaattgatgacctggaagataaactgaaatgcaccaaagaggagcacctctgtacacaaaggatgctggaccagaccctgctttctcctttcaccaccccctccttccctgtgtcttttaagtttccttccctacccagtccccattttctggtaaggtttctaggaggtctgttaggtgtacatcctgcagcttattggcttaaaatgtactctccttttatgtggtctctttggggccgattgggagaaagagaaatcaatagtgcaactgttttgatactgaatattgacaagtgtctttttgaaataaagaaccagtccctcc

SEQ ID NO: 11562 - DNA, 849 bp, Homo sapiens
  SIMILAR (81)..(554): 501254mologous to Mus musculus TAFI68,accession number Y09973,Smith-Waterman Score=356.
  misc_feature (1)...(849): n = a,t,c or g
gcgtccggaagctaagcacattgcagaagaggcagataggaagtatgaagaggtggctcgtaagttggtgatcattgaaggagacttggaacgcacagaggaacgagctgagctggcagactcccgttgccgagagatggatgagcagattagactgatggaccagaacctgaagtgtctgagtgctgctgaagaaaagtactctcaaaaagaagataaatatgaggaagaaatcaagattcttactgataaactcaaggaggcagagacccgtgctgagtttgctgagagatcggtagccaagctggaaaagacaattgatgacctggaagataaactgaaatgcaccaaagaggagcacctctgtacacaaaggatgctggaccagaccctgcttgacctgaatgagatgtagaacgccccagtcccaccctgctgctgctcctccctctgacccagactccgcctgaggccagcctgcgggaagctggacctttaactgagggctgatctttaacatggaaggctgctttctcctttcaccaccccctccttccctgtgtctttttcggccaaactgtctctgcctcttcccggagaatccagctggggtaggaggctggagcacctttgggaaacaacattttaaggggaatgttgaggcacaatggcattaatgtttttaaaaaggcatgttgttgatgtacacattttgtaattacctttttttgttggttttgtagcaaccatttgtaaaacattcccaaataattccacagtcctgaagcagcaatcgaaatcccctttcttaactttttggaangtgaattttcaccttaatgnataatt

SEQ ID NO: 11563 - DNA, 522 bp, Homo sapiens
  SIMILAR (262)..(477): 931254mologous to Homo sapiens acidic ribosomal phosphoprotein (P1),accession number M17886,Smith-Waterman Score= 344.
gatactttgccctttcctcagttgccaccaaggtgcttggtccttccgaggaagctaaggccacattggggtgaggccatcacttcatccagtgactagcaccacctctggcaatgtcagccccacactcgcccgcgccatggcctccatctccgagcttgcctgtgtctacttggccctcattctgcacgatgacgaggtgatcatcatggaggttaatatcaataccctcattaaagcagccagtgtaaatgttgaaccttttggcctggcttgtttggaaaggccctggccaacgtcaacattggaagcctcatctgcaatgtaggggctggtggacctgctctagcagctggtgctgcaccagcaggaggtcctgccccctccattgctgctgcttcagctgaggagaagaaaatggaagcaaagaaagaagaatctgaggagtctgatgatgacatgggctttggtctttttactaaacctgttttataatgtgttcaataaaaagctgactttaaa

SEQ ID NO: 11564 - DNA, 622 bp, Homo sapiens
  SIMILAR (244)..(636): 531254mologous to Mus musculus TAFI68,accession number Y09973,Smith-Waterman Score=292.
ccctttcctcagctgccgccaaggtgctcggtctttccggaggaagctaaaggctgcccgttggggttgagggcccctcactttcatcccggcgactagccaccgcgtaccggccagcgccagcccttacactccgcccggcgccatggcccttctgtctccgtagctcgcctgcatcctactcggccctcatttctgcacggacggatgaggtgacagtcacgggaggataagatcaatgccctcattaaaagcagcccgttgtaaatgttgagccctttttggccatggctttgtttgcaaaggcccctggccaaacgtcaacattgggagcctacatctgcaatgttaggggcccggtggaacctgctgccagccagcctggtgctgcgaccagccaggaaggtccttgccccctccacttgctgctgctccaagctgaaggagaagaaagttggaagcaaagaaaagaaagaatccgaaggaagtcttgaatgatgaacatgggcttttggtctttttgaactaaaacctcttttataaacatgtttcaataaaaaagctggaactttaaaaaaaaaaaaaaaaaaaaaaaaaaaaaaaaaaaaaaagggcggccgct

SEQ ID NO: 11565 - DNA, 678 bp, Homo sapiens
  SIMILAR (26)..(403): 1001254mologous to Homo sapiens histone H2B,accession number Z80781,Smith-Waterman Score=629.
atgcccgtcaccaagctgggccgcttggtcaaggacatgaagatcaagtccctggaggagatctatctcttctccctgcccattaaggaatcagagatcattgactttttcctgggggcctctctcaaggatgaggttttgaagattatgccagtgcagaagcagacccgtgctggccagcgcaccaggttcaaggcgtttgttgctatcggggactacagtggccacgtcggtctgggtgttaagtgctccaaggaggtggccaccgccacccgtggggccatcatcctggccaagctctccattgtccccgtgacaggccgccgtggctctgtgctggtgcgcctcatccctgcacccaggggcactggcattgtctccgcacctgtgcccaagaagctgctcatgatggctggtatcgatgactgctacacctcagcccagggctgcactgccaccctgggcaacttcgccaaggccacctttgatgccatttctaagacctacagctacctgacccccgacctctggaaggagactgtatttaccaagtctccctatcaggaattcactgaccacctcgtcaagacccacaccagagtctctgtgcagcagacccaggctccagctgtggcatacaacatagggtttttatacaagaaaaataaagtgaattaa

SEQ ID NO: 11566 - DNA, 1035 bp, Homo sapiens; identical to SEQ ID NO: 9452
  SIMILAR (13)..(396): 861254mologous to Homo sapiens Histone H2B,accession number AJ223352,Smith-Waterman Score=541.

SEQ ID NO: 11567 - DNA, 1056 bp, Homo sapiens
  SIMILAR (1447)..(3276): 981254mologous to Homo sapiens putative p150,accession number U93574,Smith-Waterman Score=3162.
ggcacgaggcaaaacaccaaatggcggatgacgccggtggcagcggggggggcccgaaggccctggtgggccctgggatgggaaaaccccgttgctttccggcgaggttttcggcattgtcatccggggccggggttcccgcccggtggacggggccggggccgagagccgcggagctcgcggaggcaaaggcccgaggataaagggattgggatgcccgtccaccaagttggggccgctttggtcaaggaccattaaagatcaaagttcccctggaaggagatctatctcttctccctgccccattaaaggaatcaaagattcatgattttctttcctggcgggccctctctcaaaggatgaaggttttgaaggattatgcccagtgcagaagcagacccgtgccgggcaagcgcaacaggtttcaaggccatttgttgctatcgggggactacaaatggcccacgtcgggtctggggtgttaagtgctcccaaggaaggtggccaccggccatcccgtgggggcaatcatcctggccaagctttccattcgtccccgtgcgcagaagggtatttggggaacaaagtattggcaaagccccaacactgtccctttgcaaggtgaacagggcgctgcggctttgtggtggtacgcctcatccctggcacccaggggctctggcatcgtctccgcacctgtggcttaaaaagctgctcatgatggctggtatcgatgactgctacaccctcagccccggggtgcactgccacccttgggcaacttcgccaagggccaccctttgattgccatttttaagaacctacaagctaccttgaccccccgacctctggaagtgagactgtattcaccaaagtttccctatcaaggagttcacttgaccacctcgtcaaagacccacacccagagtcttccgtgcagcgggacctcaggctccagcttgtggctacaacatagggtttttatacaagaaaaataaagtgaattaagcgtgtaaaaaaaaaaacacagggcggccgctctagagtatccctcaa

SEQ ID NO: 11568 - DNA, 322 bp, Homo sapiens; identical to SEQ ID NO: 7927
  SIMILAR (322)..(161): 981254mologous to Homo sapiens ribosomal protein S2,accession number AB007147,Smith-Waterman Score=277.
  misc_feature (1)...(322): n = a,t,c or g

SEQ ID NO: 11569 - DNA, 410 bp, Homo sapiens
  SIMILAR (1)..(105): 1001254mologous to Homo sapiens put. LLRep3 protein (AA 1- 221),accession number X17206,Smith-Waterman Score=179.
  misc_feature (1)...(410): n = a,t,c or g
actgtattcaccaagtctccctatcaggagttcactgaccacctcgtcaagacccacaccagagtctccgtgcagcggactcaggctccagctgtggctacaacatagggtttttatacaagaaaaataaagtgaattaagcgtgnnnnnnnnnnnnnnnnnnnnggggggcccgtttaaaagaacccttggggggcccaaatttaaccggggatgggaaggaaaaatttttttccttaaggggggccgattaaaaacctccttgggaattttgggaaagaaccttttttttgggggggggacaaattggcccaacctccttccaaaatttaaaggctttagggnnnnnnnnnntttttaaggggaaaagggggaaaaacaaccgcgatagccttgtggttaaaaagttg

SEQ ID NO: 11570 - DNA, 315 bp, Homo sapiens; identical to SEQ ID NO: 1088
  SIMILAR (310)..(143): 911254mologous to Homo sapiens put. LLRep3 protein (AA 1- 221),accession number X17206,Smith-Waterman Score=268.

SEQ ID NO: 11571 - DNA, 1262 bp, Homo sapiens
  SIMILAR (425)..(679): 961254mologous to Rattus norvegicus ribosomal protein S2,accession number U92697,Smith-Waterman Score=423.
  misc_feature (1)...(1262): n = a,t,c or g
ggaaatnnngggncgacccacgcgtccgaaaacaccaaatggcggatgacgccggtgcagcgggggggcccggggcccctgtcggcctattgagggggaaaccacgatgtcttgcgcggaggttttaccagggccatactgggacgaccgtcgcgccagccgaccttaaccggggccgaggcacacggagctcgcggaggcaaggccgaggataaggagtggatgcccgtcaccaagttgggccgcttggtcaaggacatgaagatcaagtccctggaggagatctatctcttctccctgcccattaaggaatcagagatcattgatttcttcctgggggcctctctcaaggatgaggttttgaagattatgccagtgcagaagcagacccgtgccggtcagcgcaccaggttcaaggcatttggttgctatcggagactacaatggccacgtcggtctgggtgttaagagctccaaggaggtggccactgccatccgtggggccatcatcctggccaagctctccatcgtccccgtgcgcagaggctactgggggaacaagatcggcaagccccacactgtcccttgcaaggtgacaggccgctgcggctctgtgctggtacgcctcatccctgcacccaggggcactggcatcgtctccgcacctgtgcctaagaagcctgctcatgatggctggtatcgatgactgctacacctcagcccggggctgcactgccaccctgggcaacttcgccaaggccacctttgatgccatttctaagacctacagctacctgacccccgacctctggaaggagactgtattcaccaagtctccctcaacaggaactcactgaccacctcgtcaagacccacaccagagtctccgtgcagcggactcaggctccagctgtggctacaacatagggtttttatacaagaaaaataaagtgaattaagcgtgaaaaaaaaagacaactaaaaaggggccgccgtttttaagggatccctgaggggccccaagtttacccgggcttgcaaggcaaaacctttttccttaaagggggccgtattaaaacctacctgggaatttttggaaaggaccctaattttgggggggggaaaaattgggccaaattactttcggagattaaaagttttagggtaatattaaaattttaaagcgaataaggggtaaaactacttcgtaaacgtttgttgtttaaaaactttgctaacggatgtggattaaagaaaaattg

SEQ ID NO: 11572 - DNA, 684 bp, Homo sapiens
  SIMILAR (223)..(348): 801254mologous to Canis familiaris cyclophilin A,accession number AF243140,Smith-Waterman Score=182.
atggccttcaaagtgggcacaaccctagaatgtggggaagaggccaggaaagagcagtatctagatgaaagcttgtacattgagacaatggaaaaggctggcattgaatgcctgtggcttttccatgcacacagtgaaagcttcaagctgtcggtggatctaccattctggaatctggaggatgatggccctcttctcacagctccactaggcagtgccccaggtggtgacttcaaacaccatgatggcactggtggcaagtccatctatggggagaaatttgatgatgagaaattcatcctgaagaatacaggtcctggcatcttgtccatggcaatgctagacccaacacaaatggttctcagtttttcatctgcactgccaagactgagtggttggatggcaagcatgtggtcttggcaaggtgccttggctggactcccacccatcttccaggtccctcttcctcgcctggtttccctggtgaccaggactcctacagcagggagcaaatgcttttatggatgccgatcaggccaggctgtctcactgcaggccacctcccatgccaccctcgtggctgttgagggcccagtactcacaggtccaaggccactccagggcacacccttggtaaaatctggctgctatgatgatggcacagatgctccctccctagagtga

SEQ ID NO: 11573 - DNA, 816 bp, Homo sapiens
  SIMILAR (1941)..(28): 711254mologous to Homo sapiens putative p150,accession number U93563,Smith-Waterman Score=2109.
gaattcggcacgagggataaccgtgtactattacccctggtcaaccccaccgtgttcttcgacattgccgtcgacgtgtttatcccttgggccgcgtttcctttgagctgtttgcagacaaggtcccaaagacagcagaaaattttcgggctctgagcactggagagaaaggatttgggttataagggttccctgctttcacagattatttcccagggtttatgctgtcaggggtggtgactgtgaagtcaccataatggcacctggtggcaagtcccatctatggggaagaaatttgaaggatgagaacttcatccctaaagcatacgggtcctggcatcttgtcccatggcaaatgctggtacccaacacaaatggttccccagtttttttaacatcttgcactgcccaagactgaagtggttggatggcaagcatggctgggcttggcaaagtgaaagaaggcatgaatattgtggaggccatggagcggctttgggtccaggaatggcaagaccagcaagaagatcatcagcattgcttgactgtgggacaacttcgaattaagttttgactttgtgtttttatctttaaccaccaagatcatttccttctgttaggtcagggagagcaccccctccaccccatttggctcggagtaatcctagaatcttttgtggctcttcgctgcaagttcccttttgggttccatgttttcctttgttccctcccatgcctagctggatttgcagagttaagtttatgattattgaaataaaaacctaattaccatttgtcaaaaaaaaaaaaaaaaaa

SEQ ID NO: 11574 - DNA, 878 bp, Homo sapiens
  SIMILAR (1)..(480): 961254mologous to Homo sapiens laminin-binding protein,accession number J03799,Smith-Waterman Score=781.
atgtccggagcccttgatgtcctgcaaatgaaggaggaggatgtccttaagttccatgcagcaggaacccacttaggcggcaccaatcttgacttccagatggaacagtacatctataaaaggaaaagtgatggcatctatatcataaatctgaagaggacctgggagaagtttctgctggcagctcgtgctgttgttgccattgaaaaccctgctgatgtcagtgttatatcctccgggaatactggccagagggctgtgctgaagtttgctgctgccactggagccactccaattgctggccacttcactcctggaaccttcactaaccagatccaggcagccttccgggagccacggcttcttgtggttactgaccccagggctgaccaccagcctctcacggagtcatcttatgttaacctacctaccattgctctgtgtaacacagattctcctctgcgctatgtggacattgcaacaacaagggagctcactcagtgggtttgatgtggtggatgctggctcgggaagttctgcgcatgcgtggcaccatttcccgtggacacccatgggaggtcatgcctgatctctacttctacagagatcctgaagagattgaaaaagaagagcaggctgctgctgaaaaggcagtgaccaaggaggaatttcagggtgaatggactgctcctgctcctgagttcactgccactcagcctgaggttgcagacttgtctgaaggtgtacaggtgccctctgtgcctattcagcagttccctactgacgactggagcactcagcctgccacggaaaactggtctgcagctcccactgctcaggccactgaatgggtaggagcaaccactgactggtcttaa

SEQ ID NO: 11575 - DNA, 1677 bp, Homo sapiens
  SIMILAR (895)..(2172): 831254mologous to Homo sapiens putative p150,accession number U93572,Smith-Waterman Score=1788.
atgtctggagcccttgatgccctgcaaatgaaggaggaggatgtccttgcagcaggaaccaacttaggtggcaccaatcttgacttccagatggaatggtacatctgtaaaaggaaaagtgatggcatccacatcataaatctgaagaggacctgggagaagcttctgctgtcagctcgtgccattgttgccattgaaaaccctgctgatgtcagtgtcatatcctccaggaatactggccagagggccatgctgaagtttgttgctgccacaggagacactccaattgctggctgcttcactcctggaactttcactaaccagatccaggcaaccttctgggagccacgggttcttgtggttactgatcccagggctgaccaccagcctctcatggaggcatcttatgttaacctacctaccattgctctgtgtaacacagattctcctttgcgctatgtggacattgccatcccatgcaacaacaagggagctcactcagtgggtttgatgtggtggatgctggcttgcaaagttctgcacatgtgtggcaccatttcctgtgaacacctgtgggaggtaatgcctgatctctacttctacagagatcctgaagagactgaaaaagaaaagcaggctgctgttgaaaaggctgtgaccaaggaggaatttcagggtgaatggactgctctagctcctgagttcactgctactcagcctaaggttgcaggctggtctgaaggagtgcaggcaccctctgtgcctattcagaggttccctacggaagactggagtgctcagcctgccacggaagactgggggcaaatcctcgaacgcgaacctgatctcatgtcacagaagcaacttgccatgaaatccgctaatgcgctgcgactcgcccaccaggggaggaatggcagagaagaagctctgaaaagcatctcctctacaaaggcgatgagaacaatggcaaaaatggtcaaagtcaactttttcagaactctggaaattatccaaaggcttgcaacaattgaaggaatgtttaagaaaaacagcctgaatctcagtcctcagatcgaccagcccaagaaacatctcaccaatttcaaatccgtccatgatttttcaacaaccgtgatgctgtcagccattgtagagatccctttgccaaatcgcaaacttgccaaatattactgtgaccaatgttattgtggaagaaacaggaagagagttataactctctgtaccaagctattgtctggaactaaagggtcttcccacattccttgtgctaactctccaggtttcctgggcaaggcaggcttccttagaattaggggtaccgagctggacctcgtagtcattaccggtttgcattttggggatcccgaaagctttggcccagatgggcaggaggccacagtgcagagcccgacttgggcccccgacaagaccgcagaatttgagcgggtgccaagagaaccagtgaagaaagtgaacccaaatcccagaccgctgggcaccactaacccggctttctgtccccgcctggacagcagggaccaactctgtccctgccccattccaccaactttccaaagcttctgcgagcagcgccctagagggctcttccggcggggacggaggaagaggggcggcaagccggaggctgcctag

SEQ ID NO: 11576 - DNA, 1189 bp, Homo sapiens
  SIMILAR (274)..(1683): 951254mologous to Homo sapiens putative p150,accession number U93572,Smith-Waterman Score=2335.
atgcttgaggcagtgctggaagagagccctcgggaggaggcggctttctcctgggtcatgaaggggaatctggctgcaggaaaaaccatccaagcgcaagacagagatgctgtgggcatcctcagttccagaactggggaatccatggaaaacctgcagaaaaacttgctgcccaagcagaggaggcgaacgagggaaactttcacaatgtctggagcgcttgatgtcctgcaaatgaaggaggaggatgtccttaagttccttgcagcgaggaacccactttaggtggcaccaatcttgacttccagatggaacagtacatctataaaaggaaaagtgatggcatctatatcataaatctcaagaggacctgggagaagcttcttgctggcagctccgtgcaattgttgccattgaaaaccctgctgatgtcagtgttatatcctccaggaatactgggccagaagggctgtgcttgaagttttgctgcctgccactggagccactccaattgctggcccgcttcactcctgggaaccttcacttaaccagatccagggcagccttccgggaagccacgggcttccttgtggttacctggaccccagggcttgacccaccagcctctcacggaggcaatcttatgtttacctacctaccattgcgcctgtgtaacacagattcttcctcttgcgctatgtggacattgccatcccatgcaacaacaagggagctcactcagtgggtttaatgtgggtggatgctgggctcgggaagttctgcgcatgcgtgggcaccatttcccgtgaacacccatgggaaggtcatgcctgatctgtacttctacagagatcctgaagagattgaaaaagaagagcaagctgctgctgaaaaagcagtgaccaaggaggaatttcagggtgaatggactgctcccgctcctgagttcactgctactcagcctgaggttgcagactggtctgaaggtgtacaggtgccctctgtgcctattcagcaattccctactgaagactggagcgctcagcctgccacggaagactggtctgcagctcccactgctcaggccactgaatgggtaggagcaaccactgactggtcttaagctgttcttgcataggctcttaagcagcatggaaaaatggttgatggaaaataaacatcagtttct

SEQ ID NO: 11577 - DNA, 399 bp, Homo sapiens
  SIMILAR (1)..(90): 861254mologous to Homo sapiens Human secreted protein, SEQ ID NO: 7284,accession number G03203,Smith-Waterman Score=154.
atgagagaggacacaaacaaatggaaaaacattccatgctcatggataggaagaatcaacatcgtgaaaatggccatactgcccaaactacccccaacaaaccaagaagcaaagaaagagctgagacgagaagtgaccggcggcggcggcggctgctatggcagatttgttggggcggtgggtttattacaggagtattcgtggtcggatcggaaggctcaagcttatgctttttcctctttccgctttcctccctcctcctcctcccccctgcagcgcagacctgtcgcagccagagagctgtcatttcagtaccgggattcagaattgatccagtccgcagcggagggggcacatcccagctaccgagctgctgagtgtctctggctggaacaatag

SEQ ID NO: 11578 - DNA, 570 bp, Homo sapiens
  SIMILAR (40)..(288): 391254mologous to Mycobacterium leprae u1756i,accession number U15180,Smith-Waterman Score=98.
atgatgatgacgatgatgattatcatcgtcatcatccctattttacatctgaggaaatggaggcacaaagatgttaacttgtccagtgtaccagggaaagccaggagagccaacagcagttccacaccaacccagctcaggaaggcggaccgaacagcggcacagaaagcagcttgtacagtcagcaaccctgaaacaaacgctcctctccaatgcaatgccaatcggactccttcgccaggagtaaacctagccagcagcaggaatgaggattccagaggagaaacgtggaaaactcaaaaagcagaattgggaaaagaaggttccagggaaatctgcctcctcctcggggccctcttggtgtccgtcagcttctggacactcttctctgagcacctcaggggaaagacaaggatgacagtaggaaataaggcaggtcttacagcacatagaggtctaaagaaaaacatgcgtctgcatttcagaggaacattctatgtcaatgacctctctgaatatggagccccagaaaaaaagaaagaagagccagaccctaaaggcagagactag

SEQ ID NO: 11579 - DNA, 388 bp, Homo sapiens
  SIMILAR (1)..(225): 1001254mologous to Homo sapiens interferon-inducible protein,accession number X84958,Smith-Waterman Score=379.
tgtctgggcttcatagcattcgcctactccgtgaagtctagggacaggaagatggttggcgacgtgaccggggcccaggcctatgcctccaccgccaagtgcctgaacatctgggccctgattctgggcatcctcatgaccattggattcatcctgttactggtattcggctctgtgacagtctaccatattatgttacagataatacaggaaaaacggggttactagtagccgcccatagcctgcaacctttgcactccactgtgcaatgctggccctgcacgctggggctgttgcccctgccccccttggtcctgcccctagatacagcagtttatacccacacacctgtctacagtgtcattcaataaagtgcacgtgcttgtga

SEQ ID NO: 11580 - DNA, 627 bp, Homo sapiens
  SIMILAR (9)..(374): 971254mologous to Homo sapiens 1-8D,accession number X57351,Smith-Waterman Score=610.
ggcacgagaacagcggccagcctcccaactacgagatgctcaaggaggagcaggaagtggctatgctgggggcgccccacaaccctgctcccccgatgtccaccgtgatccacatccgcagcgagacctccgtgcctgaccatgtcgtctggtccctgttcaacaccctcttcatgaacacctgctgcctgggcttcatagcattcgcctactccgtgaagtctagggacaggaagatggttggcgacgtgaccggggcccaggcctatgcctccaccgccaagtgcctgaacatctgggccctgattttgggcatcttcatgaccattctgctcaccgtcatcatcccagtgttggtcgtccaggcccagcgatagatcaggaggcatcattgaggccaggagctctgcccgtgacctgtatcccacgtactctatcttccattcctcgccctgcccccagaggccaggagctctgcccttgacctgtattccacttactccaccttccattcctcgccctgtccccacagccgagtcctgcatcagccctttatcctcacacgcttttctacaatggcattcaataaagtgtatatgtttctggtaaaaaaaaaaaaaaaagtcg

SEQ ID NO: 11581 - DNA, 623 bp, Homo sapiens
  SIMILAR (49)..(366): 961254mologous to Homo sapiens 1-8U,accession number X57352,Smith-Waterman Score=541.
tgagaaccatcccagtaacccgaccgccgctggtcttcgctggacaccatgaatcacactggccaaaccttcttctctcctgtcaacagtggccagccccccaactatgagatgctcaaggaggagcacgaggtggctgtgctgggggcgccccacaaccctgctcccccgacgtccaccgtgatccacatccgcagcgagacctccgtgcccgaccatgtcgtctggtccctgttcaacaccctcttcatgaacccctgctgcctgggcttcatagcattcgcctactccgtgaagtctagggacaggaagatggttggcgacgtgaccggggcccaggcctatgcctccaccgccaagggccttgaacatctgggccctgattctgggcatcctcatgaccattctgctcatcgtcatcccagggctgatcttccaggcctatggatagatcaggaggcatcacatgaggccaggagctctgcccatgacctgtatcccacgtactccaacttccattcctcgccctgcccccggagccgagtcctgtatcagccctttatcctcacacgcttttctacaatggcattcaataaagtgcacgtgtttctggtgaaaaaaaa

SEQ ID NO: 11582 - DNA, 2207 bp, Homo sapiens
  SIMILAR (3343)..(5514): 991254mologous to Homo sapiens unknown,accession number AF148856,Smith-Waterman Score=3780.
ggtctgcctgtttccatgccaccatcaggggagtgagcacggggaataatcagccaggcagcctcactcagcctcacctcggctccggagatcgttctggagctgagtggtgacgtcagcagcagggctgagcacaaacaacaaggccaggcgccaagacgaccaggcgaggggggcccgggggacagcaccactgcacggtgccctgaagggggagcaggtgccacggcacttccccgagaccgcatgcgggggctgcggctggaatgggacctgcaccccactcaggtctgcctgaagggctgtcagtcaagaaggaagacgggacccagcaaacagaagccacgacctcccagcggccctggacacacatgaccaacgcaccagcagtaaacaaaagggcctgcaagggtcacccccggggccacccctcccagcaggtggtgatggatggcccgcagctgtgcacagtggggcagtcctgcttaggttcagcagcaggttcccagcagacagaaacgctctggtggccctggaggccgtggtgggcagagaacaaatccaggcggcccctcccctctatgcctaaccccagcatctgcagggaatcacccactgtcttcaacctcagggaggaagccccgacacaatctgacttgcaaagaggctccccagcgaagctcccagcaccgcccttgcggctgcctgcacttccgccatgcaccctggattccgaggctcccggggccactgacctcgaagcttatgatggtcgtggtgtgttttttgcccgcggcccagaccgcttcctgggctctctccagccgccctcctggtctcccctgggaccgttccgaggcctggtcaaagctgaggacaaggcccgagttcaccgctccaagaagcaggaggggccaggccctgaggacgcccggaagaaggtgccagctgcccccatcactgtcagcaaggaggcaccggcccctgtggcccacccagctccaggtggccctgaagagcagtggcagagggccatccatgagcgcggggaagccgtctgccccacctgcaacgtggtcacccggaagactctcgtggggcttaagaagcacatggaggtgtgtcagaagcttcaggatgcactcaagtgccagcactgccggaagcagttcaagtccaaagccggcctcaactaccacactatggccgagcacagtgccaagccctctgacgccgaggcctccgaagggggcgagcaggaggagcgcgagaggctgcgcaaggtgctgaagcagatgggacggctgcgctgcccccaggagatcctttcagctattggcgccctggaggatggacgggaaggagaacgtggccggtgggtggaggatagcactggtgcctggccccatgaggctgcaatgcggccacattctcagtgggtcatgtctgaatgcgagagcagctgtgttctgcgagtgggagtggtgggagggcctgtgagtaagggctccggaaggcccatcattgggacctggtgccgccagtgggagcaggaggagcctgtgccttctctggcgccagtcatcccagatgccactcagggcttggctgggtttgccagctctccaggttggcactgctacaagaagactcaggaaactctttcacaggcaggacagaagacttcagctgccctgtccacagtgggctctgccatcagcaggaagcttggagacatgagaactggtcttctggcttttggatctcagggagtgcctccctgtagctctgacccaatcctggcaaagatgggtgcaggcttcctaaaggaccgccgtgaggctgagcagttgctagtcatgatcttgcgagagcctcctgttgagtcaggacttgaggagactggagacagtgctgctgtccccggtggtgtgcggactggaggagccgtcctggagggtcttcccctgctgggcctgactgagcacgagcagggggcctcccctggggctccccgaggagggctgaactctgcgaccttcaagtcgtttgaggaccgagttgggaccataaaggtaattgtacctggactgtttgatggtcttggcaagtctaaggttgtgggtgacagagagaacggcagtgacaacctcccttcctcagcggggagtggtgacaagcccctgtcggatcccgcacctttctaa

SEQ ID NO: 11583 - DNA, 759 bp, Homo sapiens
  SIMILAR (31)..(264): 681254mologous to Homo sapiens fumarylacetoacetase (AA 1- 349),accession number X51728,Smith-Waterman Score=250.
ttcaacattctgatgggctaacatgattcccaaagggagcctgggctttggctcaatattctttcaaaccctccgccctgtccacttcctgcacccctaggaaggacagcacagtgatctgtttcatctacaaacgtgagtgtaaaacatctgtgtacaagcctgtgttcttcaaattcatgcaaacgcggcagccacatctccgcgtggatgggcaggactgtcctcagggccggctctgctcatccgcgcctggctggctgctccgctgaacacgagctgcggctgtgatgctgaggctgggttgcgtgtgctctgcagcgggttgaaagcaaccaccaggcttaggaaaaggtgcggggatccgacagggggcttgtcacccactccccggcttgaggaagggaggttggtcactgccgttctctctgtcacccacaaccttagactttatggtcccaactcggtcctcaaacgacttgaaggtcgcagagttcctcatgtctccaagcttcctgctgatggcagagcccactgtggccagggcagctgaagtcttctgtcctgcaggtctgactgggtcactttctcattccactctccaagtttctcagaagttttcacataggcgctagagacctgcacgtcatgccagctcctggacaggttctgtttcagctcccccagggtggagaggcccagcctcctcttgagctctccacagtgcctctccttggctgccaggacctggcgcagagt

SEQ ID NO: 11584 - DNA, 284 bp, Homo sapiens
  SIMILAR (16)..(45): 631254mologous to Homo sapiens Human secreted protein, SEQ ID NO: 7063,accession number G02982,Smith-Waterman Score=40.
  misc_feature (1)...(284): n = a,t,c or g
cactgactaggccatgtgggcctggaaccaggctggccagtgcccctggctagggcagtattgtnagagggacctggagtatcattgcctgaaagtcccaaggcatcagctgggacaggtttgaggaggtcactctctgcagagaaccattcaccccntgccagcagtcatctgcccctgcagttcctggacactcatggagcgggtactctgtggggactgtaacctggccanttctttggcctaagccagttccatacggctggtcagaaggcatggacact

SEQ ID NO: 11585 - DNA, 2541 bp, Homo sapiens
  SIMILAR (78)..(1): 801254mologous to Homo sapiens Human secreted protein, SEQ ID NO: 7217,accession number G03136,Smith-Waterman Score=109.
atggaggccctgggacctgggggcgaccgcgcctccccggcctcgtccactagcagcctggacctgtggcatctgtccatgcgcgcggactcggcctacagctctttctccgcagcctccggcggccccgagccgcgcacgcagtcgccggggacagacctccttccttacctagactgggactacgtgcgtgtggtttggggcggcccgggccccgccccgcccgacgctgccctttgcacatccccgcggccccggcccgcggttgcagcccgcagtgggccgcagccaacagaggtcccggggaccccgggaccactgaacaggcaggccaccccgctgctgtacgcgctggcggccgaggcggaggccgcggcgcaggctgccgagccgcccagcccgccggcctcgagggccgcctaccgccagcggcttcagggcgcgcagcggcgagtgctccgggagacgtcgttccagcgcaaggagctccgcatgagcctgcccgcccgtctgcggcccactgtcccagcgcggcccccggcgactcacccgcgctccgcctcgctcagccacccgggcggggagggggagccggcgcgctcccgggctcccgcgccaggaactgccggccggggtcccctcgccaaccagcagcggaagtggtgcttctcagagccaggaaagctggatcgtgtgggtcggggcggtgggccggcgcgggaatgcctgggtgaggcctgctccagctctggcctccctgggcccgagcccttggagttccagcatccggcgctggctaagtttgaagatcacgaggtcggatggctgcccgagacgcaaccccaaggctccatgaacctggactccgggtccttgaagctcggtgatgccttcaggcccgccagtcggagtcggagcgcttcaggcgaagtcttgggttcctggggaggatcaggagggaccatacccattgtccaggtatggaagtcaggagatgcaggctgtgtccatgcctctgaccagccgtatggaactggcttaggccaaagaactggccaggttacagtccccacagagtacccgctccatgagtgtccaggaactgcaggggcagatgactgctggcagggggtgaatggttctgtaggtatttccaggcccacaagccacacccccactgggactgcaaatgataacatcccaactattgaccccactggactgaccaccaatccccccacagctgcagagagtgacctcctcaaacctgtcccagctgatgccttgggactttcaggcaatgatactccaggtccctctcacaatactgccctagccaggggcactggccagcctggttccaggcccacatggcctagtcagtgcctcgaggagctggttcaggagctggccagattagatccctctctatgtgaccctcttgcttcccagcccagcccagagccacccctgggcctgctggatggactgattcctttagcagaggtccgggctgcaatgcggcctgcctgtggggaggctggagaggaggctgccagtacttttgagccagggtcctatcagttcagcttcacccagctcctgccggctcctcgggaggagacaaggcttgaaaaccctgccacccaccctgtgcttgaccagccatgtgggcaggggctccctgcaccaaacaacagcatccagggcaagaaagtggagctggccgcccgcctccaaaagatgcttcaggaccttcacacggagcaggagcggctgcagggggaggcacaagcgtgggccaggcgccaagcggctctggaggctgcagtgcgccaggcctgtgcccctcaggagctggagcggttcagccggttcatggccgacctagagcgcgtgcttggccttctgctgctgctgggcagtcgcctggcgcgcgtgcgccgcgccctggcccgggcggcctcagacagcgaccctgatgagcaggcctccctgctgcagcgactccggctcctgcagcggcaggaggaggacgccaaggagctgaaggagcacgtagcgcggcgcgagcgggccgtgcgggaggtgctggtgcgagcactaccggtggaggagctgcgcgtctattgcgccctgctggcgggcaaggccgccgtcctggcccagcagcgcaacctggacgagcgcatccgcctccttcaggaccaactggacgccatcagggacgaccttggccatcatgccccagataccactgggtcagccaggcctgaggcgggcagtcgagggtgggagctgaagttttctcccttccatatcgttatttctccagagggcaagaatgagctcaccacatttgttccgttatcagcacctcagacttcaagactttgtggggaccagaagcccggtgaactgacccttcaggatactgccagcagagggcgctgtcctaatggtgaaagctggtacctacgcttcgccattcgcagcttctccagcttaccaggccctctgggccagccacagggactttga

SEQ ID NO: 11586 - DNA, 1629 bp, Homo sapiens
  SIMILAR (404)..(535): 1001254mologous to Rattus norvegicus protein inhibitor of neuronal nitric oxide synthase,accession number U66461,Smith- Waterman Score=224.
atggacaattctcttggaaattttctcattcctgttcactggcttgcaagtactctgtgctcctcagggagcccgttaaagaatactgctctctgcagagacacgaaaggatcctcaaggcacgtcttcttagcttcccatgaaagccacaagttactcaggacagaactgcctttgcagaattacagggaagggctgggtgggcagaaagccccctcctctggtagtgatgggagtgggttttgtctgcacaggagactgtgtctacctgcctggaagaaggagtctcacccagaacagggctgcacacagtcaagggcagacagagcagcccggacttcctacttgacagctcagaggaggaagcaggcgttgccagtcctgcgaaaggatagcagcaaaatcagcacaacatcacttctgttaccagaaaggggtcccaatccagaccccaagaaagggttcttagattctcatccaagaaataattcagggcaacctccgctgctgatacccaggcaaacagggtctggagtggacctccagcaaactccaacagatctgcagctgaggatcctgactgttagaaggaaaactaaccaacagaaaggacatccacaccaaaaccccatctgtacgtcaccatcaccaagaccaaaggaacgcagctcctcatcagcaacggaacaaagcaggatggagaatgactttgacgagttcagagaagaaggcttcagacgatcaaactactccgagctaaaggaggaagttcgaacccatggcaaagaagatattatacaggagaacttccccaatctagcaacgcaggcaaacattcaaattcaggaaatacagagaacgccacaaagatactcctccagaagagcaactccaagacacataattgtcagattcaccaaagttgaaatgaaggaaaaaatgttaagggcagccagagagaaagaaatacaaactaccatcagagaatactataaacacctctacacaaataaactagaaaatctagaagaagcggataaattcctcaacacatacaccctcccaagactaaaccaggaagaagttgagtctctgaatagaccaataacaggatctgaaattgaggcaataattaatagcataccaaccaaaaaaagtccaggaccagatggattcaaggccgaattctaccagaggtacaaggaggaactggcaccattccttctgaaactattccaatcaatagaaaaagagggaatcctccctaactcattttatgaggccagcatcatcctgataccaaagcctggcacagacacaacagaaaaagagaattttagggcaatatccctgatgaacattgatgcaaaaatcctcaataaaatactggcaaatcgaatccagcagcacatcaaaaagcttatccaccatgatcaagtgggcttcatccctgggatgcaaggctggttcaacatatgcaaatcaataaacataatcaaacatataaacagaaccaatgacaaaaaccatatgattatctcaatagatgcagaaaaggcctttgacaaaattcaacaacacttcgtgctaaaaactctcaaggtattgatgggacatatctcaaaataa

SEQ ID NO: 11587 - DNA, 1464 bp, Homo sapiens
  SIMILAR (210)..(371): 981254mologous to Rattus norvegicus protein inhibitor of neuronal nitric oxide synthase,accession number U66461,Smith- Waterman Score=282.
atgaggggagccacagaagaccgaaggcaaaatgcagagaggatgggaaatggggaggtggaacacagttcctcaccagcaacggaacaaagctggactgagaatgactttgacgagttgagagaagaaggcttcagacgatcaaactactccaagctacaggaggaaattcaaaccgaaggggaagaagttaaaaactttgaaaaaaatttagatgaaagtataactagaataatcaatacagagaagtgcttaaaggagctgatggagctgaaaaccaaggctcgagaactacgtgaagaatgcagaagcctcaggagccgatgcgatcaactggaagaaagggaagaagttgaatctctgaatagaccaataacaggctctgaaattgtggcaataatcaatagcttaccaaccaaaaagagtccaggaccagatggattcacagccgaattctaccagaggtacaagggggaactggtaccattccttctgaaactattccaatcaatagaaaaagagggaatcctccctaactcattttatgagggcagcatcatcctgataccaaagctgggcagagacacaaccaaaaaagagaattttagaccaatatccttgatgaacattgatgcaaaaatcctcaataaaatactggcaaaccgaatccagcagcacatcaaaaagcttatccaccatgatcaagtgggcttcatccctgggattcaaggctggttcaatatacacaaatcaataaatgtaatccagcatataaagagaaccaaagacaaaaaccgcatgattatctcaatagatgcagaaaaggcctttgacaaaatccaacaacgcttcatgctaaaaactctcaataaattaggtattgatgggacatatctcaaaataataagagctgtctatgacaaacccacagccaatatcatactgaatgggcaaaaactggaagcattccctttgaaaactggcacaagacagggatgccctctctcaccactcctattcaacatagtgttggaagttctggccagggcaattaggcaggagaaggaaataaagtgtattcaattaggaaaagaggaagtcaaattgtccctgtttgcagatgacatgattgtatatctagaaaaccccactgtctcagcccaaaatctccttaagctggaaagcaacttcaggaaagtctcaggatacaaaatcaatgtacaaaaatcacaagcattcttaaacaccaataacagacaaacagagagccaaatcatgagtgaactcccattcacaattgcttcaaagagaataaaatacctaggaatccaacttacaagggacgtgaaggacctcttcaaggagaactacaaaccactgctcaaggaaataaaagaggatataaacaaatggaagaacattccatgctcatgggtaggaataatcaatatcgtgaaattatag

SEQ ID NO: 11588 - DNA, 3129 bp, Homo sapiens
  SIMILAR (206)..(535): 991254mologous to Homo sapiens 30-NOV-1993 Human SIII 15 kDa subunit cDNA,accession number Q90526_cd1,Smith-Waterman Score=567.
ttaacgggatcctctagagtcgacctgcaggcatgcaagcttggcactggccgtcgttttacaacgtcgtgactgggaaaaccctggcgttacccaacttaatcgccttgcagcacatccccctttcgccagctggcgtaatagcgaaaaggccccgcaccgatcgcccttcccaacagtgtgcccagcccatgaaccagtcaacctgccaatctgaaccctcaggcgaccactcgcatccctaacagatattgtggtattagtttgcttcattgcaccctcaacgtcacttccgtagttttctaatgttccacccttgtcaagcctccatccggactggttaaatacatagttattcgactgaatcgcgttaccaatcattgcgttagtaataaatccatcctttatgatcgcgctacttagaataacttggccattctcaacaacgaatgggtactgagtctgaccattcatccctgtcattattgcaaatcgtgatgcctcaaacaaaatctgcgccttaactgctgcgctggggtctcctcccacagtgttgaagctttgtttttgttgctgtttgcaataaattttgtcatggctgactctttggtctatactgcgtttatacattgtaacactcaccgggaagatctgtagtctcacttctgaagccagcgaagccacgagcccaccgagaggaacgaacaactccagaagcgtcgccttagcagttgtaacacttgtctggagagtctgcagtttcatttttgattcaaaagctttcatcttagcttttgccttttttttttcacattggttttctattctccctttccctccacaacacggcgctactctctggtatttttggggagatttcgagtgttctaggggacccaggaacatccacactgacgaccgagcaaggcttgttccaatgacagagagaggaggtcctccacagggaggtgaaccggcaaggacaaggagtccgcgacaaggaggaaggggcggtatggaaggcggggaatagtatccctgtccgccacacttaggcgggcaagaaagaaaaccgggatgacaggcagggcgaggcaaaggttggagatgtgacgcggccgcaaacgctaggagctccctggagaagtcaatggaccaccccaagctgaatcctaagaaggcagagacgaggcttggtctgcgaggaatgttagtccgctgaaactgcgatctgctatcatcattatcatttttgtcatcatcatagttttcattatcattattatccattggcatgccacacgctaacaagcacagtccttgatcatggtggataagctttttgatgtgctgctggattcggtttgccagtattctattgaggatttttgcatcaatgttcatcaaggatattggtctaaaattctcttttttggttgtgtctctgccaggctttggtatcaggatgatgctggcctcataaaatgagttaggaaggattccctctttttctattgattggaatcgtttcagaaggaatggtaccagttcctccttgtacctctggtaaaattcagctgtgaatccatctggtcctggactctttttggttggtaagctattgattattgccacaatttcagctcctgttattggtctattcagagattcaacttcttcctggtttagtcttgggagggtgtatgtgtcgaggaatttatccatttcttctaggttttctagtttatttgcatagaggtgtttgtagtattctctgatggtagtttgtatttctgtgggatcggtggtgatatcccctttatcattttttattgcatctatttgattcttctctcttttcttctttattagtcttgctagcagtctatcaattttgttgatcctttcaaaaaaccagctcctggatttattaattttttgaagggttttttgtatctctatttccttcagttctgctctgattttagttatttcttgccttctgctagcttttgaatgtgtttgctcttgcttttctagttcttttaattgtgatgttagggtgtcaattttggatctttcctgctttctcttgtgggcatttagtgctataaatttccctctacacactgctttgaatgtgtcccagagattctggtatgttgtgtctttgttcttgttggttttaaagaacatctttatttctgcgttcatttcgttatgtacccagtagtcattcaggagcaggttgttcagtttccatgtagttgagcggttttgagtgagtttcttaatcctgagttctactttgattgcactgtggtctgagagacagtttgttataatttctgatattttacaattgctgacgagagctttacttccaactatgcagtcaattttggaataggtgtggtgtggtggtagttctcgagccttggctttcagctccatcagctcctttaagcacttctctgtattggttattctagttatacattcttctaaatttttttcaaagttttcaacttctttgcctttggtttgaatttcctcctgtagctcggagtagtttgatcgtctgaagccttcttctctcaactcgtcaaagtcattctccgtccagctttgttccattgctggtgaggaactgcgttcctgcaaggaaggactagttgttgcttcagctattacaagtgcattcagcagacgatccacaactgtcaggactttcagggattgtttcagctgcagagctgcctgcccaagatcacatcctttttgaggctggtcctgataacagtggataacggctttaacggccagaaggtcagcgcagtcccggatgaggacgagtagaacggtaacggccatggggcggttggccttccttctaccagaccttgatgtgggaagagagaaatggagtaacaagccacatttggcgctttggagatgcccaccacgctttgggaagatgtaccagcgtttatagaaggcccgagtgtataaggtgagaaagctactctcagcttccccgaaaacttttacaagaaaacatttgccacatctagcccctccagatgtaaagaagctgccgatgtatgatagactaagaatatcacacat

SEQ ID NO: 11589 - DNA, 583 bp, Homo sapiens; identical to SEQ ID NO: 3798
  SIMILAR (283)..(504): 951254mologous to Homo sapiens putative p150,accession number U93563,Smith-Waterman Score=356.

SEQ ID NO: 11590 - DNA, 906 bp, Homo sapiens
  SIMILAR (416)..(508): 481254mologous to Neisseria meningitidis FKBP immunophilin homolog,accession number U01191,Smith-Waterman Score=73.
ttacaatttggcatgtttttgcagtggctggtaccggttgtacctttccatgtttggtgcttccttcaggagctgttttagggcaggcctggtggtgacaaaatctctcagcatttgcttgtctgtgaagtactttatttctccttcacttatgaagcttagtttggctggatatgaaattctgggttgaaaattcttttctttaagaatgttgaatattggcccccactctcttctggcttgtagagtttctgctgagagatcagcagttaatctgatgggcttccctttgtgggtaacccgacctttctctctggctgcccttaacattttttccttcatttcaactttgctgaatctgacaattatgtgtcttggagttgctcttcttgaggagtatctttgtggtattctctgtatttcctgaatttgaatgttggcctgccttgctagattggggaagttctcctggataatatactgcagagtcttttccaacttggttccactctccccgtcactttcaggtgcaccgattagacgtagatttggtcttttcacatagtcccatatttcttggaggctttgtttgtttctttttattcttttttctctaaacttctcttcactgttcatttcattcatttcattttccatcgcagctaccctttgtagttctcgtgccatggttttcagctccatcaggtcctttaaggacttctctgcatcagttattctagttatccattcgtttaattttttttcaaagtttttatcttctttgccattggttcgaacttcctcctttagctcggagtagtttgatcttctgaagccttcctctctcaactcgtcaaagtcattctctgtccagctttgttctgttgctggtgaggagctgcgttc

SEQ ID NO: 11591 - DNA, 1011 bp, Homo sapiens
  SIMILAR (349)..(963): 871254mologous to Homo sapiens putative p150,accession number U93569,Smith-Waterman Score=922.
gaacgcagctcctctccagcaacggaacaaagctggatgcagaatgacttggatgagttgagagaagaaggcttcagacgatcaaacttcttcaagctaaaggcggaagttcgaacccaatgcaaagaaactaaaaaccttgaaaaaacattagacaaatggctaactagaaaaaccagtgtagagaagtccttaaatgacctgatggagctgaaaaccatggtacaaggactacgtgacaaatgcacaaacttcagtaacggatttgatcagctggaagaaagggtatcagtgattgaagaacaaatgaatgaaatgaagcaagaaaagaagtatagagaaaaaaaggacagatcaatgacacagaaagttaacaaggatatccaggaattggactcagctctgcaccaagaggaactaatagacatctacagaactgtccaccccaaatcaacagaatatacattcttctcagcaccacatcgcacctatttcaaaattgaccacatagttggaagtaaagcactcctcagcaaatgtaaaagaacagaaattataacaaactgtctctcagaccacagtgcaatcaaactagaactcaggattaagaaactcactcaaaaccgctcaactacatggaaactgaacaatctgctcctgaatgactactgggtacataacgaaatgaaggcagaaataaagatgttctttgaaaccaatgagaacaaagacacaacttacgagaatctctgggacacattcaaagcagtgtgtagagggaaatttagagcactaaatgtccacaagagaaagcaggaaagatctaaaattgacaccctaatatcacaattaaaagaactagagaggcaagagttaacacattcaaaagctagcagaatgcaagaaataactaagatcagagcagaacagaaggagaaagagacagaaaaaaacattcaaaaaaatcagcgaatccaggagctgtttcttttaaaagatcaacaaaactga

SEQ ID NO: 11592 - DNA, 1545 bp, Homo sapiens
  SIMILAR (496)..(720): 881254mologous to Homo sapiens guanine nucleotide-binding regulatory protein 2,accession number M60165,Smith-Waterman Score= 350.
atgggaaaaaaacagagcagaaaagctgaaaattctaaaaatcagagcacctctcaccctccaaaggaacgcagctcctcatcagcaacggaaaaaagctggatggagaatgactttaacaagttgagagaagaaggcttcagacaatcaaacttctcagagctaaaggaggaagttcgaacccactgcaaaaaagcgaaaaaccttgaaaaaagattagacgaatggctaactagaataaccaatgtagacaagtccttaagtgacctgatggagctgaaaaccgtggcacgagaactatgtgacacatgcacaagcttcagtagccgattctatcaactggaagaaagggtatcagtgattgaagatcaaatgaatgaaatgaagcgagaagagaagtttagagaaaaaagagtaaaaagaaatgaacaaagcctcccagaaatatgggactatgtgaaaagaccaaatctgcgtctgattggtgtacctgtaagtgacagggagaatggaaccaagttggaaaacactctgcaggatattatccaggagaaattccccaacctagcaaggcaggccaacattcaaattcaagaaatacagacggccacaaagatactcctcgagaagagcaactccaagacacataattcaccacatcacacttattccaaaattgaccacatagttggaagtaaggcactccttagcaaatgtagaagaacagaaattataacaaactgtctctcagaccacagtgcaatcaaactagaactcaggattaagaaactcactcaaaaccgctcaactacacagaaactgaacaacctgctcctgaatgactactgggtaaataacgaaatgaagggagaaataaagatgttctttgaaaccaatgagagcaaagacaaaacataccagaatctctgggacacatttaaagcagtgtgtagagggaaatttatagcactgaatgcccacaagagaaaacaggaaagatctaaaattgacaccctaacatcacaattaaaagaactagagaagcaagagcaaacacattcaaaagctagcagaaggcaagaaataactaagatgagagcagaactgaaggagatggagaaacaaaaaacccttcaaaaaatcaatgaatccaggagctggttttttgaaaagatcaacaaaattgacagactgctagcaagactaataaagaagaaaagagagaataatcaaatagacacaataaaaaatgatgaacgggatatcaccactgatcccacagaaatacaaactaccatcagagaatactataaacacctctatgcaaataaactagaaaatctagaagaaatggataaattcctggacacatacagccttccaagactaaaccaggaagaagttgaatctctgaatagaccaataacaggctctgaaattgaggcaataattaatagcctacgaaccaaaaaaagtccaggaccagatggattcacagccgaattctaccagaggtacaaggagagcaggtaccattccttctga

SEQ ID NO: 11593 - DNA, 1350 bp, Homo sapiens
  SIMILAR (156)..(1763): 991254mologous to Homo sapiens 19-APR-1991 Cyclic-GMP stimulated nucleotide PDE clone pHcam61-6N-7,accession number Q83980_cd1,Smith-Waterman Score=2735.
gttttcactgatatagaagcagcacaggccaagaagtggagaaccaagaggaaagtgaatactgtcaggttgaggactgaagttgagctattggcatatcttggtgctagtgagttaaaattagtcttcagtgtttgccaacgtaaagaagtcctgtccttggtcataattgctgaagatattgatagagaagctcgaagtacattcatttttaataggctaaaagttggtcttcagatcatagcagtcaaagctccagattttggtgacaacagaaagaaccaacgtgaagatacagctattgctactggtggtctggctcaaattgaaaaatatattcaagaaatcgttgagcagttagatgttacaactagtgaatatgaaaaggaaaaactgaatgtatgtctggcaaaactttcagatggagtagcagtgctgaaggctggtgggacaagtgatgtcaaagaatgcagctcctcaccagcaatgcaacaaagctggatggagagtgactttgacgagttgagagaagaaggcttcagacgatcaaacttctccaagctaaaggaggaagttcgaatgcatcgcaaagaagctaaaagccttgaaaaaaaattagatgaatggctaactagaataaccagtgtagagaagtccttaaatgacctcatggagctgaaaaccatggcacgagaactacataaccaatgcacaagcttcagtagccaattccatcaactggaagaaagggtatcagtgattgaagatcaaatgaatgaaatgaagcgagaagagaagtttagagaaaaaacagtaaaaagaaatgaacaaagcctccaagaaatatgggactatgtgaaaagaccaaatccatgtctgattggtatacctcaaagtgacggggagaatggaaccaagttggaaaacactctgcaggatattatgcaggagaacttccccaacctagcaaggcaggccaacattcaaattcaggaaatacagagaatgccacaaagatactcctcgagaagagcaactccaagacacataattgtcagattcaccaaagttgaaatgaaggaaaaaatgttaagggcagccagagagaaaggttgggttacctacaaagggaagcccatcagactaacagcggatctcttggcagaaactctacaagccagaagagagtgggggccaatattcaccattcttaaagaaaagaattttcaacccagaatttcgtgtccagccaaactaagcttcataagtgaaggagaaataaaatcctttacagacaagcaaatgctgagagatttgtcaccaccaggcctgctctacaagagctcctga

SEQ ID NO: 11594 - DNA, 2127 bp, Homo sapiens
  SIMILAR (43)..(126): 391254mologous to Chironomus pallidivittatus giant secretory protein sp-Ib,accession number K01694,Smith-Waterman Score=63.
atggcagaaggcaaaggagaagcaggcaccttcttcacagggcagcagcatggacctccgctgctgatatccaggcaaacagggtctggagtggacctccagcaaactccaacagacctgcagctgagggtcctgactgttagaaggaaaactaacaaacagaaaggacatccacaccaaaaccacatctgtatgtcaccatcaacaaagaccaaagaggaacacagctcctcaccagcaacggaacaaagctggatggagaatgactttgatgagttgagagaagaaggcttcagacgatcaaactactctgagctaaaggaggaagttcgaacccatggtaaagaagttaaaaaccttgaaaaaaaattagatgaatggctaactagaataaccaatgcagagaagtccttaaaggacctgatggagctgaaaaccacagcaagagaaatatgtgacgaatgcacaagtctcagtagccgatgtgatcaacttccacgaccagatggattcacagccgaattctacgagaggtacaaggaggagatggtaccattccttctgaaactattccaatcaatagaaaaagagggaatcctccctaactcactttatgaggccagcatcatcctgataccaaagcctggcagagacacaacaaaaaaagagaattttagaccaatatccctgatgaacattgatgcaaaaatcctcaataaaatactggcaaaccgaatccagcagcacatcaaaaagcttatccaccataatcaagtgggcttcatccctgggatgcaaggctggttcaacatatgcaaatcaataaacataatccagcatataaacagaaacaacggcaaaaaccacatgattacctcaatagatgcagaaaaggcctttgacaaaattcaacaacgcttcatgctaaaaactctcaataaattagtggagataggaaacaaatatattaggattgttctcataattgagataatgtacaaaagaccttggtccagctctgcctatggagatagcttgatgaatggcagctactgtgattatttctgcactgtaaatgtctgttcctgggtcccctggtggaatctggagaaaaacgaggagcctgaggagagtagaggcagccgcgagacggccttcacatacgcggtgagcgcagcaggggtggtgaacgccatgagccgggcgtgccgcgagggcgagctgtccacctgcggctgcagccgcgccgcgcgccccaaggacctgccgcgggactggctctggggcggctgcggcgacaacatcgactatggctaccgctttgccaaggagttcgtggacgcccgcgagcgggagcgcatccacgccaagggctcctacgagagtgctcgcatcctcatgaacctgcacaacaacgaggccggccgcagggaccacgcatcgcgcctggatgctctgggccggagccagatgagcaatcatgcatcccactacccaagtccctactactctggggactttgcaggagagccggggtccgtgcggcagctgcccagcgagcccttccgccgccgccgttgtgcccgggaccgcccgcctcccgccggcccgctctcccgcccctcggacccgggcgccaaacgaggaggtgggcagcttcgccggccatggaccgccggagctgagtcgccgccgcggagctccgagctctcgcccttccccagcctcgcgcccgcggtgcactcgctgctcttcgcccttcgccctggaaaaacggggaaaagagagatcaacccgaagagagaaagaacgggatacgtgatgaaaaataattacagtgaatgtctgatgtccttgatgtttttccaagataaagtagcaaagaacagtcatttattcagttgtgagaaagatttccagctgggcagcaggtcacaaggcagaatacaatgccccacaattgcagcaaactgcttttggcacccaactctgcgctttcaacgcagcagccaacaacagcgccatttcaatggtgacatccagtccatagtgcattcccgtttacagtttacaactcctgtttacaaccctgtttataatcccgttgccctgagaatgcaggactga

SEQ ID NO: 11595 - DNA, 1350 bp, Homo sapiens
  SIMILAR (196)..(411): 551254mologous to Homo sapiens Human secreted protein HCHPF68, SEQ ID NO:163,accession number Y86248,Smith-Waterman Score =162.
atgccaaaatctcccaaggacatcactgcagctggagccaggaagtggaccagcaagagcatcagagagccgtgggagaaccttagtcagaccatacagaacccatctccaacaacggcaccatgtggtagcacaagctttatctcagatgtttccaactacacttgcaacaatgagaccaataagggctttgttgtcctagacccaagagctgttctgggagtaccggaggagggctgggctgtacctccgctgctgatatccaggcaaacagggtctggagtggacctccagcaaactccaacagacctgcagctgagggtcctgactgttagaaggaaaactaacaaacagaaaggacatccacaccaaaaccacatctgtatgtcaccatcaacaaagaccaaagaggaacacagctcctcaccagcaacggaacaaagctggatggagaatgactttgatgagttgagagaagaaggcttcagacgatcaaactactctgagctaaaggaggaagttcgaacccatggtaaagaagttaaaaaccttgaaaaaaaattagatgaatggctaactagaataaccaatgcagagaagtccttaaaggacctgatggagctgaaaaccacagcaagagaaatatgtgacgaatgcacaagtctcagtagccgatgtgatcaactggtttcagtgatggaagatcaaatgaatgaaatgaaacgagaagagaagtttagagaaaaaagaatacaaagaaacaaacaaagccaccaagaaatatgggactatgtgaaaagaccaaatctacgtctaatcggtgtacctgaaagtgacaaggagaatggaaccaagttggaaaacactctgcaggatattatccaggagaacttccccaatctagcaaggcaggccaacattcacattcaggaaatacagagaacgccacaaagatactcctcgagaagagcaactccaagacacataattgtcacattcaccaaagttgaaatgaaggaaaaaatattaagggcagccagagacaaaggtcgggttacccacaaagggaagcccatcagactaacagctgatctcttggcagaaactctacaagagagaagagagtgggggccaatattcaacattcttaaagaaaagaattttcaaccagaatttcatatccccaaactaagcttcagaagtgaaggagaaataaaatactttacagacaagcaaatgttgagagattctgtcatcaccaggcctgccctaaaagggctcgtgaaggaagcactaaacatggaaaggaacaaccggtaccagccactgcaaaaacatgccaaagtgtaa

SEQ ID NO: 11596 - DNA, 1509 bp, Homo sapiens; identical to SEQ ID NO: 4744
  SIMILAR (3)..(161): 731254mologous to Homo sapiens Human thyrotropin GPR N- terminal sequence,accession number W03626,Smith-Waterman Score=189.

SEQ ID NO: 11597 - DNA, 2043 bp, Homo sapiens
  SIMILAR (1191)..(1763): 501254mologous to Mus musculus punc,accession number AF026465,Smith-Waterman Score=471.
atgatcataattgtgccactgtactccagcctgggtgacagagtgaaatcttgtgaaaagaagagagagagagagagagagagaagaaagaaagaaagaaagaaagaaagaaagaaagaaagaaagaaagaaagaaagaaggcaagcagtaaagaaagggaggaaggaagaaagaaagaaaggagaaagaaattaagaaagaaagaagaaaaggaaagaaagaaaagaaagaagaagagaagagaaggaaggaaagaaagaaagaaagagaaagaaagaaaagaaggaaagaaggaagaaagaaagaatataccaggaaagcgaagagaatccacagaccctttgaaggaaatggatcaccgctgcctgctccctgagatgctgaaaggaacctggtggacaacacctgctagagcttccggcccagcagtcccacttctgtgtgaattcaggcagtggacagtggacacaacctctgttgtcccagaaagcacccacatgccagggcagatgacccaacccatccctgcccctgatagccacaacatggatgaagctggaggccattatcctaagcagactaacacaagaccagaaaaccaaatactgcatgttttcactgataagtgggagctaaacactgagtacaaggacccaaagaagagaacaacagacaccagggcctacttgagggtggaggccacgctggcagctgattggatggtgcccacccagattgagggtaggtcttcctttgttctagccacgctggcagctgattggatggtgcccacccagattgagggtagatcttcctttgttctagccacgctggcagctgattggatggtgcccacccagactgagggtagatcttcctttgttctagccacgctggcagccgattggatggtgcccacccagattgagggtaggggcagaatgacacctcacatggccgggtactcctctgagacaaaacttccagaggaacgatcaggcagcagcatttgcggttcaccaatatccgctgttctgcagccaccactgctgatacccaggcaaacagggtctggagtggacctccagcaaactccaacagacctgcagcttagggtcctgatggaacgcagctcctcaccagcaacggaacaaagctggatggagaatgactttgacgagatgagagacgaaggcttcagaagatcaaactactccgagctaaaggaggaagttcaaacctattgcaaagaagtgtgtagagggaaatttaaagcactaaatgcccacaagagaaagcaggaaacatctaaaattgacaccctaacatcacaattaaaagaactagagaagcaagaggaaacacattcaaaagctagcagaaggcaagaaataactaagatcagagcagaactgaaggagatagagacacaaaaaacccttcaaaaaatcaatgaatccaggagctggttttttgaaaagatcaacaaaattcatagaccgcttgcaagactaataaagaagaaaacagagaagaatcaaataaatgcaataaaaaatgataaatgggatatcaccaacaatctcacagaaatacaagctaccatcagagaatactataagcacctctatgcaaataaactagaaaatctagaagaaatggataaattcctggacacatacaccctcccaagactaaaccaggaagaagttgaacccgtgaatagaccaataacaggctctgaaattgaggcaatcactaatagcctaccaacaaataaaagtccaggatcagatggattcacagtcgaattctaccagaggcacaaggaggagctggtaccattccttctgaaactattccaatcaatagaaaaagagggaatcctccctaactcattttatgaggccaacatcatcctgataccaaagccttgcagagacacaacaaaaaaagagaattttagaccaatatccctgatgaacatcgatgcacaaatcctcaataaaatactggcaaacggaatccagcagcacatctaa

SEQ ID NO: 11598 - DNA, 2897 bp, Homo sapiens
  SIMILAR (226)..(1524): 421254mologous to Mus musculus DDM36,accession number AB052620,Smith-Waterman Score=833.
atggtggtgaaggtttggaaatactatgttttggataacattgactcagcaacactgaaagtgttggaagttctggccagggcaatcaggcaggagaaggaaataaagggtattcaattaggaaaagaggaagtcaaattgtccctgtttgcagatgacatgattgtatatctagaaaaccccattgtctcagcccaaaatctccttaagctgataagcaactttagcaaagtctcaggatacaaaatcaatgtacaaaaatcacaagcattcttatacaccaacaacagacaaacagagagccaaatcatgagtgaactcccattcacaattgcttcaaagagaataaaatacctaggaatccaacttacaagggatgtgaaggacctcttcaagcagaactacaaaccactgctcaatgaaataaaagaggatacaaacaaatggaagaacattccatgctcatgggtaggaagaatcaatatcgtgaaaatggccatactgcccaaggaacgcagctcctcaccagcaacggaacaaagctggatggagaatgactttgatgagttgagagaagaaggcttcagacgatcaaacttctccgagctaaaggagaaagttcgaacccatcacaaacaagataaaaaccttgaaaaaaggagctggttttttgaaaagatcaacaaaatcgatagacctctagcaagactaataaagaagaaaagagagaagagtcaaataaacgcaataaaaaacgataaaggggatatcactgccgatcccacagaaatacaaactaccatcacagaatactataaacacctctatgcaaataaactagaaaatctagaagcaatggataaattccttgacacatacaccctcccaagaataaaccaggaagaagttgaatctctgaataggccaataacaggctctgaaactgaggcaataattaatagcttaccaaccaaaaaaagtccaggaccagatggattaacagctgaattctaccagaggtacaaggaggagctggtaccattccttctgaaactattccaatcaatagaaaaagagcgaatcctcccgaactcattttatgagggcatcatcctcctgataccaaagcctggcagagacaacacaaaaaaagataattttaaaccaatatccctgatgaacatggatgcaaaaatcctcaataaaatactggcaaaccgaatccagcagcacatcaaaaagcttatccaccatgatcaagtgggcttcatccctgggatgcaaggctggttcaacatatgcaaatcaataaatgtaatccagcatataaacagaaccaaagacaaaaaccacatgattatctcaacagatgcaggaaaggcctttgacaaaattcaacagcccttcatgctaaaaactctcaataaattaggtattgatgggatgaatctcaaaataataagagctatttatgacaaacccacagccaatatcatactgaatagacaaaaactggaagcattccctttgaaaactggcacaagacagggatgccctctctcaccactcctattcaacatagtgttggaagttctggccagggcaatcaggcaggagaaggaaataaagggtattcaattaggaaaagaggaagtcaaattgtccctgtttgcagatgacatgattgtatatctagaaaaccccatcgtctcagcccaaaatctccttaagctgataagcaacttcagcaaagtctcaggatacaaaatcagtgtgcaaaaatcacaagcattcttatacaccaataacagacaaacagagagccaaatcatgagtgaaatcccattcccaattgcttcaaagagaataaaatacctaggaatccaacttacaagggatgtgaaggacctctttaaggagaactgcaaaccactgctcaaggaaataaaagagaacacaaacaaatggaagaacattccatgctcatggatagaaagaatcaatattgtgaaaatggccatactgcccaaggtaatttatagtttcaatgccatccccatcaagcacccaatgactttcttcacagaattggaaaaaacaactttaaagttcatatggaaccaaaaaagagcccgcatcaccaagtcaatcctaagacaaaagaacaaagctggagatatgtgaaacagagcaagaaaatagctgtctatgcagaaagaagcaggtgctcaccaggcactgaatttgctggcaccttgatcttggacttcccatcctccagaactgcaccctccagtaggggcagactgacgcctcacacggccaggtacccctctgagacaaagcttccagaggaacgatcaggcagcaacatttgctgttcagcaatattcgctgttctgcagcctctgctgctgatatccaggcaaacagggtctggagtggacctccagcaaactccaacagacctgcagctgagggaacgcagctcctcgccagcaacggaacaaagctggatggagaatgactttgacgagttaagagaaggcttcagacgatcaaactactccaagctaaaggaggaagttcaaacccattgcaaagaagctaaaaaccttgaaaaaagattagacgaatggataactagaataaccaatgtagagaagtccttaaatgacctgatggagctaaaaaacatggcaaaagaactacgtgatgaacgcacaagcttcagtagcgaattcaatcaactggaagaaagggtatcagtgattgaaaatcaaatgaacgaaatgaagcgagaagagaagtttagagaaaaaagagtaaaaagaaatgaacaaagcctccaagaaatatgggactatgtgaaaagaccagatgagatctacatctga

SEQ ID NO: 11599 - DNA, 2007 bp, Homo sapiens
  SIMILAR (934)..(1206): 571254mologous to Pyrobotrys stellata dynein heavy chain,accession number X82491,Smith-Waterman Score=270.
atggtgtccaggtttgtgggaactcaggttccaactgccaggattgatgattccgctctggctagggctggtttaaatgctccctctgtgggtcttgatgactgtttgcagcagtatattaagaactttgagagggagaagatcagtggggaccagctgctgcgcattacacatcaggagctagaagatctgggggtcagccgcattggccatcaggaactgatcttggaagcagttgaccttctgtgtgcattggaatttatctatgattttccaatttattgccatggatggatatcgctgctgctagttattcagggcccaagagcttttcagttagcaggtgatgcatgctacctggactgggtccttccccttaaggcaacagtgcacagaaacactctcatcatcaggcagctgctgcccaggtttgggggaaagggggcattggcaattgaagactgtttttcctacctcttctgtgcctctttcaatgatatgaagttaaaactagaaggaaaactaacaaacagaaaggacatccacaccaaaaacccatctgtacatcaccagcatcaaagaccaaaagtagataaaaccacaaagatggagaaaaaacagagcagaaaaactggaaactctaaaaagcagagcacctctcctcctcaaaaggaacgcagttcctcaccagcaactgaacaaagctggatggagaatgactttgacgagttgagagaagaaggcttcagacgatcaaactactccgagctacaggaggaaattcaaaccaaaggcaaagaagttaaaaactttgaaaaaaatttagacaaatgtgtaactagaataaccaatgcagagaagtgcttaaaggagttgatggagctgaaagccaaggctcaagaactacgtgaagaacgcagaagcctcaggagccgatgcgatcaactggaagaaagggtatcagtgattgaagatcaaatgaatgaaatgaagcgagaagggaagtttagagaaaaaagaataaaaagaaatgaacaaagcctccaagaaatatgggactatgtgaaaagaccaaatctacgtctgattggtgtacctgaaagtgatggggagaatggaaccaagttggaaaacactcttcaggatattatccaggagaacttccccaatctaacaaggcaggccaacattcagattcaggaaatacagagaacaccacaaagatactcctcgagaagagcaactccaagacacatagttgtcagattcaccaaagttgaaatgaaggaaaaaatgttaagggcagccagagagaaaggtcgggttacccacaaagggaagcccatcagactaacagcagatctctcagcaggaactctacaagccagaagagagtgggggccaatattcaacattcttaaagaaaagaattttccacccagaatttcatatccagccaaactaagcttcataagtgaaggagaaataaaatactttacagacaagcaaatgctgactatagtacacctaaaaaccctggacattatatatatgtataacataagaagaccgaaaggtggagagaagaaagcagaccaagaagttaactcagaaccaaggaataacattgtgctggagacaaaaggagaccggggaccccaggcccctgccagtcctggaggacccccgccccgacgcgtacgacgatccgccagtggaagccgcgcgggcattacctttcatccagtccactacttgactcggagaccatttgctcaccggttccattatcagagccatgggtacggggtcggttccgtgcagagcgcagagctcagacacaaaacgaactcagcagcccgagctgctctcagagacggaggtgtggactgccgtggacgagaacggggctccgcctgccagaagcgcagcgatgatgaggcaggagggctagtgctgtcggatcttccccgggtgatgagcgggtcctgggaagtcaggcgttga

SEQ ID NO: 11600 - DNA, 3409 bp, Homo sapiens
  SIMILAR (28)..(507): 431254mologous to Homo sapiens LRP16,accession number AF202922,Smith-Waterman Score=210.
atggtaccagcatctgcttctgatgagggcctcaggaagcttccagtcatggtggaaggtgaagggggagccagcgtatcacatggcaaacaggccctgatgatcactgatttcattgcgaaccaaagcaaagacaggagcctgattgttcgattactttgtgccacattttataaggaaaaactgatcactattcacaatagcaaaggcatggaatcaccccaaatgcacatcagtgacagactggataaagaaaatgtggtacatatataccatggaatactatgcagtcacaagaaggaacaagatcgtgtcctttgcagagacatagatggagctggaagtcattatcgtcagcaaactaacacaggaacagaaaaccaaacactgcatgttctcacttacaagtgggagctgaacgatgagaacacatggacacagggaggggaacaacacacactagagcctgttgagcccactgaagagaagctttttatccagtttgaaagatcacatattgtgtcagcctggactgccttgcagaccttttctacaattaaacttctttgcttactgaaagctttcatccctgaggcttgttttcttgctcagataatggactcaatcacacaagaaggaataatagagattacggaacgcagctcctcaccagcaacggaacaaagctggacggagaatgactttgacgagttgagagaggaaggcttcagaaaatcaaactactccgagctaaaggaggaagttcgaaccaatggcaaaaaagttaaaaactttgaaaaaaaattagacgaatggataactagaataaccaatgcagagaagtccttaaaggacttgatggagcggaaaaccaaggcacgagaactacgtgatgaatgcacaagcctcagtaaccgatgcgatcaactggaagaaaggggatcagcgatggaagacgaaatgaatgaaatgaagcaagaagagaagtttagagataaaagaataaaaagaaatgaacaaagcctccaagaaatatgggactgtgtgaaaagaccaaatctacgtctgattggtgtacatgaaagtgatggggagaatggaaccaagttggaaaacactcttaaggatattatccaggagaacttccccaatctagcaaggcaggtcaacactcaaattcaggaaatacagagaatgccacaaagatactcctcgagaagagcaactccaagacacataattgtcagattcaccaaagttgaaatgaaggagaaagtgttaagggcaaccagagagaaaggtcgggttacccacaaagggaagcccatcagactaacagctgatctctcggtagaaactctacaagccagaagagagtgggggccaatattcaacattctaaaagaaaagaattctcaacccaggatttcgtatccagccaaactaagcttcaaaactgaaggagaaataaaatcctttacagacaagcaaatgctgagagattttgtcaccaccaggcctgccctaaaagagctcctgaaggaagcactaaacatggaaaggaacaaccgagacacatataggctcaaaataaagggatggaggaaaatctaccaagcaaatggaaaacaaaaaaaggcaggggttgcaatcctagtcttggataaaacagacttcaaaccaacaaagatcaaaagagacaaagaaggccattacataatggtaaagggatcaattcaacaagaagaactaactatcctaaatatatatgcacccaatacaggagcactcagattcataaagcaagtccttagtgacctacaaagagactcagactcccacacaataataacgggagactttaacacctcactgtcaacattaggcagatcaacaagacagaaagttaacaaggatatccaggaattgaactcagctctgcgccaagtggacctaatagacatctatagaactccccaccccaaatcaacagaatatacattcttttcagcaccacaccgcacctattccaaaattgaccacatagttggaagtaaaagagtcctcagcaaatgtaaaagaacagaaatgataacaaactgtctctcagaccacagtgcaatcaaaccagaactcaggattaagaaactcactcaaaaccactcaattacatggaaactgaacaacctgctcctgaatgactactgggtacataacgaaatgaaggcagaaataaagatgctctttgaaaccaacgagaacaaagacacaacataccagaatctctgggacacattcaaagcagtgtgtagagggaaatttatagcactaaaggcccacaagagaaagcaggaaagatctaaaattgacaccctaacatcacaattaaaagaactagagaagcaagagcaaacacattcaaaagctagcagaaggcaagaaataactaagaacagagcagaactgaaggaaatagagacacaaaatacccttcaaaaaatcaatgcatccaggagctggttttttgaaaggaccaacaaaattgatagacctctagcaagactaataaagaagaaaagagagaagaatcaaatagatgcaataaaaaatgataaaggggatatcaccactgatcccacagaaatacaaactaccatcagagaatactataaacacctctacgcaaataaactagaaaatctagaagaaatggataaattcctcgacacatacaccctcccaagactaaaccaggaagaagttgaatctctgaatagaccaataacaggcgctgaaattgaggcaataattaatagcttaccaaccaaaaaaagtccaggaccagatggattcacagccgaattctaccagaggtacaaggaggagctggaatgcagctcctcaccagcaatggaacaaagctggacggagaatgactttgacgacttgagagaagaaggcttcagacgatcggtaataacaaacttctctaagctaaaggaggatgttcaaacccatcacaaggaagctaaaaaccttgaaaaaagattagacgaatggctaactagcaataaccaatgtagagaagtccttaaattacctgagagagctgaaaaccatggcacgagaactatgtgatgcatgcacaagcctaagtagccaatttgatcaaccggaagaaagggtccagacaaccagtgcgtatgttaaggctgaagaaaacctgcttagtcagtgcggtggtgagaaggagttgagcctttcgggacgtggagtgcctgccgcagagctgatgccccgaggctgccgcagacgctgcagagctgatgccagcaagttggcggctgtgcgctcatctctcccggacaactcttccccggcgctcggggttcagttcagccaccagcct

SEQ ID NO: 11601 - DNA, 1504 bp, Homo sapiens
  SIMILAR (195)..(443): 531254mologous to Escherichia coli K12 putative beta- glucosidase (EC 3.2.1.21),accession number AE000211,Smith-Waterman Score=166.
ttacaatttggcacgtttttgcagtggctggtactggttgttcctttccatgtttagtgcttccttcaggagctcttgtagggcaggcctggaggtgacacaatctctcagcatttgcttgtctgtaaaggattttatttctccttcatttatgaagcttagtttggctggatatgaaattctgggttgaaaattcttttctttaagaatgttgaatgttggcccccactctcttctggcttgtagagtttctgccgagagatctgctgttagtctgatgggcttccctttgtgggtaacccgacctttctctctggctgcccttaacattttttccttcatttcaactttggtgaatctgacaattatgtgtcttcgagttgctcttctcaaggaatatctttgtggcgttctctgtatttcatgaatttgaatgttggcctgccttgctaggttggggaagttctcctggataatatccaatcctgcagagtgttttccaacttggttccattctccccatcactttcaggtacaccagtcagatgtatatctggtcttttcacatagtcccatatttcttggaggctttgttcatttctttttattctttttttctctaaacttctcttctcgcttcatttcattcatttgatcttccatcactgataccctttcttccagttgagcaaattggctactgaggcttttgcattcgtcatgtatttctcgtgccatggttttcagctccatcaggtcctttaaggacttccctgcattggttattctagttatccattcgtctaatttttttttcaaggtttttagcttctttgcaatgggtttgaacttcctcctttagctcagagaagtttgattgtctgaagccttcttctctcaactcgtcaaagtcattctctgtccagctttgttctgttgctggcgaggagctgcgttcctttggagggggagaggcgctctgatttttagaattttcagcttttctgctctgttctttccccatctttgtggttttatctacctttggtccttgatgatgtagatgacgtagagatggggttttggcgtggatgtcctttctgggcccagactgcaaacttggtctcccctgatgtatgcagccacggccatctctgttttcttctagctttccattgctgcttttttggcttggcttgttgggggtctcccagtgtctgagtaagttggttgttacccagagatttgtggagattgtagtccaattttgccctgtggttttcttgcttctcggaattttactaatttccagctgttctacagagcttctaaccttcactagtacttcaaccttgtagagctgcagcttcctgctgcctacactgcatagttggggaatgcactcttgctgttgttgtggtagtgagtgagtcttcacgagatctggttgtttaaaagtgtgtagcacttcccccccttcactcttattctcctgctccaccat

SEQ ID NO: 11602 - DNA, 970 bp, Homo sapiens
  SIMILAR (13)..(342): 921254mologous to synthetic construct InsB peptide,accession number Z37515,Smith-Waterman Score=525.
gcggccgccatggcggacagcggcaccgcggggggcgcggcgttggcggccccggcccccgggccgggcagtggcggcccaggaccacgcgtctactttcagagcccccccggggccgcaggagagggcccgggcggggcggacgatgagggcccagtgaggcgccaagggaaagtcacccgtcagttatgaccgcaaggagctacggaagcgccttcaaccttagaggattggatcctgtagcagcttaacggcgccttctacgactgccagggaagaggagatcccagaactggagattgacgtggatgagctcctggacaatggagagtgacggatgcccgggctgcccagggtcaaggagctgctggttgactgttacaaacccacagaggccttcatttctggcctgctggacaagatccggggcatgcagaagctgagcacacccccagaagaagtgagggtccccgacccagggagaacggtggctcccacaggacaatcgctaccccccgacctcgtagcaacagcaataaccgggggaacctgacggccaggccttggtgccatgagcagggctcctcgtgcccctggcccaggggtctcttcccctgccccctcagttttccacttttggggtttttttattgttattaaactgatgggactttttgtgtttttatattgactctgcggcgcgggccctttaataaagcgaggtagggtacgcctttggtgcagctcaaaaaaaaaaaaaaaatgatttccagcggtccacattagagttgaaattttctggtgggagaatctataccttgttcctttataggccaaggaccgcagtccttcagtaacaccagtgtaaaagcttgaggagaaattgtgaagctacacagtatttgttttctaatacctcttgtcattctaaatatctttaatttattaaaaaatatatatatacagtaaa

SEQ ID NO: 11603 - DNA, 1696 bp, Homo sapiens
  SIMILAR (3)..(578): 971254mologous to Escherichia coli polynucleotide phosphorylase,accession number U18997,Smith-Waterman Score=956.
tcaggggacaatgtttacatctcctggttttctcctggggctgtcatttgccatgggcatgatgaccgctgtgtgtagactcagcgtttcttgttccaggtcccccaggtggaagctggcatatgtgagcagactcatcctcatcggaagagagtatctagaagtggccctggtgacattagccactggtaagccctctccaacctccttcctgcagctcaggaagtccttgctgtactggcctccccgttgttcctgcaagcattttcctccatcaggacatttgttcctgctgttacctccagctgaaacatggattttgacagagtcacaggctccctctccctccccaggcctgtgatcggatgtcaccttctcagggaagccttcgttggtcaccttatttccactgtatcctccgggtaagttttccttctcttctgtagacgtctccatgttacagtcaactataaaacatggctcatgttcactctgggcttcgccttcagaggagtttgatattttggaagtggtacctttgttctgtgtgcttttcagaccaaccgcttctttcatttcttcaaggcttccttccaaaggagttaaatcatcatcatgtccttttggaagagcagggtcctcaatggtgtaagaaaagccatttccctctgggcatgcgtcttctttcccagcctgtctacaacaccttagggcttcttcaggggcagaagtcacgcaactcgaagttgcacggccttcaccatttccagttttccgaggactggagatggtttttgctgtgaaattggtaatgtcaactgttctggtttttttgccaacgcaggaaaaatcagacatttcaaatatgcttgttctctccttcttagaaagacttctgcagctcaactgagcagggcttgatggcagctgagattcaggaggaagattctctgaatacctttccttaagattatcaggtgaaaaatagtcatcatatgaagactccccacagctaagagcctccagggcaggtcccgccacgtgctgcagcctgtcttccgacctgcacagctgcagcctcggcatgatagatctcctggtgctcctctttctcttgcatttttccttcggaggtgaatgggagccatgtgatactctttttctctttactgaggaactcctgggtcttgaatgtatcaaaaggtggccttttgttgaagataaggtaggagacaaacgatacttctcttcaaacgtctcctgagacatacctgcagcctgcttttggtcaggggtgactactttacctgcaatatttctttgcaagtttatttcttcctttgaaagattactcagaaatttctgaggacttgatttatcgaggtgagtgaaagatggtgatgaatgaatattatttgctttcaatacaagtgaagaaatacacacatcacttttaatgtcattaatggatccttccaacttcctttcctgatttccacatcctgagtttccacaaagatcatcaaaagatgagtgtaagccaccagcaaagtattcatacagacaatgagaaattggaatttctttgtcaccagaactgaaatctgctgagggcgatgagagagctgctgtagagaagttctcataggcatactcttctctgggtagcattggaaactttcgaattcttactttt

SEQ ID NO: 11604 - DNA, 654 bp, Homo sapiens
  SIMILAR (594)..(4): 941254mologous to Escherichia coli similar to phosphotransferase system enzyme II,accession number U00006,Smith- Waterman Score=927.
atgcagtccctgactaactccgagcttgagaattatatccaggacaacatgaagaaagaaatggtagagatacagcagaatgcagtacagaaccagacggctgtgatgatagaaatagggacaaacctgttgaaccaaacagcggagcaaacgcggaagttaactgatgtggaagcccaagtgaacagcatttataaccacggtgtacctcggaagaagcgttctcagagcaacatgcacgtgttcccagctaacgaccccactgttgctaaagaagaacaaatcagcttcagagactgtgctgaagtattcaaatcaggacacaccacgaatggcatctacacgttaacattccctaattctacagaagagatcaagcccacagctgtcacaccagaagcacacccctcaccccgagtgggaacaaatgtggaaaatctgggaaatggtgagcaggccagttttggcacatacccttgtttccgcttcaccccggaggggagggcttgtggtgccctctccctgcctccactcaccttccaacaagtgctggagtttgattcacaccaaacagaaatagccaaaatttgtaagaactctattgggcagctcttctgtatcaatgactgtacaggctccaagggccagaaataa

SEQ ID NO: 11605 - DNA, 3533 bp, Homo sapiens
  SIMILAR (1660)..(3102): 991254mologous to Homo sapiens 06-OCT-1995 Human TIE-2 ligand 2 cDNA clone,accession number T44321_cd1,Smith-Waterman Score= 2517.
atggtggattcgttaattgcgcgcgtaggagtaatggctcgcggtaatgccattactttgcctgtatgtggtcgggatgtgaagtttactcttgaagtgctccggggtgatagtgttgagaagacctctcgggtatggtcaggtaatgaacgtgaccaggagctgcttactgaggacgcactggatgatctcatcccttcttttctactgactggtcaacagacaccggcgttcggtcgaagagtatctggtgtcatagaaattgccgatgggagtcgccgtcgtaaagctgctgcacttaccgaaagtgattatcgtgttctggttggcgagctggatgatgagcagatggctgcattatccagattgggtaacgattatcgcccaacaagtgcttatgaacgtggtcagcgttatgcaagccgattgcagaatgaatttgctggaaatatttctgcgctggctgatgcggaaaatatttcacgtaagattattacccgctgtatcaacaccgccaaattgcctaaatcagttgttgctcttttttctcaccccggtgaactatctgcccggtcaggtgatgcacttcaaaaagcctttacagataaagaggaattacttaagcagcaggcatctaaccttcatgagcagaaaaaagctggggtatcttataggcctgtacacatggcagccaaggggacctggccgccagagctcgtagagatgacccagcacaatgggctgggcagtaaggaagccagactctggagccagcgtggaggtgcaggagctcgtaggggaggtaatgaggagcatcgattaggctcccagatccgttctgagattcagataaggtgtcctaacaaaaggtttatggaaaagatttggtcctataaaggaaattccagtatgtcgactctagaggatccccggaacaaactcaaagacatgcacagtcaaggccatgatcacgtcaaaatctggtggacatacaattggcatgactggattgttctgaaaatccagtttgccagagttgattttttcctagaaaagaaggtgctagctatggaagacaagcacatcatccaactacagtcaataaaagaagagaaagatcagctacaggtgttagtatccaagcagaattccatcattgaagaactcgaaaaaaaaatagtgactgccacggtgaataattcagttcttcagaagcagcaacatgatctcatggagacagttaataacttactgactatgatgtccacatcaaactacctacagatagtgatggaaatgtcacaagctttcttccaaaagcactgcagaactcctaataaagaatggaaattctcaggcggtgggggagtcaatagagggcagcggggatgccgagtcaaggtctggggtacgggccgccgcaggggccccgggggttatggagaatgcagcagacaaggaatggccactgagtttggggaagaaatctacagaacggtgctgaaaataaatccttgtggctacatttcctcatgtctgtatagtaggcgccccccgtatatgtgtgcgaggcccgtgtgcgtttatttcgccctcttcttgatggttgacaccctcggcaaagtgtggggccttgggtcctccttcctttctcagacctcaacctataacaactttcggaagagcatggacagcataggaaagaagcaatatcaggtccagcatgggtcctgcagctacactttcctcctgccagagatggacaactgccgctcttcctccagcccctacgtgtccaatgctgtgcagagggacgcgccgctcgaatacgatgactcggtgcagaggctgcaagtgctggagaacatcatggaaaacaacactcagtggctaatgaagcttgagaattatatccaggacaacatgaagaaagaaatggtagagatacagcagaatgcagtacagaaccagacggctgtgatgatagaaatagggacaaacctgttgaaccaaacagctgagcaaacgcggaagttaactgatgtggaagcccaagtattaaatcagaccacgagacttgaacttcagctcttggaacactccctctcgacaaacaaattggaaaaacagattttggaccagaccagtgaaataaacaaattgcaagataagaacagtttcctagaaaagaaggtgctagctatggaagacaagcacatcatccaactacagtcaataaaagaagagaaagatcagctacaggtgttagtatccaagcaaaattccatcattgaagaactagaaaaaaaaatagtgactgccacggtgaataattcagttcttcaaaagcagcaacatgatctcatggagacagttaataacttactgactatgatgtccacatcaaactcagctaaggaccccactgttgctaaagaagaacaaatcagcttcagagactgtgctgaagtattcaaatcaggacacaccacaaatggcatctacacgttaacattccctaattctacagaagagatcaaggcctactgtgacatggaagctggaggaggcgggtggacaattattcagcgacgtgaggatggcagcgttgattttcagaggacttggaaagaatataaagtgggatttggtaacccttcaggagaatattggctgggaaatgagtttgtttcgcaactgactaatcagcaacgctatgtgcttaaaatacaccttaaagactgggaagggaatgaggcttactcattgtatgaacatttctatctctcaagtgaagaactcaattataggattcaccttaaaggacttacagggacagccggcaaaataagcagcatcagccaaccaggaaatgattttagcacaaaggatggagacaacgacaaatgtatttgcaaatgttcacaaatgctaacaggaggctggtggtttgatgcatgtggtccttccaacttgaacggaatgtactatccacagaggcagaacacaaataagttcaacggcattaaatggtactactggaaaggctcaggctattcgctcaaggccacaaccatgatgatccgaccagcagatttctaaacatcccagtccacctgaggaactgtctcgaactattttcaaagacttaagcccagtgcactgaaagtcacggctgcgcactgtgtcctcttccaccacaagagggcgtgtgctcggtgctgacgggacccacattgctccagattagagcctgtaaactttatcacttaaacttgcatcacttaacggaccaaagcaagaccctaaacatccataattgtgattagacagaacacctatgcaaagatgaacccgaggctgagaatcagactgacagtttacagacgctgctgtcacaaccaagaatgttatgtgcaagtttatcagtaaataactggaaaacagaacacttatgttatacaatacagatcatcttggaactgcattcttctgagcactgtttatacactgtgtaaatacccatatgtcct

SEQ ID NO: 11606 - DNA, 2838 bp, Homo sapiens
  SIMILAR (1560)..(340): 941254mologous to Escherichia coli PII Uridylyl- transferase,accession number Z21842,Smith-Waterman Score=2016.
atgccgaacaggcgcgggaggcaggggcgccgcagggtggttcgcacacgtggactcatgcggccaccgccgcgctggctgcccacagctgtcacaccagaagcacacccctcaccccgagtgggaacaaatgtggaaaatctgggaaatggtgagcaggccagttttggcacatacccttgtttccgcttcaccccggaggggagtttcctagaaaagaaggtgctagctatggaagacaagcacatcatccaactacagtcaataaaagaagagaaagatcagctacaggtgttagtatccaagcaaaattccatcattgaagaactagaaaaaaaaatagtgactgccacggtgaataattcagttcttcagaagcagcaacatgatctcatggagacagttaataacttactgactatgatgtccacatcaaactcagctaaggaccccactgttgctaaagaagaacaaatcagcttcagagactgtgctgaagtattcaaatcaggacacaccacgaatggcatctacacgttaacattccctaattctacagaagagatcaaggcctactgtgacatggaagctggaggaggcgggtggacaattattcagcgacgtgaggatggcagcgttgattttcagaggacttggaaagaatataaagtgatgaccgatgtaagccgtatttttgcaattcagcttacaatggttcaacttaagatttttcgactttacgatgtgatatgtggcacgatgctccctcatgatgccaggcagcggcagcgagccacaggtcccagtcagtcctgtgatccccagggtgaacaacagacactgcgtgcaccgtgttgccaaatggctctgtctgactgtgggctaatgattcaccttaaaggacttacagggacagccggcaaaataagcagcatcagccaaccaggaaatgattttagcacaaaggatggagacaacgacaaatgtatttgcaaatgttcacaaatgctaacaggagatgaatactttgctggtggcttacactcatcttttgatgatctttgtggaaactcaggatgtggaaatcaggaaaggaagttggaaggatccattaatgacattaaaagtgatgtgtgtatttcttcacttgtattgaaagcaaataatattcattcatcaccatctttcactcacctcgataaatcaagtcctcaggaaatttctgaggtaatctttcaaagggaggaaataaacttggcaaaggaaatattgcagggtaaagtagttcacccctcacccaaaaggcagggctgcagggtatgtcttcagggaggacgtttggaggagaggtatccgtttgtcttcctacccttattcttccaacaaaagggccaccttttggatacctttcaggacccgggagttcctcagtaaagagaaaaagagtatcacatggctcccattcacctccgaaggaaaaatgcaagagaaagaggagcaccaggagatctatcatgccgaggctgcagctgtgcaggtcggaaggcaaggctgcagcacgtggccgggacctgccctggaggctcttatctgtggggagtcttcatatgatgactatttttcacctgataatcttaaggaaaggtattcagagaatcttcctcctgaatctcagctgccatcaagccctgctcagttgagctgcagaagtctttctaagacggagagaacaagcatatttgaaatgtctgatttttcctgcgttggcaaaaaaaaccagaacagttgacattaccaattttacagcaaaaaccatctccagtcctcggaaaactggaaatggtgaaggccgtgcaacttcgagttgcgtgacttctgcccctgaagaagccctaaggtgttgtagacaggctgggaaagaaaacgcatgcccccagagggaaaatggccttttccttacacccattgaggacccctgcctccttcccaaaaggacatgatgatgatttaactcctttggaaggaagccttgaagaaatgaaagaagcggttggtctgaaaagcacacagaacaaaggtaccacttccaaaatatcaaactcctctgaaggcgaagcccagagtgaacatgagccatgttttatagttgactgtaacatggagacgtctacagaagagaaggaaaacttacccggaggatacagtggaaataaggtgaccaacgaaggcttccctgagaaggtgacatccgatcacaggcctggggagggagagggagcctgtgactctgtcaaaatccatgtttcagctggaggtaacagcaggaacaaatgtcctgatggaggaaaatgcttgcaggaacaacggggaggccagtacagcaaggacttcctgagctgcaggaaggaggttggagagggcagccggaatgatgctctgaagaccttgttggacagtgcactcttcactcaaacctgcagcagatggaatgatgctctgaagaccttgttggacagtgcactcttcactcaaacctgcagcagctggaacgatgctctgaagaccgtgttggaccatgcactcttcactcaaacctgcagggctcccgcatctcttctggagcagaagcccacctgccagttcatcccgactgtgctgctgcctcctcttccccactggctcagccgtccatcaggccttgtgcatgcagctggccagctccctctccagggaacacttttcccctgcatctacttggccaacttcctgatctcttttaactcattcaccttctcaatgggacagtttagcgctgtggactcgagtccacactcctga

SEQ ID NO: 11607 - DNA, 1980 bp, Homo sapiens
  SIMILAR (48)..(401): 921254mologous to Escherichia coli ATP binding cassette transporter ABC2,accession number D90716,Smith-Waterman Score=577.
gttcccctcagcctctgagctgaggccccacaccagagtagggggcggcgcggcacccgtgccccggcatggcgacaccggacgcggggctccctggggctgagggcgtggagccggcgccctgggcgcagctggaggcccccgcccgcctcctgctgcaggcgctgcaggcggggcctgagggggcgcggcgcggcctgggggtgctccgggcgctgggcagccgcggctgggagcccttcgactggtctgcccagtctgccttgtgctcccttcagccaaacacttaactgcttgctctccctctgctacccaggaaaccactgttgctgcgattgccccggatatgccagaggaacctgatgtccctgctgatggccgttcggccatcgctgccggaaagtgggctcctctctgtgctgcagattgcccagcgccagagacagctccaaagtctatgtagggggctgggcctggggggcaggaggttgaaatccccccaggctccagaccctgaagaagaggagaacagggactcccagcagcctgggaaacgcagaaaggactcagaggaagaggctgccagtcctgaggggaagagggtccccaaaagattacggtgttgggaagaggaagaagatcatgagaaggagagacccgaacataagtcactggaatccctggcagatggaggaagtgcatctcctattaaggaccagcctgtcatggcagttaagactggcggaaggggtggcttcagtgacttgtcactgagggctctgccagccctaacatgagatttgtctccccaggttgagacagcctagcagaggcagagtgcatgtcccggtgtcctctctccccccgcactctgtaagcagatggacttgctgtgtgcccagctgcagctccctcagctctcagacctcggtctcctgcggctctgcacctggctgccctgtaacaggctgggcattctgttaccgcctccctgctttctgctgtcttctgccatttccccccagacttccccttctgctgtcctctacccaggtcctgctcaaagcagcagatagatactcaggcttgggtgggaggccaggcatttttcactagggcctctgctttgcaccaggactggctgaatgaagagcccaagcctttcttgtgattactgctccatctcccaatgtgtgcaggtggagatgacccctgagaagttcagtgtcttaatggagaagctctgtaaaaaggggccgctctacttggtgtccggaatctacgggggagtccgccgtgggccgcccgcccgtctcgaagcctagacctcggaggcttccaggcagtccgagcgtgtggactccgcggccctgagcgccctgtcgcttctctcccgcagcagcaaatgccgaccctggggcacggcgcgggtggcgagggccggcgggtgcttaacccccctcctctctcgaaggttcctggagacgagacccttcaccggcccttgggacccagggctaggcgtaacctgttggtgctgtcccccaaaacgcaggcttaagtccactccccgccctaagttctctgtgtgtgtcctgggggaccagcagcactgtgacgaggctaaggccgtggatgccacatttgaggtgtgccttggtgaccaggttctaagcaatgccaatggcttcctctctctatcagccaagaagtatgatgcgtttttggcctcagagtctctgatcaagcagattccacgaatcctcggcccaggtttaaataaggcaggaaagttcccttccctgctcagggaggaaggacaggccatctgctattcgtccaccaacctgacttgatcctctcttccctcctcccaggtgttatgtctggctgtagctgttggtcacgtgaagatgacagacgatgagcttgtgtataacattcacctggctgtcaacttcttggtgtcattgctcaaga

SEQ ID NO: 11608 - DNA, 2891 bp, Homo sapiens
  SIMILAR (1678)..(2616): 871254mologous to Escherichia coli K12 putative inner membrane component for iron transport,accession number AE000162,Smith-Waterman Score=1346.
cgcggcgtgagaagccatgagcagcaaagtctctcgcgacaccctgtacgaggcggtgcgggaagtcctgcacgggacccagcgcaagcgccgcaagttccttggagacggtggagttgcagatcagcttgaagaactatgatccccaggaaggacaagcgctttctcgggcacccgtcaggcttaagtcccactcccccgccctaagtttctctgtgtgtgtcctgggggacccgccagcacttgtgacggaggctaaggcccgtggatatccccccacatggaccatcggaggccgctgaaaaaacctcaaccaagaataaaaaactggtccaaaaaagctggcccaagaaagtatgaatgccgtttttggccctcagagtcctctgatcaagcgagattcccacgaatccctcgggccccaggtttaaataaggcagggaaagtttcctttccctgctcacacacaacggaaaacatggtgggccaaaggtggatgaggtgaaggtcccacaatccaggttccaaatgaagaaggtgttatgtctggctgtagctgttggtcacgtgaagatgacagacggatgagcttgtgtttaacattcacctggcctgtcaacttcttgggtgtcattgctcaaagaaaaactggcagaaatgttccggggccttatattatcaagaggcacccatggggcaaagccccaagcgcctatattaaggcacatttgaataaattctattaccagttaaaaaaaaaaaaaaaaaagttggcggccgccaacttttttttttttttttttttttttttttttttttttttttttttttttttttttgctgaaacatacactcatttatttccccagaaggagggggaatggggtccttggggagtctctgtcccagcccggacaggcagatctcacttccagaagagcacattccagaaaagcagccagcaggggtagaggcccagggacagcagtgggaagagcagggcgccgtaggtgtggtgctccagcacaccctgggctagcgctgccaggaagagcttgccagccctcggccagtgacagtggcgcctcctgcagctcccgccacaggaacaggctgccaaggagcgtggctgccgggctggtcagcaccagcagggcagcatatagggtccggtgcccatgaggcttggcaagcgcagcagtgggcaccatggtggtggccagcaggaagcccagttgagaagttggtgagggcgatgcagcccacctgcagtgctaggtagatcagggctaccaggctcagtgccatccagcccctgtctgggggcctgtgtgcttacccaccccgtgggtattgtggggcagggccaggccagctgcataaatcgccagcagtgtcagcaccacagcctcagcctctgccactgggaagtgctgggtggcaacgtgttggcccagcactggcaggacatagagggccagtcccatggcctgtgagatcagcagaggtgccacgagcgaggccagccccacaccctgtgatggggggaaggggtacactggggccaggggcacccccgggctcctcaaggcccattccagcctcatgcagctgcatccacagttccagagccttgagaccaaggaccaggagcaagaagccgacagcgggcatgtagaggccgatggagacgaagcgggagaggccggggagcaagtagaggaagaaggactggtgcaggcgctccaggaggtggttgagcttgcggaacatgccctccaaagccttgcccactgccaccaggtcatacttgtactggcggaagctattgatgccacgcagggttagggcctccacacggtagcgcaggaagaggccatgggagccgtgggggcggccggaggcctgccgcagaaccatgagcagcagtgtctgcaggccctgcagcggtccatccaatgatgtccagtcctcgggctgcagcttgccctgaagcgtgcacaacaggccccctttctggcagaaggtctggaagagattgagcaggtcaaggttgggcagctgcccgttaagcccctccacggccacatcgaggctggtgaccacatcactgctcagctccagggccacggctgcctgaatggccccagctcggccctgcaggggagacgactgcatgccagtgacattgacatcgtggtaggcttcaagccaagcctcagtgcccagaaggtcatgttctgttaccaggaagacgatatctttggcccaataaatctgcccccggaagtgggcagccagtgccagcagcagccccacagcctggctgttggtagagtcagagccacagggcacggtgagcacaagcgactcggtgctggcagcacgcggggcccgcaggatgccgtacacgttggtgcccgacaccatatagcgctcgtgggtctcatctgggaagggcagtttccgggagaaactctgcgtgtagacctccagccctactgaccgcatcgtccgttcaagccaggccactggcagagcccccgacttcttgcggtgggcggcgaagtcccgggcaaaagcccgggcacggtctccgcccgcaaactgctcctccaccatggtggagcccatggcgttctccgacatgtaagtgcgctgggtcagcggcgggaaaaccagcgccaagaaccaggcgatgcccgccacgtagctcagcacgcacaacggcgcgttgaggcgcagcactaggcgggcgagcgcgcgccggcgaaccgggtccgacaggaggcccatggcggggcagggcggcgcggctacggaccctctcccgcctccaactaccgccgcggtgcccacaggctgctcctgtcagacccggggacccgcgc

SEQ ID NO: 11609 - DNA, 510 bp, Homo sapiens
  SIMILAR (2)..(589): 1001254mologous to Escherichia coli 2,4-dienoyl-CoA reductase,accession number U93405,Smith-Waterman Score=1017.
  misc_feature (1)...(510): n = a,t,c or g
atggnccgggcgcnggtggctcacgccntgtnaatcccagcactttgggaggccaaggcgggtggatcacgagattctcctctgcgctatgtgcacattgccatcccatgcaacaacaagggagctcactcagtgggtttgatgtggtggatgctggcttgggaagttctgtgcatgcgtggcaccatttcccgtgaacacccgtgggaggtcatgcctgatttctgcttctacagagatcctgaagagattgaaaaagaagagcagcctgctgctgaaaaggctgtgaccaaggaggaatttcagggtgaaaggactgctccagctcctgagttcactgctactcagcctgaggttgcagactggtctgaaggtgtgcaggtgccctctgtgcctattcagcagttccctactgaagactgcagcgctcagcctgccacggaagactggtctgcagctcccactgcccaggccactgaatgggtaggagcaaccactgaatggtcttaa

SEQ ID NO: 11610 - DNA, 872 bp, Homo sapiens
  SIMILAR (6)..(122): 461254mologous to Homo sapiens Synthetic human type III collagen SYN-C3,accession number W54966,Smith-Waterman Score=60.
cgggcggcgctccccagatacggcgctgctcggcgtcgggagtccccgtcaccactggggggacgggagcgcagggtcccgccccgaaggacagggtcatgccggcccgtggaggcgagggcactaacccgcgtggctgcacacgcggcgtaagcacctggagttccatcacaacaagatcttggcagaatgacgtccgggggtacctgggtactccacaggctaaacacttccgatggcccgacgggcataagcgacacgcgtgaacaaatgatcggcgaacgctcccgaacgatgaccgtggcgcgtcgagtttgaccgacaacaggaagaccagggtcctccaggcagccaggggccagctccaggacagggcaggagaatgcggtccaggtctggcacgtaactgagggtgggtatgctccagagaagtaaggcaaatggcccagatgacgaccacctgcttggagcctcctgcacatgcggaccctcaacaggctccccgagtcctcgcctgccctccctgcctcaaaggccccagaagggcctacttcatcaggtgccacgaggatgaagccaggtaatattgcaaagggtctgtggaaacgcttgagcaagggcactgtgatgaaattgtggctactgacagcagtgcccaggctctcggggctcctggtttgtcctctggtgcaccagctcctgctggccttcaagtttctgaaaagattccccattttctgcctttggttcagggctgcaaatcgacatgcccgctttagcattttattcaaactctctcgaccctgaaagtactcctggttaaaagcgcccaccatcgtgtctacctttcgagggcccttattctcgttcat

SEQ ID NO: 11611 - DNA, 1554 bp, Homo sapiens
  SIMILAR (580)..(1134): 971254mologous to Escherichia coli 2,4-dienoyl-CoA reductase,accession number U93405,Smith-Waterman Score=932.
atgcacactcacccccacgcttatgtgcacactcaggtgcacactcccactcatgtgcacactcccactcatgtgcaccgctgcatgctcacgctcactcacatccgcaccccggctgtgctgtgcttgcacctggcggactcgccgcacagctgtgcccgcgagtgcgagtcccgcgtccgaggcctcggcgtgaccttacagcatctgtcgggtccgagcagtcagtccagagggtcgactctgaatgaaaacaaaacgccgtggtttgaaatggaaggaaacctggcccctgaagtgcagcctggtggtgctgtggattggaggccatcctgtgtgggcagcacggcagccagagtctgcaaggtcacgggtgacaccagaccgagctggacctggcccaagcgctgctcggagatccctggggccccatgcagcgtgacgcaccagcctccctcgacaaagctgcaaggccccacctccagcctcaggcatgtggccttcgagggcaggccactctatggcccagatgacgccccaggctgggagcagccccagacacccaggagacggggtgatgacagcggggccccaggatggagcctgcagtccacgacattcagagcagagcatggggcatgcaggaaagggggccagaggacctgctgggtctttccgggtgtatggtgccagcaggtgtccagcgcctccagccccttgtctgagagcaatggagacagtagagatggggtgttgggaaaaaggcttatcgagtgcctgtataagctggccataaaaatatggcacaggaactcaggagcaacaagcccccagtgcgggacgagccaccccaaagcccctcgagaagttttctctaaccacagccccgaaaagccccgccactacgaccactggcacccctgcttatttcctccagaccctcctcggccgtcccaccccatcaagccctcctttcgctcgcatctccaccctccctgcacactgcctaacccagaaaatggccaagcagctgtcagtagccacaatttcatcacagtgcccttgctcaagcgtttccacagaccctttgcaatattacctggcttcatcctcgtggcacctgatgaagtaggcccttctggggcctttgaggcagggagggcaggcgaggactcggggagcctgttgagggtcgcatgtgcaggaggctccaagcaggtgagtatgggaggcaggggccgagacaagcggcgcgtgcggctgacggcccggcccagcccagccctggcggtgactcagagctgggcagcctggcttgctggggcctgcgtgggtactcggaaaatggcagaggcgccttcggcagagaggacattcccagcacagtctcagatccacaccgcctgttccccacagcactccgggcaggcagctgccgcctttcccgacagggagttgcagctgacggccccgcggatccagccaactagaactccaacgggtgcactacacctgagaacaggttcccacagcttcctgttggggacaacgtga

SEQ ID NO: 11612 - DNA, 855 bp, Homo sapiens
  SIMILAR (274)..(429): 981254mologous to Homo sapiens Human secreted protein clone ya67_1 protein sequence SEQ ID NO:44,accession number Y73411,Smith- Waterman Score=263.
atggccgggtactcctctgagacaaaacttccagaggaacgatcagacagcagcattcgcggttcacgaaaatccactgttctgcagacactgctgctgatacccaggcaaacagggattaagaaactcactcaaaaccggtcaactacatggaaactgaacaacctgctcctgaatgactactgggtacataatgaaatgaaggcagaaataaagatgttctttgaaaccaatgagaacaaagacacaacataccagaatctctgggacacattcaaagcagtgtgtagagggaaatttatagcactaaatgcccacaagagaaagcaggaaagatccaaaattgacaccctaacatcacaattaaaagaactagagaagcaagagcaaacacattcaaaagctagcagaaggcaagaaataactaaaatcagagcagaaccgaaggaaatacagacacaaaaaacccttcaaaaaattaatgaatccaggagcttgttttttaaaaggatcaacaaaattgatagaccgctagcaagactaataaagaagaaaagagagaagaatcaaatcgatgcaataaaaaatgataaaggggatatcaccgccaatcccacagaattacaaactaccatcagagaatactacaaacacctctatgcaaataaactagaaaatctagaagaaatggataaattcctggacacatacaccctcccaagagtaaaccaggaagaagttgaatctctgaatacaccaataacaggccctgaaattgtggcaataatcaatagcttactaaccaaaaagggtccaggaccagatggattcacagccaaattctaccagaggtag

SEQ ID NO: 11613 - DNA, 551 bp, Homo sapiens
  SIMILAR (328)..(549): 551254mologous to Homo sapiens p40,accession number U93571,Smith-Waterman Score=201.
tattgggctatgcggtttgacttgtaagccagtagatggcgcttataggtaagagccacttacttccaccatgcccccgccaactgcactgagtttgttcccaggcagctggtgagcagggctgagaacttgccccaggctacaagcctccccactgagaaagcaagtagggctttcagggtgctgctgatacccaggcaaacaaggtctggagtggacctccagcaaactccaacagacctgcagctgagggtcctgattgttagaaggaaaactaacaaacagaaaggacatccacaccaaaatcccatctgtacgtcacccctcagacgatcaaacttctttgagctaaaggaggaagttcgaacccatggcaaagacgctaaaaaccttgaaaaaagattagacaaatggctaactagaatatccagtgtagaaaagtccttaaatgacctgatggagctgagaaccatggcatgagaactatgtgatgaatgcacaagcttcagtagctgattcaatcaactggaagaaagggtatcagtgattga

SEQ ID NO: 11614 - DNA, 1569 bp, Homo sapiens; identical to SEQ ID NO: 1377
  SIMILAR (1)..(894): 981254mologous to Homo sapiens protein phosphatase 2A 48 kDa regulatory subunit,accession number AF135016,Smith-Waterman Score= 1586.

SEQ ID NO: 11615 - DNA, 4965 bp, Homo sapiens; identical to SEQ ID NO: 4740
  SIMILAR (21)..(434): 971254mologous to Homo sapiens sialic acid-specific acetylesterase II,accession number AF303378,Smith-Waterman Score= 726.

SEQ ID NO: 11616 - DNA, 3924 bp, Homo sapiens; identical to SEQ ID NO: 11176
  SIMILAR (409)..(1206): 551254mologous to Mus musculus h2-calponin,accession number Z19543,Smith-Waterman Score=664.

SEQ ID NO: 11617 - DNA, 1047 bp, Homo sapiens; identical to SEQ ID NO: 7491
  SIMILAR (244)..(1029): 931254mologous to Homo sapiens putative p150,accession number U93564,Smith-Waterman Score=1317.

SEQ ID NO: 11618 - DNA, 287 bp, Homo sapiens
  SIMILAR (946)..(1530): 1001254mologous to Homo sapiens unnamed protein product,accession number AK023544,Smith-Waterman Score=999.
atggcagggtactcctctgagacaaaacttccagaggaatgatcaggcagcagcatttgcggttcactaatatctgctgttctgaagccactgctgctgatacccaggcaaatagggtctggagtggacctccagcaaactccaacagacctgcagctgagggtccagcaatggaacaaagctggatggagaatgactttgacaagttgagacaagaaggcttcagaagatcaaagtactccaagctaaaggcggaagttcgaatgaatggcaaagaagttaaaaac

SEQ ID NO: 11619 - DNA, 723 bp, Homo sapiens
  SIMILAR (1)..(315): 781254mologous to Homo sapiens Human follicle stimulating hormone GPR N-terminal sequence,accession number W03627,Smith- Waterman Score=384.
atgatcaggcagcagcatttgcggttcaccaatatccgctgttctgcagccactgctgctgatacccaggcaaacagggtctggagtggaccaccagcaaactccacagacctgcagctgagggtcctgactgttagaaggaaaactaacaaacagaaaggacatccacaccaaaaacccatctgtacgtcaccatcatcaaagaccaaagaaagagtatcagcaatggaagatgaaattaatgaaatgaagcgagaagagaagttcagagaaaaaagagtaaaaagaaatgaacaaagcctccaagaaatatgggactatctgaaaagaccaaatctacgtctgattggtgtacctgaaagtgacggggagaatggaaccaagttggaaaacactctgcaggatattatccaggagaacttccccaatctagcaaggcaggccaacattcaaattcaggaaatacagagaatgccacaaagatactccttgagaagagcaactccaagacacataattgtcagattcaccaaagttgaaatgaaggaaaaaatgttaagggcagccagagagaaaggtcgggttacccacaaagggaagcccatcagactaacagcgatctctcggcagaaactctacaagccagaagagagtgggggccaatattcaacattcttaaagaaaagaattttcaacccagaatttcatatccagccaaactaa

SEQ ID NO: 11620 - DNA, 1260 bp, Homo sapiens; identical to SEQ ID NO: 2484
  SIMILAR (332)..(210): 651254mologous to Homo sapiens Fragment of human secreted protein encoded by gene 4,accession number Y14471,Smith-Waterman Score=129.

SEQ ID NO: 11621 - DNA, 762 bp, Homo sapiens; identical to SEQ ID NO: 988
  SIMILAR (367)..(630): 591254mologous to Homo sapiens Human follicle stimulating hormone GPR N-terminal sequence,accession number W03627,Smith- Waterman Score=276.

SEQ ID NO: 11622 - DNA, 511 bp, Homo sapiens
  SIMILAR (167)..(508): 821254mologous to Homo sapiens p40,accession number U93574,Smith-Waterman Score=478.
ggtcagaccgacacctcacacggccaggtactcctctgagacaaaacttccagaggaacgatcaggcagcaacatttgctgttcacccatatctgctgttctgcagcctctgctgctgatacccaggcaaacagtgtctggagtggacctccagcaaactccaacagacctgcagctgagggcacaagaacatgacgaatgcacaagcctcagtagccgattcgatcaactggaagaaagggtatcagtgatggaagatgaaatgaatgaaaagaagcgagaagagaagtttagagaaaaaagaataaaaagaaatgaacaaagcctccaagaaatatgggactatgtgaaaagaccaaatctacgtgtgattggtgtacctgaaagtgatggggagaatggaaccaagttggaaaacactctgcaggatataatccaggagaacttccccaatctagcaaggcaggccaacattctaattcaggaaatacagagaacaacacaaaaataa

SEQ ID NO: 11623 - DNA, 729 bp, Homo sapiens; identical to SEQ ID NO: 2486
  SIMILAR (379)..(726): 901254mologous to Homo sapiens p40,accession number U93572,Smith-Waterman Score=523.

SEQ ID NO: 11624 - DNA, 1299 bp, Homo sapiens; identical to SEQ ID NO: 2487
  SIMILAR (253)..(1296): 891254mologous to Homo sapiens putative p150,accession number U93567,Smith-Waterman Score=1580.

SEQ ID NO: 11625 - DNA, 1040 bp, Homo sapiens
  SIMILAR (234)..(1037): 861254mologous to Homo sapiens p40,accession number U93569,Smith-Waterman Score=1172.
ggtactcctctgagacaaaacttccagaggaacgatcaggcagcagcatttgcggttcaccaatatctgttgttctgcagccaccgctgctgatacccaggaaaacagggtctggagtggacctccagcaatctccaacagacctgcagctgacggtcctgactgttagaaggaaaactaacaaacagaaagggcatccacaccaaaaacccatctgtatgtcaccttcatcaaagaccaaagacgaatggctaactagaataaccaatgcacaaaagtacttaaaggacctgatggagctgaaaaccatggcacgagagctgcatgacgaaggcacaagcctcagtagccgatgcgatcaattggaagaaagtgtatcagcgatggaagatcaaatgaatgaaatgaagcaagaagaaaagtttagagaaaaaagaataaaaagaaatgaacaaagcctccaacaaatatgggactatgtgaaaagaccaaatctacgtctgattggtatacctgaaagtgacggggagaatggaaccaagttggaaaacactctgcaggatattatccaggagaacttccccaatctagcaaggcaggccaacattcaaattcaggaaatacagagaacgccacaaagatgctcctcgagaacagcaactccaagatacacaattgtcagattcaccaaagttgaaatgaaggaaaaaatgttaagggcagccagagagaaaggtcgggttactcacaaagggaagcccatcagactaacagcagatctttcagcagaaactgtacaagccagaagagagtgggggccaatattcaacattcttaaagaaaagaattttcaacccagaatttcatatccagccaaactgagcttcataagtgaaggagaaataaaatcctttacagacaagcaaatgctgagagattttgtcaccaccagacctgccctaccagagctcctgaaggaagcactaaacatggaaaggaaaaaccagtacaagccactgcaaaaacatgccaaattgtaa

SEQ ID NO: 11626 - DNA, 1251 bp, Homo sapiens; identical to SEQ ID NO: 993
  SIMILAR (242)..(700): 961254mologous to synthetic construct galactosidase fusion protein,accession number A04190,Smith-Waterman Score=754.

SEQ ID NO: 11627 - DNA, 810 bp, Homo sapiens; identical to SEQ ID NO: 2494
  SIMILAR (95)..(331): 671254mologous to Homo sapiens Human follicle stimulating hormone GPR N-terminal sequence,accession number W03627,Smith- Waterman Score=251.

SEQ ID NO: 11628 - DNA, 720 bp, Homo sapiens
  SIMILAR (376)..(720): 911254mologous to Homo sapiens unknown protein,accession number M22333,Smith-Waterman Score=537.
atgaacagtttgctaactgggcagatcccagaatcacagcagattcacagagactccagtgcagccacgtggtggaagaagatttatagacaaaaaatgggaaatgacatagagaaatcggaagtgaggggtggactgacacctcacacagctggatactcctctgagacaaaacttccagagaaacgatcaggcagcagcatttgcggttcaccaatatccgctgttctgcagccaccgctgctgataccgaggcaaacagggtctggagtggacctccagcaaactccaacagacctgaagctgagggtcctgactgttagaaggaaaagtaacaaacagaaaggacatccacaccaaaaacccatctgtacatcaccattgtcaaagaccaaagacagatcaaccagacagaaagttaacaaggatatccaggacttgaactcagctctgcaccaagcggacctaatagacatctacagaactctccaccccaaatcaacagaatatacatttttttcagcaccacaccacacctgttccaaaattgaccacatagttggaagtaaagcactgctcagcaaatgtaaaagaacagaaattatcagaaactatctctcagaccacagtgcaatcaaactagaactcaggattaagaaactcactcaaaaccactcaactacatggaaactgaacaacctgctcctgaatgactactgg

SEQ ID NO: 11629 - DNA, 3252 bp, Homo sapiens; identical to SEQ ID NO: 6598
  SIMILAR (109)..(384): 711254mologous to Homo sapiens Human follicle stimulating hormone GPR N-terminal sequence,accession number W03627,Smith- Waterman Score=336.

SEQ ID NO: 11630 - DNA, 666 bp, Homo sapiens
  SIMILAR (666)..(394): 901254mologous to synthetic construct chloramphenicol acetyltransferase,accession number A02739,Smith-Waterman Score=425.
tcaatccgaatatttagcatatttagcaacatggatctcgcagataccgtcatgttcctgtagggtgccatcagattttctgatctggtcaacgaactgatacagcatacgtttttgatcccgggagagactatatgccgcctcagtgaggtcgtttgactggacgattcgcgggctatttttacgtttcttgtgattgataaccgctgtttccgccatgacagatccatgtgaagtgtgacaagtttttagattgtcacacactgggtactcctctgagacaaaacttccagaggaatgatcaggcagcagcatttgcagttcaccaatatccactgttctgcagccaccactgctgatacccaggcaaacagggtctggagtggacctccggcaaactccaacagacctgcagctgagggtcctgacgtctttcattgccatacggaactccggatgagcattcatcaggcgggcaagaatgtgaataaaggccggataaaacttgtgcttatttttctttacggtctttaaaaaggccgtaatatccagctgaacggtctggttataggtacattgagcaactgactgaaatgcctcaaaatgttctttacgatgccattgggatatatcaacggtggtatatccagtgatttttttctccat

SEQ ID NO: 11631 - DNA, 450 bp, Homo sapiens
  SIMILAR (159)..(248): 901254mologous to Homo sapiens Human secreted protein, SEQ ID NO: 4473,accession number G00392,Smith-Waterman Score=145.
atgaatggaagcagcctgaggccctcaacagcagcagatgctggagctgtgcttcttgcacagcctgcagaactctctggcatctgggacccagccgtggcatgctccagctttgctattgctgctagaggcctgtctcagtctcctgcagtggatacaggaccctcagctgcaggtctgttggagtttgctagaggtccactccagaccctgtttgcctgggtatcagcagcagtggctgcagaacagcggattttcgtgaaccgcgaatgctgctgtctgatcgttcctctggaagttttgtctcagaggagtacctggacatttcatataaacttcagcttctccaaagcctggcctcatcctaataccagtagtgacattaacgccgggccaccaggagataaaacagccaagctgtatctcaagaaactggacaacgtagaatga

SEQ ID NO: 11632 - DNA, 1254 bp, Homo sapiens
  SIMILAR (847)..(1251): 891254mologous to Plasmid F resolvase,accession number AP001918,Smith-Waterman Score=586.
atggcaggattgagactgaccttgccggttatgagggagctggactctgaaaaagcgtttcacaaaatccagcatccctttgtgattaaaaccctctgcaaaatcagcatacaagggacatacctaactgtaataaaagccatctgtgacaaacccacagccaacattatactgaatggggaaaagttgaaagctttccccctgagaactggaacaagacaaggatgcccactttcaccacttctattcaacgtagtactggaagtcctagccagagcaatcaaacaagagaaagaacctaactgggaggcacccccaagtacgggcggactgacacctcacacggccaggtactcctctgagacaaaactttcagaggaacaatcaggcagcagcattggcggttcaccaatatccgttgttctgcagccactgctgctgatacccaggcaaacagggtctggagtggacctccagcaaaatccaacagacctgcagctgagggtcgtgactgttagaaggaaaactaacaaacagaaaggacatccacaccaaacacccatctgtacatcaccatcatcaaagaccaaagcaccacaccacacttatttgaaaattggccacatagttggaagtaaagcactcctcagcaaatgtaaaagaacagaaattagaacaaactgtctctcagaccacagtgcaatcaaactagaactcaggattaagaaactcactcaaaacagctcaactacatggaaactgaacaacctgctcctgaatgactactgggtacataacgaaatgaagtcagaaataaagatggtctttgaaaccaataagaaaaaagactcaacataccagaatctctgggacacgttcaaagcagtatttattcgcgataagctcatggagcggcgtaaccgtcgcacaggaaggacagagaaagcgcggatctgggaagtgacggacagaacggtcaggacctggattggggaggcggttgccgccgctgctgctgacggtgtgacgttctctgttccggtcacaccacatacgttccgccattcctatgcgatgcacatgctgtatgccggtataccgctgaaagttctgcaaagcctgatgggacataagtccatcagttcaacggaagtctacacgaaggtttttgcgctggatgtggctgcccggcaccgggtgcagtttgcgatgccggagtctgatgcggttgcgatgctgaaacaattatcctga

SEQ ID NO: 11633 - DNA, 1035 bp, Homo sapiens
  SIMILAR (820)..(1728): 881254mologous to Homo sapiens unknown,accession number AF149422,Smith-Waterman Score=1441.
atgtggtgccaatcttctgagaccatctttcaggcccatggagagaaactagcagcaacttccaagccaccagaagcctctaaaacaatacattttcactttcactccattctgtctataaattttaaattcatatccaattatggtaaaaatattttatgccccagactgacacctcacacggccgggtactcctctgagacaaaacttccagaggaacgatcaggcagcagcatttgttgttcaccaatatctgttgttctgcagcctctgctgctgatacccaggcaaacaggatctggagtggacctccagcaaactccaacagacctgcagctgagggtcctgactgttagaaggaaaactaacaaacagaaaggacatccacaccaaaaccccatctatatgtcaccatcatcaaagaccaaagtattggaagttctggccagggcaatcaggcaggagaaggaaataaagggtattcaattaggaaaagaggaagtcaaattgtccctgtttgcagatgacatgattgtatatctagaaaaccccatcatcccagcccaaaatctccttaagctgataagcaacttcagcaaagtctcaggatacaaaatcaatgtgcaaaaatcacaagcattcttatacaccaataacagacaaacagacagccaaatcatgagtgaactcccattcacaattgcttcaaagagaagaaaatacctaggaatccaacttacaagggatgtgaaggacctcttcaaggagaactacaaaccactgctcaatgaaataaaagaggatacaaacaaatggaagaacattccatgctcatgggtaggaagaatcagtatcatgaaaatggccatactgcccaaggtaatttatagattcaatgccatccccatcaagctaccaatgactttcttcacagaattggaaaaaactaaagttcatatggaaccaaaaaagagcctgcattgccaagtcaatcctaagccaatagaacaaagctggaggcatcaggctacctga

SEQ ID NO: 11634 - DNA, 1494 bp, Homo sapiens
  SIMILAR (37)..(153): 971254mologous to Arabidopsis thaliana putative protein,accession number AL162506,Smith-Waterman Score=193.
ttatgcagtttttgcccaaatatcttcaaaaatcagcttaaattttctaaatgcaacttcactattctgcaaatcagcaggactcacttcaaacatgtgacccttgaggccatcagatgcagttttggttccttgggtcctggtgactagggtctttccaatatttcttatattgaacacagcaggggctttcacatcatgccaatctttcttagaaaatggatcaactggggtggagccaagatggccaaataggaaaagctccagtctacagctcccagtgtgagcgacacagaagacgggtgatttctgcatttccaactgaggtaccaggttcatctcagtggggagtgccagacagtgggtgtaggacagtgggtgcagcacaccgtgcatgagccgaagcagggcgaggcattgccacacccgggaagcgcaagggtcagggaattccctttccccccagtaggggcggactgacacctcacacggccgggtactcctctgagacaaaacttcccaaggaacaatcaggcagcagcatttgcgggttcaccaatacccgctgttctgcagcatctgctgctgacacccaggcaaacagggtctggagtggtcttccagcaaactccaacagacctgcagctgagggtcctgactgttggaaggaaaactaacaaacagaaaggacatccacaccaaaaccccaactgtacgtcaccatcatcaaagaccaaagacaaaacttccagaggaatgatcaggcagcagcatttgcaggtcaccaatatccgctgttctacagccactgctgctgatacccaggcaaacagggtctggagtggacctctagcaaactccaacagacctgcagctgagggtcctgaggaaattcaaatcaatggcaaagaagttaaaaagtttgaaaaaaaattagacgaatggataactagaataaccaatgcagagaagtccttaaaggagctgatggagctgaaagccaaggctcgagaactatgtgaagaatgcagaagcctcaggagccgatgtgatcaactggaagaaagggtatcagtgatggaagatgaaatgaatgaaatgaagcgagaagggaagtttagagaaaaaagaataaaaagaaatgaacaaagcctccaagaaatatgggactatgtaaaaagaccaaatctacgtctgattggtgtacctgaaagtgacagagagaatggaaccaagttggaaaacactctgcaggatattatccaggagaacttccccaatctagcaaggcaggccaacattcagattcaggaaatacagagaacgccacaaagatactcctcgagaagagcaactccaagacacataattgttagattcaccaaagttgaaatgaaggaaaaaatgttaagggcagccagaaagaaaggtcaggtaacccacaaagggaagcccatcagactaacagcggatctctcagtagaaactctataa

SEQ ID NO: 11635 - DNA, 1325 bp, Homo sapiens
  SIMILAR (80)..(169): 631254mologous to Homo sapiens Neuron-associated protein,accession number B01398,Smith-Waterman Score=102.
attaaagaatttaccctttagctttacaaagctacagcaattgacagctatgtggctctcagataatcagaagtctgggataatattaagaataatcggtgttactgaggaagaagacaattctaaaagcttggaaaacatctttggtggaataatcgaggaaaacttccctggccttgttagagacctagacatacaaatacaagaagcacaaagaatacctgggaaattcatcgcaaaaagatcttcacctaaacacattgtcatcaggttatccaaagttaagacaaaggaaaaaagtcttaagagctgtgaaacagaagcaccagtcacaaccctcagctgcaggtctgttggagttgactggaggtccactccagaccctgtttgcctgggtatcagcagcactggctgcagaacagcggatattggtgaaccgcaaatgctgctgcctgatcattcctctggaagttttgtctcagaggagtaccctgccatggcttcagtgggcgccatgcgattcagcgctggactccgctgggggccgggccttggagaaggcgaactgtgcagggaagcagcagctctggggtccttaccgcccgctccgcccagctgcaccgggtctcctggtgctcctcaggctcctgccgagtctgcgtctctggagggcagcgaaccatcctgcccagaaccttatcctgacagcccagtttgacgcagctgggaagggcgtgtccagggcgctgtccacactggtctcccggaaggcccgctgcacgggcgggtgcttgaagattcctccagggccacctgcaggccccggcgctggcccggatgagaaaatcacagagactgatagtgaaccagaagaaggtgaaattacagactctcagaccgagggtagttatgatgaaggcattaccagtaaaggcaatgcaactgcaaaagatactgaggaggcagatgaggaaaaagtgtggccctcatatatgagagtaattgtcattagatcacctgtgttacagacaggatcattcttcatcattactgctgtaaaatctgctacaattggaagagaaaatgacatggagcatactcttcgaatccctgaaagactcaccttctccaaaacaagaacaacaacaacaagaacaacaactgggacaaagcacaggagaggtttgctgaaaactttcaacaacaacaacaacaacaacaactgggacaaagcacaggagaggtttgctgaaaactttccagaaactaaacttcaaaaagatgacctaggaaccattccttgggtaaaagggactgaggagtga

SEQ ID NO: 11636 - DNA, 2606 bp, Homo sapiens
  SIMILAR (265)..(726): 601254mologous to Cloning vector pTM30 repressor LacI- q,accession number AF023620,Smith-Waterman Score=361.
ttaggtcaatccgaatatttcagcatatttagcaacatggatctcgcagataccgtcatgttcctgtagggtgccatcagattttctgatctggtcaacgaacagatacagcatacgtttttgatcccgggagagactatatgccgcctcagtgaggtcgtttgactggacgattcgcgggctatttttacgtttcttgtgattgataaccgctgtttccgccatgacagatccatgcgaagtgtgacaagtttttagattgtcacagtggataaccccagggaaagtctttaggcaccgcgcgtaagcccatatataagtgctgtgtcctgccgcttcctcgctaatcgagggttcgccctgtcgttcacctgcggcgagcaccaatggtctgccaaggacacaccacccccccggtctgcggttctctggctggtcctggcgactgcgtgcattattccgttccggccgggtactcctctgagacaaaacttccagaggaacgatcaggcagcaacatttgctgttcaccaatatctgctgttctgcagcctcagctgctgatacccaggcgaacagggtctggagtggacctccagcaaactccaacagacctgcagctgagggtcctgactgttagaaggaaaactaacaaacagaaaggacatccacaccaaaaacccatctgtatgtcaccatcatcaaagaccaaaggatcaaattcacacataacaatattaaccttaaatgtaaatgggctaaatgctccaattaaaagacacagactggcaaattggataaagagtcaagacccatcagtgtgctgtattcaggagacccatctcacgtgcagagacacacacaggatcaaaataaagggatggagggagatctaccaagcaaatggaaaacaaaaaaaggcaggggttgcaatcctagtctctgataaaacggactttaaaccaacaaagatcaaaagagacaaagaaggccattacatgatggtaaagggatcaattcaacaagaagagctaactaccctaaatatatatgcacccaatacaggagcacccagattcataaagcaagtccttagagacctacaaagagacttagactcccacacattaataatgggagactttaacaccccactgtcaacattagacagatcaacgagacagaaagttaacaaggatatccaggatttgaactcagctctgcaccaagtggacctaatagacatctacagaactctccaccccaaatcaacagaatatacattcttctcagcactacaccacatttattccaaaattgaccacatagttggaagtaaagcactcctcagcaaatataaaacaacagaaattataacaaactgtctctcagaccacagtgcaatcaaactcgaactcaggattaagaaactcactcaaaaccgctcaactacatggaaactgaacaacctgctcctgaatgactactgggtacataacaaaatgaaggcagaaataaatacattatttgaaaccaacgagaacaaagacacaacataccagaatctctgggacacattcaaagcagtgtgtagagggaaattcatagcactaaatgcccacaagagaaagcaggaaagatctaaaattgacaccctaacatcacaattaaaagaactagagaagcaagaacaaacacattcaaaagctagcagaaggcaagaaataactaagatcagagcaaaactgaaggaaatagagacacaaaaaatccttcaaaaaatcaatgaatccaggagctggttttttgaaaagatcaacaaaattgatagaccactagcaagaccaataaagaagaaaagagagaagaatcaaatagatgcaataaaaaatgataaaggggatatcaccactgatcccacagaaatacaaactaccatcagagaatactataaacacctctatgcaaataaactagaaaatctagaagaaatggataaattcctcaacacatacaccctcccaagactaaaccaggaagaagttgaatctctgaataaaccaataacaggctctgaaattgaggcaataattaatagcttaccaatcaaaaaaagtccaggaccagatggattcatagccaaattccaccagaggtacaaggaggagctggtaccattccttctgaaactattccaatcaatagaaaaagagggaatcctccctaactcattttatgaggccagcatcatcctgacaccaaagcctggcagagacacaacaaaaaaagagagttttagaccaatatccctgatgatcatcaatgcaaaaatcctcaataaaatactggcaaaccgaatccagcagcacatcaagaagcttatccaccatgatcaagtgggcttcatccctgggatgcaagactggttcaaaatatgcaaatcaataaacgtaatccagcatataaacagaaccaaagacaaaaaccacatgattatctcaatagatgcagaaaaggcctttgacaaaattcaacaactcttcatgctaaaaactctcagtaaattaggtattgatgggacgtatctcaataagagctatctatga

SEQ ID NO: 11637 - DNA, 1717 bp, Homo sapiens
  SIMILAR (16)..(594): 1001254mologous to Escherichia coli K12 putative synthetase,accession number AE000181,Smith-Waterman Score=1014.
atgatcataattgtgccactgtactccagcctgggtgacagagtgaaatcttgtgaaaagaagagagagagagagagagagagaagaaagaaagaaagaaagaaagaaagaaagaaagaaagaaagaaagaaagaaagaaggcaagcagtaaagaaagggaggaaggaagaaagaaagaaaggagaaagaaattaagaaagaaagaagaaaaggaaagaaagaaaagaaagaagaagagaagagaaggaaggaaagaaagaaagaaagagaaagaaagaaaagaaggaaagaaggaagaaagaaagaatataccaggaaagcgaagagaatccacagaccctttgaaggaaatggatcaccgctgcctgctccctgagatgctgaaaggaacctggtggacaacacctgctagagcttccggcccagcagtcccacttctgtgtgaattcaggcagtggacagtggacacaacctctgttgtcccagaaagcacccacatgccagggcagatgacccaacccatccctgcccctgatagccacaacatggatgaagctggaggccattatcctaagcagactaacacaagaccagaaaaccaaatactgcatgttttcactgataagtgggagctaaacactgagtacaaggacccaaagaagagaacaacagacaccagggcctacttgagggtggaggccacgctggcagctgattggatggtgcccacccagattgagggtaggtcttcctttgttctagccacgctggcagctgattggatggtgcccacccagattgagggtagatcttcctttgttctagccacgctggcagctgattggatggtgcccacccagactgagggtagatcttcctttgttctagccacgctggcagccgattggatggtgcccacccagattgagggtaggggcagaatgacacctcacatggccgggtactcctctgagacaaaacttccagaggaacgatcaggcagcagcatttgcggttcaccaatatccgctgttctgcagccaccactgctgatacccaggcaaacagggtctggagtggacctccagcaaactccaacagacctgcagcttagggtcctgactgttagaaggaaaactaacaaacagaaaggacatccacaccaaaaacccatctgtacgtcaccatcatcaaagaccaaaggtagataaaaccacaaagatggggagaaaacagagcagaaaaaccggaaactctaaaaatcagagtgcctctcctcctccaaaggaacgcagctcctcaccagcaacggaacaaaactggacagagaatgactttgatgagttgagagaggaaggcttcagaagatcaaactactccgagctaaaggaggaagttcgaaccaatgccaaagaagttaaaaactttgaaaaaaaattagacgaatggataactagaataaccaatgcagagaagtccttaaaggacctgatggagctgaaaaccacagcacgagaactacgtgacgaatgcacaagccccagtagccaatgcaaccaattagaagaaaggatatcagcgatggaagacaaaatgaatgaaatgaagcgagaagagaagtttagagaaaaaagaataaaaagaaaagaaacaaagcctccaagaaatatgggactatgtgaaaagaccaaatctatgtctgattggtgtacctga

SEQ ID NO: 11638 - DNA, 3549 bp, Homo sapiens
  SIMILAR (25)..(696): 981254mologous to Rattus norvegicus cytoplasmic dynein heavy chain,accession number D13896,Smith-Waterman Score=1132.
atgtggccaaaaggaaactatgtggtcacacgcagtgttactttgggaagccattttattccactggagaccttgaaaaacaatagaagagaggcaatcctaagagggaaatcaataggaagccttgaaggagaaaaactggaggacggacttgtttttccagaggaactggaagaggaaactggtatcattgtgatcaggaccctcagctgcaggtctgtcggagtttgctggaggtccactccagaccctgtttgcctgggtatcagcagcagaggctgcagaacagcggatattggtgaacagcaaatgttgctgcctgatcgttcctctggaagttttgtctcagaggagtacccggccgttggttttgccaagagcaaattgcccaagacgtttaggtcagtggtcaccaaagctgatccacaggttggatgcagcccatggtgtgatccaatttttccagtacaccgaggcaagaactctgggataaagagagccctctgtccttgcgacaagagaccacagtccagtcatcatggcacacatcgtcttcaacgtattgctcaaaggcctttctcagagagtgagatctgcaggtcactgtgcgactctaacagcagcccagcagagagctgtgctggagaaaccgagcacaatggctggccagaggcagttgggcagtcagtcctgcgcatcagaggctgctgctccccaggaaacagccagcagcccaggggagaatacttggtgcacagcaaagtaaatcattgcttgaccctcagcccacatgggaaaaccacccctaacattacaacagcagtaacaacaacaaacatctacgtgagctttctacagcctctgatgacttatacttctagcaggactaataagaagaaaagagagaagaatcaaatagacacaataaaaaatgacaaaggggatatcaccaccgatcccacagaaacacaaactaccatcagagaatactataaacacctctacgcaaataaaatagaaaatccagaagaaatggataaattcctcaacacatacactctcccaagactaaaccaggaagaagttgaatctctgaacagaccaataacaggctctgaaattgaggcaataattaatagcttaccaaccaaaaagagtccaggaccagatggattcacagccgaattctaccagaggtacaaggaggagctggtaccattccttctgaaactattccaatcaatagaaaaagagggaatcctccttaactcattttgtgaggccagcatcatcctaataccaaagcctggcagacacacaacaaaaaaagagaattttagaccaatatccttgatgaacattgatgtaaaaatcctcaataaaatactggcaaaccgaatccagcaacacatcaaaaagcttatccaccatgatcaagtgggcttcatccctgggatgcaaggctggttcaacatacgcaaatcaataaacgtaatccagcatataaacagaaccaaagacaaaaaccacatgattatctcaatagatgcagaaaaggcctttgacaaaattcaacaacccttcatgctaaaaactctcaataaattagctattgatgggacatatatcaaaataataagagctatctatgacaaacccacagccaatatcatgctgaatgaacaaaaactggaagcattccctttgaaaactggcacaagacagggatgccctctctcaccactcctattcaacatagtgttggaagttctggccagggcaatcaggcaggataaagaaataaaaggtattcaattaggaaaagaggaagtcaaattgtccctgtttgcagatgacatgattgtatatttagaaaaccccattgtctcagcccaaaatctccttaagctgataagcaacttcagcaaagtctcaggatacaaaatcaatgtgcaaaaatcacaagcattcttatataccaataacagacaaacagagagccaaaccatgagtgaactcccattcacaattgcttcaaagagaataaaatacctaggaatccaacttacaagggatgtgaaggaccgcttcaaggagaactacaaatcactgctcagtgaaataaaagaggatacaaacaaatggaagaacattccatgctcatgggtaggaagaatcaatatcgtgaaaatggccatactgcccaaggtaatttatagattcaatgccattcccatcaagctaccaatgactttcttcacagaattggaaaaaactactttaaagttcatacggaaccaaaaaagagcccgcatcgccaagtcaatcctaagccaaaagaacaaagctggaggcatcacactacttgacttcaaactatactacaaggctacagtaaccaaaacagcatggtactggtaccaaaacagacatgtagaccaatggaacagaacagagccctcagaaataatgctgcatatctacaactatctgatctttgagaaacctgacataaacaagcaatggggaaaggattccctatttaataaatggtgctgggaaaactggctagccatatgtagaaagttgaaactggatcccttccttacatcttatacaaaaattaattcaagatggattaaagacttaaatgttagacctaaaaccataaaaaccctagaagaaaacctaggcaataccattcaggacataggcatgggcaaggacttcatgtctaaaacaccaaaagcaatggcaacaaaagccaaacttgacaaatgggatctaattaaactaaagagcttctgcacagcaaaagaaactaccatcagagtgaagaggtattcttctgagacaaaacttccagaggaacgatcaggcagcagcatttgcggttcaccaatatctgctgttctggagccactgctgctgatacccaggcaaacagggtctggagtggacctccagcaaactccaacagacctgcaactgagggtcctgactgttagaaggaaaactaacaaacagaaaggacatccacaccaaaaacgcatctgtacgtcaccatcatcaaagaccaaagagaagtccttaaaggacctgatggagctgaaaaccatggcacgagaactacgtgatgaatgcacaagcctcagtagccaatgcgatcaactggaagaaagtatatcagcgatggaagaagaaatgaatgaaatgaagcaagaagagaagtttagagaaaaaagaataaaaagaaatgaacaaagcctccaagaaatatgggactatgtgaaaagaccaaatctacatctgattggtgtacctgaaagtgatggggagaatggaatcaagttggaaaacactctgcaggatattatccaggagcacttccccaatcgagcaaagcaggccaacactcaagttcaggaaatacagaaaatgccacaaagatactcttcgagaagagcaattccaatacacataattgtcagattcaccaaagttgaaatgaaggaaaaaatgttaagggcagccagagagaaaggtcag

SEQ ID NO: 11639 - DNA, 650 bp, Homo sapiens
  SIMILAR (389)..(478): 961254mologous to Homo sapiens F-box protein Fbx25,accession number AF174605,Smith-Waterman Score=169.
atgaggaacgcctttgctctaaggcgaccaccctggcagctcttcactgaggggcctcggtttccacatctgtcgctctccggtcccaagaccaccaggaccgacggggctctccgggaggagcagggcgcgggaggaggcggctcgggctggctcggagagctgaggggcgcacacccgcttcgcagggccagggtgacacggaagcatgcgacggctgctgatccctctggccctgtggctgggtgcggtgggcgtgggcgtcgccgagctcacggaagcccagcgccggggcctgcaggtggccctggaggaatttcacaagcacccgcccgtgcagtgggccttccaggagaccagtgtggagagcgccgtggacacgcccttcccagctggaatatttgtgaggcttggaatttaagctgcagcagacaagctgccggaagagggactggaagaaacccgagtgcaaagtcaggcccaatgggaggaaacggaaatgcctggcctgcatcaaactgggctctgaggacaaagttctgggccggttggtccactgccccatagaggacccaagttctgcgggaggctgaggagcaccaggagacccagtgcctcagggtgcagcgggctggtgaggacccccacag

SEQ ID NO: 11640 - DNA, 414 bp, Homo sapiens
  SIMILAR (3)..(125): 951254mologous to Homo sapiens Mih1/TX isoform gamma,accession number U28978,Smith-Waterman Score=216.
acaacgtgtcctggagagacagcacaatgggctctatcttcatcacacaactcatcacatgcttccagaaatattcttggtgctgccacctagaggaagtatttcggaaggtaagtgtctcttttctagttactcatttatttcttcaggaagaatttgtcatgattcactttttacttcacaatgacaatttttgtcagggaagtgaaagtagagaggtacccagtttctgtcattcagttgtttaaaatatggctaaggaaaagacaattccaatatatcccagcagaagatcaaagtaaaataaaataatatcaaccataagctttatgttatggagcgtaagttcttaagttttagagaaggaaaattatttcttaatttattaaatgaataaaatctgggtggtctgct

SEQ ID NO: 11641 - DNA, 594 bp, Homo sapiens
  SIMILAR (1)..(792): 721254mologous to Homo sapiens F-box protein Fbx25,accession number AF174605,Smith-Waterman Score=890.
  misc_feature (1)...(594): n = a,t,c or g
atgcccgcacactgctctccactgctttatgccactctgttcctctngctcctctcgnatattcaaccacttgtgtctgtgcttgatgagaaaccatccaacggtgttctggtccacatggtgaagttgctgatcaagacctttctagatggcatttttgatgatttgatggaaaataatgtattaaatacagatgagatacaccttataggaaaatgtctaaagtttgtggtgagcaatgctgaaaacctggttgatgatatcactgagacagctcaaactgcaggcaaaatatttagggaacacctgtggaattccaaaaaacagctgagttcagttcatggaagtgagcatgaggacaaagctttaacttgccactgggttgggcaccctggatttccagaaaagctgaaagagagaaaaaaattctgtggcataatggtggtgggattgtttggtttcaccactgacagtggaaaagccggtgcagatattcatggtcggttcttgcaaggtaacttctgtaatgatgctgttacaaaggctcatgtggaaaaggactttcattgctttcaaatcttccacaccacataa

SEQ ID NO: 11642 - DNA, 604 bp, Homo sapiens
  SIMILAR (40)..(216): 791254mologous to Homo sapiens Mih1/TX isoform beta,accession number U28977,Smith-Waterman Score=237.
ttcagtgctgtaagagaggacggaggctgttatctatggcagatctatccaataaaggagagaatggaccgcatacgcctggttctcatcatatgcaataaagagtttgaccatctgcctccaagaaatggggctgactttgccatcatggagatgaagaagctgcttgaggatctgggttacagtgtggatgtagaagagaatctgacagccaggataacgtgtcccagggagagacgggcaccaaggggcttcccatcttcatcacacaactcatcgcatgcttccagagatattcctggcgctgccaccttagaggaagtattttggaaggttcagcaagcatttgaaagtccggaggcaacagtccaaatgcccaccatagaacgagtgtccatgacaagatatttctacctctttcctggcaactgaaaatggttaagcattgagagttgttggtggtgtatgaaataaatgaaagtgtgatattggagcaggataccacaagcagcccagccctcctttatcaacttcaagaaacacctttactagtacagattgaatgcttaacattttgtatttcaataaaggtgaagacaaatga

SEQ ID NO: 11643 - DNA, 1196 bp, Homo sapiens
  SIMILAR (1)..(465): 921254mologous to Homo sapiens ribosomal protein L21,accession number X89401,Smith-Waterman Score=752.
ctcttctggaaatccagggtgcccaacccagtggcaagttaaagctttgtcctcatgctcacttccatgaactaaagacaaaaagggcagatgaggaaatggaaacagcactaaggcagtttgctgctcacccagagcaccagtcctcagacagcacattcctggtgtttatgtcacatagcatcctgaatggaatctgtgggaccaagcactgggatcaagagccagatgttcttcacgatgacaccatctttgaaattttcaacaaccgtaactgccagagtctgaaagacaaacccaaggtcatcatcatgcaagcctgccgaggcaataatgtttcttggagacatgaaacaaatggctctgtcttcatttcccaaattatctactacttcagagagtattcttggagtcatcatctagaggaaatttttcaaaagatctatccaataaaggagagaaaggaccgcatacgcctggttctcatcatatgcaataaagagtttgaccatctgcctccaagaaatggggctgactttgccatcatggagatgaagaagctgcttgaggatctgggttacaataacgtgtccaggagagacagcacaaggggctccatcttcatcacacaactcatcgcatgcttccagagatattcctggcgctgccacctagaggaagtattttggaagctttttcctgtccggggagcaggagaagccatggctgatggcatttttgatgatttgatggaaaataatgtgttaaatacagatgagatacaccttataggaaaatgtctaaagtttgtggtgagcaatgctgaaaacctggttgatgatatcactgagacagctcaaattgcaggcaaaatatttagggaacacctgtggaattccaaaaaacagctgagttcagatactttcaagatctgggagcttcaggttccttgctcccttggctttgccgttgataacttcctgtccaatcctaccaaagtctggaactggaacatccaagggttgcccttagacgccttctctactgagaatggcatcatcatcaagcgaggccataggtgggcacgggtaatacaaacaaaaagagctggagaatggtccaggtccaaacatagctactttcaaaccgttgataactgggatgaaaaacaagaatttcgtgatggtattgtttaa

SEQ ID NO: 11644 - DNA, 1800 bp, Homo sapiens
  SIMILAR (1)..(477): 861254mologous to Homo sapiens ribosomal protein L21,accession number X89401,Smith-Waterman Score=723.
attccagaatgactatcttgacttacccctttaaaaatcttcccactgcatcaaaatgggccctcagattttccataagacctctgagctgttcctcccagctacgagctgccccagctgtccagaccaaaacgaagaagacgttagccaaacccaatataaggaatgttgtggtggtggatggtgttcgcactccatttttgctgtctggcacttcgctgcccttggagctggcttctctgacaagactcctgctcacactgtcaccatggcttgtatctctgccaaccaagccatgaccacaggtgttggcttgattgcttctggccagtgtgatgtgatcgtggcaggtggtgttgagttgatgtccgatgtccctattcgtcactcaaggaaaatgagaaaactgatgcttgatctcaataaggccaaatctatgggccagcgactgtctttaatctctaaattccgatttaatttcctagcacctgagctccctgcggtttctgagttctccaccagtgagaccatgggccactctgcagaccgactggccgctgcctttgctgtttctcggctggaacaggatgaatatgcactgcgctctcacagtctagccaagaaggcacaggatgaaggactcctttcagatgtggtacccttcaaagtaccaggaaaagatacagttaccaaagataatggcatccgtccttcctcactggagcagatggccaaactaaaacctgcattcatcaagccctacggcacagtgacagctgcaaattcttctttcttgactgatggtgcatctgcaatgttaatcatggcggaggaaaaggctctggccatgggttataagccgaaggcatatttgagggattttatgtatgtgtctcaggatccaaaagatcaactattacttggaccaacatatgctactccaaaagttctagaaaaggcaggattgaccatgaatgatattgatgcttttgaatttcatgaagctttctcgggtcagattttggcaaattttaaagccatggattctgattggtttgcagaaaactacatgggtagaaaaaccaaggttggattgcctcctttggagaagtttaataactggggtggatctctgtccctgggacacccatttggagccactggctgcaggttggtcatggctgctgccaacagattacggaaagaaggaggccagtatggcttagtggctgcgtgtgcagctggagggcagggccatgctatgatagtggaagcttatccaaaataatagatccagaagaagtgacctgaagtttctgtgcaacactcacactaggcaatgccatttcaatgcattactaaatgacatttgtagttcctagctcctcttaggaaaacagttcttgtggccttctattaaatagtttgcacttaagccttgccagtgttctgagcttttcaataatcagtttactgctctttcagggatttctaagccaccagaatctcacatgagatgtgtgggtggttgtttttggtctctgttgtcactaaagactaaatgagggtttgcagttgggaaagaggtcaactgagatttggaaatcatctttgtaatatttgcaaattatacttgttcttatctgtgtcctaaagatgtgttctctataaaatacaaaccaacgtgcctaattaattatggaaaaataattcagaatctaaacaccactgaaaacttataaaaaatgtttagatacataaatatggtggtcagcgttaataaagtggagaaatattgga

SEQ ID NO: 11645 - DNA, 1641 bp, Homo sapiens
  SIMILAR (1233)..(736): 981254mologous to Escherichia coli Periplasmic oligopeptide- binding protein precursor,accession number D90771,Smith-Waterman Score=881.
atgctcccacgctccccgacccccaatccccaggacccgcaggacctccggaggaacgcccgccagcccgcccggagccacgcggcacaaggtgacacggaccgcgccgcgcggcccctcagccgcctgggcgaggccgggagcagggagaggggcatccgccggcccgcggtaccttgtacttatcaaagccagccagctgctccgggctcacccagccatgacgacccgaaaactgagcgcccactcggcagcgactcccggctacaaggctgtgacacacaagcaccacaccggctgggcaaggatggcaaagactgggctgcccgagaagctctcttcgtcgcttcatttgctagcgtcaaaattggtgagctgaggggtttgttgcatcggaccagtgtccctaaggaagtagttgattatatcatctttggtacagttattcaggaagtgaaaacaagcaatgtggctagagaggctgcccttggagctggcttctctgacaagactcctgctcacactgtcaccatggcttgtatctctgccaaccaagccatgaccacaggtgttggcttgattgcttctggccagtgtgatgtgatcgtggcaggtggtgttgagttgatgtccgatgtccctattcgtcactcaaggaaaatgagaaaactgatgcttgatctcaataaggccaaatctatgggccagcgactgtctttaatctctaaattccgatttaatttcctagcacctgagctccctgcggtttctgagttctccaccagtgagaccatgggccactctgcagaccgactggccgctgcctttgctgtttctcggctggaacaggatgaatatgcactgcgctctcacagtctagccaagaaggcacaggatgaaggactcctttctgatgtggtacccttcaaagtaccaggaaaagatacagttaccaaagataatggcatccgtccttcctcactggagcagatggccaaactaaaacctgcattcatcaagccctacggcacagtgacagctgcaaattcttctttcttggctaggggagtggaatctggagtagttccaacaggatggaacaccaccctgttaagcccaggtggtgaagagctggttaggttggtcatttgcaaaaccgaattggatgatagagccatgtggcatggactacacttgccagatctgaatccttttgattatttccagggtatgctaaaggtccaggtttatttaactgatggtgcatctgcaatgttaatcatggcggaggaaaaggctctggccatgggttataagccgaaggcatatttgagaccaacatatgctactccaaaagttctagaaaaggcaggattgaccatgaatgatattgatgcttttgaatttcatgaagctttctcgggtcagattttggcaaattttaaagccatggattctgattggtttgcagaaaactacatgggtagaaaaaccaagaagtttaataactggggtggatctctgtccctgggacacccatttggagccactggctgcaggttggtcatggctgctgccaacagattacggaaagaaggaggccagtatggcttagtggctgcgtgtgcagctggagggcag

SEQ ID NO: 11646 - DNA, 3213 bp, Homo sapiens
  SIMILAR (61)..(597): 371254mologous to Mus musculus ribosomal protein L21,accession number U93863,Smith-Waterman Score=127.
atggtctgttcggctgccccactgctgctcctggccacaactcttcccctgctggggtcaccagttgcccaagcatcccaacctctttggccgatggccaagggccagacaatgtgggcccagacctccaccctcaccctgacagaggaggagttgggacagagtcaggctggaggggaatctggatctgggcagctcctggaccaagagaatggagcaggggaatcagcgctggtctccgtctatgtacatctggactttccagataagacctggccccctgaactctccaggacactgactctccctgctgcctcagcttcctcttccccaaggcctcttctcactggcctcagactcacaacagagtgtaatgtcaaccacaaggggaatttctattgtgcttgcctctctggctaccagtggaacaccagcatctgcctccattaccctccttgtcaaagcctccacaaccaccagccttgtggctgccttgtcttcagccatcccgaacccgggtactgccagttgctgccacctgtccccgggatcctcaacctgaactcccagctgcagatgcctggtgacacgctgagcctgactctccatctgagccaggaggccaccaacctgagctggttcctgaggcacccagggagccccagtcccatcctcctgcagccagggacacaggtgtctgtgacttccagccacggccaggctgccctcagcgtctccaacatgtcccatcactgggcaggtgagtacatgagctgcttcgaggcccagggcttcaagtggaacctgtatgaggtggtgagggtgcccttgaaggcgacagatgtggctcgacttccataccagctgtccatctcctgtgccacctcccctggcttccagctgagctgctgcatccccagcacaaacctggcctacaccgcggcctggagccctggagagggcagcaaagcttcctccttcaacgagtcaggctctcagtgctttgtgctggctgttcagcgctgcccgatggctgacaccacgtacgcttgtgacctgcagagcctgggcctggctccactcagggtccccatctccatcaccatcatccaggatggagacatcacctgccctgaggacgcctcggtgctcacctggaatgtcaccaaggctggccacgtggcacaggccccatgtcctgagagcaagaggggcatagtgaggaggctctgtggggctgacggagtctgggggccggtccacagcagctgcacagatgcgaggctcctggccttgttcactagaaccaagctgctgcaggcaggccagggcagtcctgctgaggaggtgccacagatcctggcacagctgccagggcaggcggcagaggcaagttcaccctccgacttactgaccctgctgagcaccatgaaatacgtggccaaggtggtggcagaggccagaatacagcttgaccgcagagccctgaagaatctcctgattgccacagacaaggtcctagatatggacaccaggtctctgtggaccctggcccaagcccggaagccctgggcaggctcgactctcctgctggctgtggagaccctggcatgcagcctgtgcccacaggaccaccccttcgccttcagcttacccaatgtgctgctgcagagccagctgtttggacccacgtttcctgctgactacagcatctccttccctactcggcccccactgcaggctcagattcccaggcactcactggccccattggtccgtaatggaactgaaataagtattactagcctggtgctgcgaaaactggaccaccttctgccctcaaactatggacaagggctgggggattccctctatgccactcctggcctggtccttgtcatttccatcatggcaggtgaccgggccttcagccagggagaggtcatcatggactttgggaacacagatggttcccctcactgtgtcttctgggatcacagtctcttccagggcagggggggttggtccaaagaagggtgccaggcacaggtggccagtgccagccccactgctcagtgcctctgccagcacctcactgccttctccgtcctcatgtccccacacactgttccggaagaacccgctctggcgctgctgactcaagtgggcttgggagcttccatactggcgctgcttgtgtgcctgggtgtgtactggctggtgtggagagtcgtggtgcggaacaagatctcctatttccgccacgccgccctgctcaacatggtgttctgcttgctggccgcagacacttgcttcctgggcgccccattcctctctccagggccccgaagcccgctctgccttgtgccgccttcctctgtcatttcctctacctggccacctttttctggatgtggcgcaggccctggtgttggcccaccagctgctctttgtctttcaccagctggcaaagcaccgagttctccccctcatggtgctcctgggctacctgtgcccactggggttggcaggtgtcaccctggggctctacctacctcaagggcaatacctgagggagggggaatgctggttggatgggaagggaggggcgttatacaccttcgtgggccagtgctggccatcataggcgtgaatgggctggtactagccatggccatgctgaagttgctgagaccttcgctgtcagagggacccccagcagagaagcgccaagctctgctgggggtgatcaaagccctgctcattcttacacccatctttggcctcacctggggctggcctggccactctgttagaggaagtctccacggtccctcattacatcttcaccattctcaacaccctccagggcgtcttcatcctattgtttggttgcctcatggacaggaaggccggggccgtggctggcataagcagagcatttacctctcccgcagatacaagaagctttgcgcaaacgcttctgccgcgcccaagcccccagctccaccatctccctggccacaaatgaaggctgcatcttggaacacagcaaaggaggaagcgacactgccaggaagacagatgcttcagagtgaaccacacacggacccatgttcctgcaagggagttgaggctgtgtgcttgaacccaccagatgagccctggcccaatgctctgaactcttcccgcctcccggagctcagcccttga

SEQ ID NO: 11647 - DNA, 360 bp, Homo sapiens
  SIMILAR (574)..(1584): 881254mologous to Homo sapiens p40,accession number U93564,Smith-Waterman Score=1521.
ggtcagattttggcaaattttaaagccatggattctgattggtttgcagaaaactacatgggtagaaaaaccaaggttggtcatggctgctgcaacagattacggaaagaaggaggccagtatgcgttagtggctgcgtgtgcactggcagggcagggcgtcttcatcctattgtttggttgcctcatggacaggaagatacaagaagctttgcgcaaacgcttctgccgcgcccaagcccccagctccaccatctccctggtgagttgctgccttcagatcctcagctgtgcatccaagagcatgtcagaaggcattccatggccctcctcagaggacatgggcacagccagaagctga

SEQ ID NO: 11648 - DNA, 2017 bp, Homo sapiens
  SIMILAR (202)..(993): 861254mologous to Homo sapiens p40,accession number U93569,Smith-Waterman Score=1157.
cttgctccgagagggagtcctcgcggacgtcagccaagattccagaatgactatcttgacttacccctttaaaaatcttcccactgcatcaaaatgggccctcagattttccataagacctctgagctgttcctcccagctacgagctgccccagctgtccagaccaaaacgaagaagacgttagccaaacccaatataaggaatgttgtggtggtggatggtgttcgcactccatttttgctgtctggcacttcatataaagacctgatgccacatgatttggctagagcagcgcttacgggtttgttgcatcggaccagtgtccctaaggaagtagttgattatatcatctttggtacagttattcaggaagtgaaaacaagcaatgtggctagagaggctgcccttggagctggcttctctgacaagactcctgctcacactgtcaccatggcttgtatctctgccaaccaagccatgaccacaggtgttggcttgattgcttctggccagtgtgatgtgatcgtggcaggtggtgttgagttgatgtccgatgtccctattcgtcactcaaggaaaatgagaaaactgatgcttgatctcaataaggccaaatctatgggccagcgactgtctttaatctctaaattccgatttaatttcctagcacctgagctccctgcggtttctgagttctccaccagtgagaccatgggccactctgcagaccgactggccgctgcctttgctgtttctcggctggaacaggatgaatatgcactgcgctctcacagtctagccaagaaggcacaggatgaaggactcctttctgatgtggtacccttcaaagtaccaggaaaagatacagttaccaaagataatggcatccgtccttcctcactggagcagatggccaaactaaaacctgcattcatcaagccctacggcacagtgacagctgcaaattcttcttttctttgactgatggtgcatctgcaatgttaatcatggcggaggaaaaggctctggccatgggttataagccgaaggcatatcttgacgggattttatgtatgtgtctcaggatccaaaagattcacttattacttggaccaacatatgctactccaaaagttctagaaaaggcaggattgtaccatgaatgatattgatgcttttgaatttcatgaagctttctcggggtcagattttggcaaattttaaagccatggattctgattggtttgcagaaaaactacatggggtagaaaaaaccaaggtttggattgcctcccctttggagaaggtttaataactgggggtggatctctgtccctgggacacccatttggagccactggctgcaggttggtcatgacctgctgccaacagattacgggaagaagggagggccagtatggcttaggtggcctgcgtgtgcagctggagggcagggccatgctattgatagtgggaagcttatccaaaataatagatccagaagaagtgacctgaagtttctgtgcaacactcacactaggcaatgccatttcaatgcattactaaatgacatttggtagttcctagctcctcttaaggaaaacagttcttggtgggccttctattaaatactttgcacttaagccttgccagtgttctgagcttttcaataatcagtttactgctctttcagggatttctaagccaccagaatctcacatgagatgtgtgggtggttgtttttggtctctgttgtcactaaagactaaatgagggtttgcagttgggaaagaggtcaactgagatttggaaatcatctttgtaatatttgcaaattatacttgttcttatctgtgtcctaaagatgtgttctctataaaatacaaaccaacgtgcctaattaattatggaaaaataattcagaatctaaacaccactgaaaacttataaaaaatgtttagatacataaatatggtggtcagcgttaataaagtggagaaatattggaaaaaaaaa

SEQ ID NO: 11649 - DNA, 645 bp, Homo sapiens
  SIMILAR (1204)..(2052): 731254mologous to Homo sapiens p40,accession number U93569,Smith-Waterman Score=1034.
atggatgtcatcagcattgacaagactggagagaatgtccgtctgatctatgacaccaagggtcactctgctgttcatcatattacatctgaggaggctaagtacaagttgtgcaaagtgagaaaaatctttgtgggtacaaaaggaattcctcatctggtgattcatgatgttcacactatccactaccctgatcccctcatcaaggcagtgctcccaggagaaatctctaaggaagaagagcaggagcagggaaaaggaggaagccaagcaatggtgcatctagccaaggatggctccagcctgatgaaatcagggaaacttctgttcttaggcaaggagcctggggcttttatttcatactcccaaacctcccaatcatgggatgggggtggagaatgtaattcccagccattgcctgctctctatgctgccagcaaagcaggctgtagcagtacaggcacagtcctccaaaaagaaccccagatgctagctgttagaagcaaaggaaagtccaagggaatgggagcatgggtgctaaaaggaatctgggcagaaacaccaacattattcaccacttccactgttggagtgcagagaacaataccccaaagtatgatgctttgtcatgccgaacacttctga

SEQ ID NO: 11650 - DNA, 1028 bp, Homo sapiens
  SIMILAR (671)..(958): 691254mologous to Gallus gallus ribosomal protein S4,accession number L24368,Smith-Waterman Score=262.
ctgggcggacagctgaaaatccggcgcgcgcagtctccagccccaatttctacgcgcaccggaagacggaggtcctctttccttgcctaacgcagccatggctcgtggtcccaagaagcatctgattctgtgtggcagctcactaagcattggatgctggataaattgaccggagggtgtgctctctcgtcattcaccggtgccccacaagttagagagagtgtctccccctcatcattttccctgaggaacagacttaagtatgccctgacaggagatgaagtaaagaagatttgcatgcagcggttcattaaaatccgatggcaaggtcccgaacttgatataaccctacccctgctggatttcatgggatgtcatcagcatttgacaagaccggggaagagaatttcccgtcctgatctattgacaccaaagggtccgcttttgctggtacatccgtatttaaccaccctggaggaaggccaaagtacaagtttggtgccaaaagtgaagaaaagatcttttgtggggcacaaaaagggaatcccctcatcctgggtgacttcatgatggcccgcaaccatccggtaaccccgatccccctcatccaaggtgaattgataccatttcagattggatttagagacctggcaaagattactggatttccatcaagttccgacactggtaaccttgtgtatgggtgactggggaggtgcttaacctaggaagaaattgggtgttgatcaccaaccagagagaggcaccctggatcttttgacccgtggtttcacgtggaaagatgccaatggcaaccagctttgccactcgactttccaacatttttgttattggcaagggcaacaaaccatggatttctcttccccgaggaaagggtatccgcctcaccattgctgaagagagagacaaaagactggcggccaaacagagcagtgggtgaaatgggtccctgggtgacatgtcagatctttgtacgtaattaaaaatattgtggcaggattaatagc

SEQ ID NO: 11651 - DNA, 460 bp, Homo sapiens
  SIMILAR (136)..(426): 541254mologous to Arabidopsis thaliana putative protein,accession number AL049482,Smith-Waterman Score=260.
gaatacaatgtgttgcttcaagccactaattttgtggtcattggtcacaacagcaagaagcactgctctacagggggtgaagagtggaaggggtcacaggctttagtttgtaaatctctgttacctttattgcagataaccgtctcctcaggaggaatgttggttcagaaactgaacaccaatgatctccagtccgaaagaacaccatttgatggaactatggtctatgcacaaaacaagaggcagcaagtggttctgacggagcggtgggcccaagggcacccggccatccatttttcttccatgcatcctggctgggccgacaccccaggtgtgaggcaggcgatgccggggttccacgccaggttcggggaccgcctgcgctccgaggcccagggcacggacaccatgctgtggctggccctctcctctgccgcagccgcacagcccagcggccgct

SEQ ID NO: 11652 - DNA, 558 bp, Homo sapiens
  SIMILAR (543)..(406): 451254mologous to Bos taurus elastin,accession number M31898,Smith-Waterman Score=70.
attcctcaagcaagggtggttctcatcaagaacagaggaaagagaagccaagcaaagagcctggcttccacccgaggtcaagtgctgtcttcggatggcgtccactcacacgcctgcccccttaggagcccactggggagagacgtgaacagatcactgcttccaaaaatagagaagcagagtcccttacaccctttgcactgcagagaagcagagtccgttactccctttgcagtgcagctttgaatagcgcccctcctgggcctcagcaaactgcagagaaaatcttccattcccaaggtaggaactgcctctcccgttctcacaggaccttgatgacagggttatcacaagtctccaaagaagctaccaacctggagtgaagcgcttcccaaaactaacctcagcaggcaaagcaatcatctcgccaaagaagcccaggcatcccccaggggacagtcccaccccaggtttcacggaggggaaggtgcgcctcgaaggcccagctgctgcccctagccctgtgtcagctgccttcacagccagggaggaagtcac

SEQ ID NO: 11653 - DNA, 515 bp, Homo sapiens
  SIMILAR (215)..(108): 361254mologous to Cervus elaphus insulin-like growth factor I,accession number U62106,Smith-Waterman Score=61.
tcccagttcccaaactgcactttacatatcaatccatgctgcctgatccctgtgggacctttgacagcagggatgggggtctaacagctgtagggtgctgccactccagcaggcgtcggttcaaggcctgagcagcacagggacatggacccagccacgctgcagcagctcacacctctctgcggttccctctcacttttagatcggaagccagtttctacacacttgcctctcgctacagcgtcctcctcaccggccgaagaggagaaactcattgaaatcctggaacagctggctcagacatttaaataggccaacccagacacagtgcggtaccagaattgccttagaagataccagaaggtgcggtctagggaccagtgaataagaagaccccacttcaacttcccctcgaagacgttgtgcctcacagcgaggcctacaagggatgggaacttttatttcaaaataaatactaccgaggctgtgatcaggctcacccctcgtgccgaatt

SEQ ID NO: 11654 - DNA, 1887 bp, Homo sapiens
  SIMILAR (743)..(916): 471254mologous to Bos taurus elastin,accession number M31898,Smith-Waterman Score=78.
ctacggtttggcagttttctttttcccttcctgtattcctgtagtgtggacatcttttcctgtcggtacatgaggctctaaggcatctttcttccagtccaagagggctcccctttggggagcacagctctgctcagacccatgtgggctttcagcagcatcctgggaggagccacaaagccactgcgtctcctctcggtgtttctcagacccacacagaacaggatccgtatgccggtctgtgctgggggcctgaagtacagcagtgaacaggacagttaccacccctgccctcagtgagcagcaaagaatagagtcacccaggcgacttgtggacgaggaacacgtttcatctaaaaatacctgagcagccgcaggattgactctccccaggaatgaccactccccaggtttttggaaataatgatgcatgaaggtaaatgccagccacaaggacacagctcgaatgatctggaagcgtgttggagcagcggtggaggggagcagaattctcttccggattggcctcaccaactccatgacctcaggcagctcacctgggctctctgcagctctttcctccttgtggagacactgtgttccctgaggtccttccttctcccaggtgtgaggcaggcgatgccggggttccacgccaggttcggggaccgcctgcgctccgaggcccagggcgcggacaccatgctgtggctggccctctcctctgccgcagccgcacagcccagcggccgcttctttcaaggtgacttcctccctggctgtgaaggcagctgacacagggctaggggcagcagctgggccttcgaggcgcaccttcccctccgtgaaacctggggtgggactgtcccctggggggtgcctgggcttctttggcgagatgattgctttgcctgctgaggttagttttgggaagcgcttcactccaggttggtagcttctttggagacttgtgataaccctgtcatcaaggtccttgggaatggaagattttctctgcagtttgcggccgaagaggagaaactcattgaaatcctggaacagctggctcagacatttaaataggccaacccagacacagtgcggtaccagaattgccttagaagataccagaaggtgcggtctagggaccagtgaataagaagaccccacttcaacttcccctcgaagacgttgtgcctcacagcgaggcctcttagtgactccaggaaaagttgtaataaaaccaatgagcagatttagaatacatctacatacattcttggtgtccatggtggaataaacgtaactcatcccccatagcagaggaaaacccagacggctgcagcttctcagtggtcctggagacactctgatccagggctcatcatcagccaaggaccacaaggaagggatttttctgggtgtgccagcctgaaacatcagcgtctttctgacaaaaggaggcgctatcaagcaagcaccagctccatttaactgcatgcctccttttatgatgaaggaaaagggctccatggcttgagcccgtgtgctgtgcttagactgtggtgaacagggctcatcttcacctccaaacagcagctctccctggcatctagacagcaggtggagtggtctggaacctccccctcccaccaactggacagaacccacagggctaaacagcacagcaaggttgtcggtgtgtgcgtggccacatgtaaccgtgatgggaccatagcaatgaaaacgaggcacagagagtttcagtggcacatccaagatcacacgcatctggaaaggggcagagccaggatcccagcctgacggtctgggtccagatgccacatgcttaaccccttctctgtaaggacgagggacatgtcccat

SEQ ID NO: 11655 - DNA, 823 bp, Homo sapiens
  SIMILAR (2)..(235): 981254mologous to Escherichia coli primosomal replication protein n' (gtg start codon),accession number D13958,Smith-Waterman Score=397.
  misc_feature (1)...(823): n = a,t,c or g
gcggccgctgggctgtgcggctgcgtgctgaggagagggccagccacagcatggtgtccgcgccctgggcctcggagcgcaggcgataccccgaagcctggacgtggaaccccggcatcgcctgcctcacacctggggtgtcaggcccagccaggatgcatggaagaaaaatggatggccgggtgcccttgggcccaccgctcccgtcagaaccacttgctgcctctcactgaccttgttttgtgcatagaccatagttccatcaaatggtgttctttcggactggagatcattggtgttcaagtttctgaacccaaccattcctcctgaggagacgggttatcactcgggggtccgtgttctttctcccagcacaggggatcaggccgggtcgtgagaaatgtacacaccccagagtattggcaaccaaagtttttttcaaagtccatcttcttgtgagcttctcttttattgaccatgcaacctgcattattgatcaagaacatggagtttatgttcctgcttgaaattttcaacaaatttccagattttcttgggatcagacaagtccacaatgtgcagaaaaatgttctggttaccgcatctcccggatgatctcacccctggcatcttctgctggggcttgatctcgacaaaccaggtgaactgtgccacctcgcttggcgatttcaagggcagttgctttgccaatgccgctgtttcctccagtgaccaaaaagactcttccaggaatctggacctccaagtcatgagggacaaagtctttacatgcagagtcatagccactcntggtgtagccccc

SEQ ID NO: 11656 - DNA, 3108 bp, Homo sapiens
  SIMILAR (1)..(306): 891254mologous to Escherichia coli similar to M. tuberculosis MTCY277.09,accession number U82664,Smith-Waterman Score=434.
atgaatgccaccagatctgaagagcagttccatgttataaaccacgcagagcaaactcttcgtaaaatggagaactacttgaaagagaaacaactatgtgatgtgctactgattgcaggacacctccgcatcccagcccataggttggttctcagcgcagtgtctgattattttgctgcaatgtttactaatgatgtgcttgaagccaaacaagaagaggtcaggatggaaggagtagatccaaatgcactaaattccttggtgcagtatgcttacacaggagtcctgcaattgaaagaagataccattgaaagtttgctggctgcagcttgtcttctgcagctgactcaggtcattgatgtttgctccaattttctcataaagcagctccatccttcaaactgcttagggattcgatcatttggagatgcccaaggctgtacagaacttctgaacgtggcacacaaatacactatggaacacttcattgaggtaataaaaaaccaagaattcctcctgcttccagctaatgaaatttcaaaacttctgtgcagtgatgacattaatgtgcctgatgaagagaccatttttcatgctctaatgcagtgggtggggcatgatgtgcagaataggcaaggagaactggggatgctgctttcttacatcagactgccattactcccaccacagttactggcagatcttgaaaccagttccatgtttactggtgatcttgagtgtcagaagctcctgatggaagctatgaagtatcatcttttgcctgagagaagatccatgatgcaaagccctcggacaaagcctagaaaatcaactgtgggggcactttatgctgtaggaggcatggatgctatgaaaggtactactactattgaaaaatatgacctcaggaccaacagttggctacatattggcaccatgaatggccgtaggcttcaatttggagtcgcagttattgataataagctctatgtcgtgggaggaagagacggtttaaaaactttgaatacagtggaatgttttaatccagttggcaaaatctggactgtgatgcctcccatgtcaacacatcggcacggcttaggtgtagccactcttgaaggaccaatgtatgctgtaggtggtcatgatggatggagctatctaaatactgtagaaagatgggaccctgagggacgacagtggaattacgtagccagtatgtcaactcctagaagcacagttggtgttgttgcattaaacaacaaattatatgctattggtggacgtgatggaagttcctgcctcaaatcaatggaatactttgacccacacactaacaagtggagtttgtgtgctccaatgtccaaaagacgtggaggtgtgggagttgccacatacaatggattcttatatgttgtaggggggcatgatgcccctgcttccaaccattgctccaggctttctgactgtgtggaacggtatgatccaaaaggtgattcatggtcaactgtggcacctctgagtgttcctcgagatgctgttgctgtgtgccctcttggagacaaactctacgtggttggaggatatgacggacatacttatttgaacacagttgagtcatatgatgcacagagaaatgaatggaaagaggaagttcctgttaacattggaagagctggtgcatgtgttgtagtggtgaagctaccctaaagctatctatctttatcaaatggaatgaaactagataatttcaagaaactgagtaggacaaagggagaaagaaatacatgttctttttcctgcaattaataatcagactggaaaattgttgtatcattttaatttgtagttacaattgctttcattcgtgaagccgaaacgtttttaaacatgaattacatatgaattattaagcatatgtgctttcgcagctgataatataaaaggaaatcccacagtctagatatagccccattactacaaaatgctaaaatatttaatgaaaattgatggtggccacagtgtgcaggttataaaagcattaatacatttcaaggtaagagccttaaaagttaaaaacattttcagtttttttttaaaaaacgtactcttattatctggaacatagaaatataaaaggtaacatctaaagcttagaatagtgtgatttttagtaagccattattctcctattcaaataatatcccaaagagctaaacaattccttacatttaccaagaggaaagcttttactgtgttgaagctaaaaaaataatggctctttgacaaaacttgttatgttgatcgcggtatgtcaaaatttttacaggtttgctcatctgccagagcacacatataaatttggtatttcttaacatattatcttgttagatttgttaccagtaaaatattactgtaatttcatatacacagtctatacaatgaaataatgaatatttatcatattgatacaaactgtgacctcagcttcagagtgtcagggcctcacttgtatagaatgtaatgttctcctcaaacatttatgttaactctataaacaaatatcgttaagttaaacaagttttcaaaaacaaaacaatttttaaagtaccttaaaattgaggatgttactcagtgttaacacatgggaacaccaaaatattcaataagcctggtcaattctatagttatcttttttgtaccaacacatgcttttctgttactgttatattatccagtagaaaatgttaggatatgtgtgctatataaaaaaaaaaaaagacttgttaagttttaaaataacaaaaatggctagttgaatagtattttatgtgtaattcttccatttattctgtttaattatacaactaagatgaaatattgaaaaaccctttgtgaaagtaacttttcaagtaaatgcacaactttagaatttctacaaataagttcttttaaacagtctttttattgtggattgtgaaatcaaaatctggagaaatgcttataaaatatactactagcttttaagttttaagaaagaagaacgtaagttgtacaaagatatttgtactttgacaaactgaatttaaataaactttatttcctctc

SEQ ID NO: 11657 - DNA, 485 bp, Homo sapiens
  SIMILAR (108)..(281): 1001254mologous to Homo sapiens dA22D12.1 (novel protein similar to Drosophila Kelch (Ring Canal protein, KEL) and a heterogenous set of other types of proteins),accession number AL035424,Smith-Waterman Score=321.
cttcaggcagtgggctggcctgtggaacacccagtggcctgggctttatcattttcagttgtaactctattggacttttcctcccaattatctttctaaatcctttaaggtatgatccaaaaggtgattcatggtcaactgtggcacctctgagtgttcctcgagatgctgttgctgtgtgccctcttggagacaaactctacgtggttggaggatatgacggacatacttatttgaacacagttgagtcatatgatgcacagagaaatgaatggaaagagaatggtagatccaccgacagtttgcactgtgtgcctggaaaagccacagacactcaacacaagcccatgaaagcagccaggatgggggctgtaccctgcaaagccagaggggtggagctgcccaaggctgtgggagctcacgtcttgcatcagtgtgacctcaatgtgagacatgaagtcaatggagatcatgttagagtttaa

SEQ ID NO: 11658 - DNA, 297 bp, Homo sapiens
  SIMILAR (170)..(250): 1001254mologous to Homo sapiens antigen,accession number M16279,Smith-Waterman Score=135.
atgctggaggaggaagaaaaccgggtacacaagacgccttggctgtcttgtcctttgatggctggggaagctcttagtgctcggagtcctcactcacctctctgcattctgagggaggtagaaggggggacaggagagccaattcaacctgagaaggatgatcggtggagcagaacaaggggaggtggacatggagagccaccggaatgccaacgcagagccagctgttcagcgtactcttttagagaaatagaagattgtcggcagaaacagcccaggcgttggcagcagggttag

SEQ ID NO: 11659 - DNA, 1282 bp, Homo sapiens
  SIMILAR (445)..(1458): 571254mologous to Homo sapiens putative chloride channel,accession number X83378,Smith-Waterman Score=745.
cgtggaggccggggcggggcgggcgcagccggcgctgagcttgcagggccgctcccctcacccgcccccttcgagtccccgggcttcaccccacccggcccgtgggggagtatctgtcctgccgccttcgcccacgccctgcactccgggaccgtccctgcgcgctctgggcgcaccatggcccgcggggctgcgctggcgctgctgctcttcggcctgctgggtgttctggtcgccgccccggatggtggtttcgatttatccgatgcccttcctgacaatgaaaacaagaaacccactgcaatccccaagaaacccagtgctggggatgactttgacttaggagatgctgttgttgatggagaaaatgacgacccacgaccaccgaacccacccaaaccgatgccaaatccaaaccccaaccaccctagttcctccggtagcttttcagaatgctgaccttgcggatggcgtttcaggtggagaaggaaaaggaggcagtgatggtggaggcagccacaggaaagaaggggaagaaggccgacgccccaggcgtgatccccgggattgtgggggctgtcgtggtcgccgtggctggagccatctctagcttcattgcttaccagaaaaaagaagctatgcttcaaaagaaaattgcagaacaaggggaggtggacatggagagcccaccggaatgcccaacgccagaagccagctgttcaagcgtactcttttagagaaaatagaagattgtccggagaaacagccccaggcgtttggcagcagggttagaacagctgcctgaggctccctccctgaaggacaccacgcctgagagcagagattggaggccttctgttcacggcggattcttttgttttaatccttgcgatgtgctttgcttgttgcctgggcggatgatgtttactaaccgatgaattttacaatccaaaaagggggataaggcacttgggacccccattcttccaaggcccggggggggcgggtttcccatggggatgttgaaaggctgggccatttatttaagtccctgttaactcaaatgttcaaccccaccgagggcacccgggacgttcccccagaatcttggctgtttacaaatcaacgtgtccatcgagcacgtctaaaacccctggtagccccgacttctttttaattaaaataaggtaagcccttcaatttgtttcctcaatatttcctttcatttgtagggataattggtttttcatatcagactaattaaaagaaattagaaaccaac

SEQ ID NO: 11660 - DNA, 476 bp, Homo sapiens
  misc_feature (1)...(476): n = a,t,c or g
tttttttttagctgctgaaacagacactcatttatttccccagaaggaggcagaatggggtccttggggagtctctgtcccagcccggacaggcagatctcacttccagaagagcacattccaaaaaagcagccagcaggggtagaggcccagggacagcagtgggaagagcagggcgccgtaggtgtggtgctccagcacaccctgggctagcgctgccaggaagagctgccagccctcggccagtgacagtggcgcctcctgcagctcccgccacaggaacaggctgccaaggagcgtggctgccgggcttggttcagccccccaagaccnaaaaggggggcagcataaagggtccggggcccatgaggcttggcaagcgcaacagtgggcaccatggtggtggccaggccactggcagagcccccgacttcttgcggtgggcggcgaagtcccgggcaaaagcccgggcacgg

SEQ ID NO: 11661 - DNA, 2352 bp, Homo sapiens
  SIMILAR (825)..(604): 661254mologous to Homo sapiens Human secreted protein sequence encoded by gene 35 SEQ ID NO:156,accession number Y91435,Smith-Waterman Score=242.
gttatgtctggctgtagctgttggtcacgtgaagatgccagacgatgagcttgtgtataacattcacctggctgtcaacttcttggtgtcattgctcaagaaaaactggcagaatgtccgggccttatatatcaagagcaccatgggcaagccccagcgcctatattaaggcacatttgaataaattctattaccagttaaaaaaaaaaaaaaaaaagttggcggccgccaacttttttttttttttttttttttttttttttttttttttttttttttttttttttgctgaaacagacactcatttatttccccagaaggaggcagaatggggtccttggggagtctctgtcccagcccggacaggcagatctcacttccagaagagcacattccagaaaagcagccagcaggggtagaggcccagggacagcagtgggaagagcagggcgcccgtagtgtgtggtgctccagcacaccctgggctagcgctgccaggaagagcttgccagccctcggccagtgacagtggcgcctcctgcagctcccgccacaggaacaggcttgccaaggagccttggctgccgggctggttcagcaccagcaagggcagccattagagggtccggggcccattgaggctttggcaaagcgcacaagttgggcaccatggtggtggccagcaggaagcccagttgagaagttggtgagggcgatgcagcccagctgcagtgctaggtagatcagggctaccagcttcagtgccatccagcccctgtctgggggcctgtgtgcttacccaccccgtgggtattgtagagcagggacagagccagctgcataaatcgccagcagtggcagcaccacagcttcagcctctgccactgggaagtgctgggtggcaacgtgttggcccagcactggcaggacatagagggccagtcccatggcctgtgagatcagcagaggtgccacgagcgaggccagccccacaccctgtgatggggggaaggggtactctggggccaggggcacccccgggctcctcaaggcccattccagcctcatgcagctgcatccacagttccagagccttgagaccaaggaccaggagcaagaagccgacagcgggcatgtagaggccgatggagacgaagcgggagaggccggggagcaagtagaggaagaaaaactggtgcaggcgctccaggaggtggttgagcttgcggaacatgccctccaaagccttgcccactgccaccaggtcatacttgtactggcggaagctattgatgccacgcagggttagggcctccacacggtagcgcaggaagaggccatgggagccgtgggggcggccggaggcctgccgcagaaccatgagcagcagtgtctgcaggccctgcagcggtccatccaatgatgtccagtcctcgggctgcagcttgccctgaagcgtgcacaacaggccccctttctggcagaaggtctggaagagattgagcaggtcaaggttgggcagctgcccgttaagcccctccacggccacatcgaggctggtgaccacatcactgctcagctccagggccacggctgcctgaatggccccagctcggccctgcaggggagacgactgcatgccagtgacattgacatcgtggtaggcttcaagccaagcctcagtgcccagaaggtcatgttctgttaccaggaagacgatatctttggcccaataaatctgcccccggaagtgggcagccagtgccagcagcagccccacagcctggctgttggtagagtcagagccacagggcacggtgagcacaagcgactcggtgctggcagcacgcggggcccgcaggatgccgtacacgttggtgcccgacaccatatagcgctcgtgggtctcatctgggaagggcagtttccgggagaaactctgcgtgtagacctccagccctactgaccgcatcgtccgttcaagccaggccactggcagagcccccgacttcttgcggtgggcggcgaagtcccgggcaaaagcccgggcacggtctccgcccgcaaactgctcctccaccatggtggagcccatggcgttctccgacatgtaagtgcgctgggtcagcggcgggaaaaccagcgccaagaaccaggcgatgcccgccacgtagctcagcacgcacaacggcgcgttgaggcgcagcactaggcgggcgagcgcgcgccggcgaaccgggtccgacaggaggcccatggcggggcagggcggcgcggctacggaccctctcccgcctccaactaccgccgcggtgcccacaggctgctcctgtcagacccggggacccgcgc

SEQ ID NO: 11662 - DNA, 452 bp, Homo sapiens
  SIMILAR (52)..(285): 301254mologous to Bordetella bronchiseptica pertactin (P.68),accession number AJ250087,Smith-Waterman Score=81.
  misc_feature (1)...(452): n = a,t,c or g
aatgagaactgaggacactgcgnggaactcgcggatctgcggtgatgagtgcctgttgtccaagttccagcagctccaggccccctaccaggaccagctaccggctcctgcagcgcgtctgctgcccctcggcctcctgaccctcctccaggccatcccgagggtcatcatggccattcgccagtgttttggggtttgaagttggaatcttcagctactgtcaagaacagccacaaaaatgtgtcacgatcaagatctttgagagtccaccaatcaggaggcgtctgtgacagtcgctgtcttctcagaacagaatccacacccaggattcaacccaaatgatttctcatcaggtgattcttggttgtagcaaagttcatgtgaatgtgggggggacttgtccccatgtccgtgtccctgggggagggcagctatttccgagtgtctcttca

SEQ ID NO: 11663 - DNA, 412 bp, Homo sapiens
  SIMILAR (26)..(226): 341254mologous to Homo sapiens Human ST-2 partial sequence,accession number W58701,Smith-Waterman Score=76.
tttcgttggggctggggttgagctcgggttgggtttctcctggggcaggagggaaaggcgggagccagggcgtcagggcctgcggacgatgtgtgtgtgaaagggcgcgtcagccataagaagccatatgcgtgcgagccggtccccaccgtccccgcggcgttgtcaccatcatcatgaggccactggaacagcctcaggctctgctgccggggggccgggcgcggggtgcgtctggctctgcaggttggcactcacacccagcgcgcaggatggcaggaatagcacatttcaaacctacaagaaagaagtgtgcctcccccgtcattcgcacccctgctggatgcatgctgctggcacaactgctggcggatctgcggtgatgagtgcctgttgtccaagttccagcagg

SEQ ID NO: 11664 - DNA, 681 bp, Homo sapiens
  SIMILAR (676)..(1962): 901254mologous to Homo sapiens putative p150,accession number U93563,Smith-Waterman Score=2117.
ctagaagcccttttgtccattgaaacacgcgcgttccatcgtctccgccttatggtaaccaaaaggcccgagctgcgagctctgcagggaccttcggggatcccgagctcccttgaagtcaacccactttgcgtccctgggttcccccattctcgtggcttgtttaggcttcgaatggtttgcaatgggtgataccttcacgtggcaaatgcgtccatgaagtgtcaaatgtgattgctccttagttgaaagggaccacgcgttacccagggcgcaacggtcccaaaaaggcaagccccctcggctggcctcgatgatctccaatttcccaatttccgtggtcttacgtgtatgagctattgctatcctttgtggccagggggtcacgtgaccactcccggtgagtcctccgggtggcccggcacccccggaaagtgttgcgttggcagaatgggtctgctcggggagcagaaggcctttgtcgaattccggaattgctcgcagacctattggtgtcatccagccactagactttttgcagaattggccgaagcccgtgctgagatgctgaccaggtgctgaaaccattttcgggccctcatccagtgggtctgctgtcccgaagagacactcggaaatagctgccctcccccagggacacggacatgggacaagtccccc

SEQ ID NO: 11665 - DNA, 1593 bp, Homo sapiens
  SIMILAR (271)..(378): 831254mologous to Homo sapiens PRO1546,accession number AF116638,Smith-Waterman Score=172.
atgcccaatggcaccaatgaatctcacagatacaacgctagtgaaagaagccagacacagaaagatgaacaaacaggaaaaaccgtgggaccaccagagtggacacctctagtgagaagaaatgggggtgactcaggcctggatttccacttctttgcagagaaattaaaaatcattgtggattctgctggcagggctgggacgggtcacatgcgcccacctgctgtccactttgggcacagagggcaagccatgatcacgctttctcccctaagggctaaacagaaagcagtcctacaaaagcctccaccgctgacatcaacctacagcctgatgctgcccctctttttgcctgataagagaccaccgaccacggagtggttcttgccagtgatggaggatgcgcatgaattaaccctggcatggctgatgctggctctctacagaaagccaaatgccagcgtgcagggatcagcccaggaggagactctgtgtgtgttcagagtcaaagagccccttgaatggcaggcactgttcgctgatgtgcattctggggtaaatgacaagggaccaaacatcaactgcagtctctatgagcacataaagaatgtatctgagattgttctcaatctggcccagactcagaaaaatcctgctcattctgatccaagcagcacccctgctggatgcatgctctggcacaactgctggcggatctgcggtgatgagtgcctgttgtccaagtccagcagctccaggccccctaccaggaccagctaccggctcctgcagccgtctgctgcccctcggcctcctgaccctcctccaggccatcccgagggcatcatggccattcgtgcagctccttcctgcctgggggcctgcatcacactgcaggatgaggagacctgtgaacaaacgcacacacacagtcgaatttacatgatttacttgtttgctcgttgtctcctccatgcaattgcaagaggaagatctagaaaatgtgcagcgtctgcaggggggacttgtccccatgtccgtgtccctgggggaggcagctatttccgagtgtctcttcagggacagcagacccactggatgaggcccgaaaatggtttcagcacctgtgtcagaacaaagagtagaagatgtccgattattcgagagcagcatccaaccaaaatcccgaaggcgcttacagccaatgctaatcaggccttcttcctgttggtgaacggacacagcatggtcgcgtctccacaccaatctcagagacgcgccgaccttggtggcttttggagagatgcatccagctcgctgctggcaaactctcaagtccaagtgtgcggctccctccggaagaggcctcacggatgggtggttccattttctctgcgctgtgtagctccacttacagctgacgattctcgacttcggacggcctccctggagatgtcaacgccgcccatgcacgttcaagacgactggcagctccgcagaggccttcctgctgggaacacagccgtgacagtgtcggaactcatctacctcaacgcgaatggcaggctccaagttgaaaagtttctgttttaa

SEQ ID NO: 11666 - DNA, 1177 bp, Homo sapiens; identical to SEQ ID NO: 3875
  SIMILAR (175)..(1383): 241254mologous to murine herpesvirus 72 membrane virion glycoprotein 150,accession number AF294428,Smith-Waterman Score= 240.

SEQ ID NO: 11667 - DNA, 543 bp, Homo sapiens; identical to SEQ ID NO: 3874
  SIMILAR (100)..(336): 401254mologous to Caenorhabditis elegans Similar to cuticular collagen; coded for by C. elegans cDNA yk72c11.3; coded for by C. elegans cDNA yk55a12.3; coded for by C. elegans cDNA yk55a12.5; coded for b,accession number AF047652,Smith-Waterman Score=115.

SEQ ID NO: 11668 - DNA, 1461 bp, Homo sapiens
  SIMILAR (2)..(52): 881254mologous to Homo sapiens PRO1546,accession number AF116638,Smith-Waterman Score=77.
ggcgcccagcaagggcccaaatgggacacctggtgaggatggtggcgagcctggggatgccgtagctgcggccgagcagcctgcccagtgtgggcaggggcagccgttcgtgctgcccgtgggcgtgagctccaggaatgaggactacccccgaacctgcaggatgtggaatagcacatttcaaacctacaagaaagaagtgtgcctcccccgtcattcgatgcaccctggcccctgggccatctgctgtgaatgccagaccagattcgggggccgcctgcctgtgtccagggtggaagcagcactgccttactgggtccctctgtccctgagaccccgaaagcagcacccctgctggatgcatgctgctggcacaactgctggcggatctgcggtgatgagtgcctgttgtccaagttccagcagctcccaggcccccctaccaggaccagctaccggctcctgcagcgcgtctgctggccctcggcctcctgaccctcctccaggccatcccgagggtcatcatggccattcgccagtgttttggggtttgaagttgggaatcttcagctactggtccaaaacagccccacaaaaatgtgtcacgattccaagatctttgagagtccacccaatcaggaggcgtctgtgacagtcagctgtcttctcagaacagaatccacacccaggattcaacccaaatgatttctcatcaggtgattcttggttgtagcaaagttcatgtgaatgtgggtgagtttctgttatgaatgtggtcaataaatgttatttgtgaaactctaaactggccacctcttaaatgatgacctctgatttcccttcattaaggggggacttgtccccatgtccgtgtccctgggggagggcagctatttccgagtgtctcttcagggacagcagacccactggatgagggcccgaaaatggtttcagcacctgtgtcagggcttcctgcatcacctcccccagaaaacacttgcgctcaatccttgcctcaggctctgcttttggggtgaactcaagataagacaaggtgagcagatcccatctcaccagtcagggaggaagcgccatcggagcagagacctgaagacaattccaggaaacctggcaatgaaagtggcaagggaggacaggtcaaggcagcggccacagcagcccgtgaccacaggctgcattttggagaaaccactccagctgaagagtgttggatggaatagagtggcaagagtggacacgggaaaccagcttggaggctgcagcaggaaacctggtgggggacgatggtgtctggacctcggtggtggtggcagtggctgtgttccagtcagagctgtagccatcgaatcaaatgacggaggccggaagtcgccgaccagaactgccaggttactcctggtgtctgacgatcctgttacgggctacaatagatcaagttaa

SEQ ID NO: 11669 - DNA, 666 bp, Homo sapiens; identical to SEQ ID NO: 3515
  SIMILAR (169)..(663): 921254mologous to Homo sapiens protein-tyrosine phosphatase,accession number X68277,Smith-Waterman Score=776.

SEQ ID NO: 11670 - DNA, 477 bp, Homo sapiens
  SIMILAR (271)..(474): 1001254mologous to Homo sapiens protein-tyrosine phosphatase,accession number X68277,Smith-Waterman Score=347.
gcccacggccgccagcccgactcccccactcaggtcggggcgagcacacagcacgacgcacccagcccgcacaccacggacgttaaagccaggaacgcacacacgacagaacccgtaccaaaagccagccagcacggagggacaattgtgctccttggcatttacctaaaggaattgaaaatatttccacacaaaaacctgcatgtggatgtttatagcatccaaactcacaattgccaaaacttggaagcaagcatgatgtccttcagcagcttcatgggccagctgctgcagtttgagtcccaggtgctggctccgcactgttcggcagaggctgggagccccgccatggctgtgctcgaccgaggcacctccaccaccaccgtgttcaacttccccgtctccatccctgtccactccacgaacagtgcgctgagctaccttcagagccccattacgacctctcccagctgctga

SEQ ID NO: 11671 - DNA, 2056 bp, Homo sapiens
  SIMILAR (234)..(1229): 811254mologous to Rattus norvegicus protein-tyrosine- phosphatase,accession number X84004,Smith-Waterman Score=1303.
tttgggctgtgtgtgcgacgcgggtcggaggggcagtcgggggaaccgcgaagaagccgaggagcccggagccccgcgtgacgctcctctctcagtccaaaagcggcttttggttcggcgcagagagacccgggggtctagcttttcctcgaaaagcgccgccctgcccttggccccgagaacagacaaagagcaccgcagggccgatcacgctgggggcgctgaggccggccatggtcatggaagtgggcaccctggacgctggaggcctgcgggcgctgctgggggagcgagcggcgcaatgcctgctgctggactgccgctccttcttcgctttcaacgccggccacatcgccggctctgtcaacgtgcgcttcagcaccatcgtgcggcgccgggccaagggcgccatgggcctggagcacatcgtgcccaacgccgagctccgcggccgcctgctggccggcgcctaccacgccgtggtgttgctggacgagcgcagcgccgccctggacggcgccaagcgcgacggcaccctggccctggcggccggcgcgctctgccgcgaggcgcgcgccgcgcaagtcttcttcctcaaaggaggatacgaagcgttttcggcttcctgcccggagctgtgcagcaaacagtcgacccccatggggctcagccttcccctgagtactagcgtccctgacagcgcggaatctgggtgcagttcctgcagtaccccactctacgatcagggtggcccggtggaaatcctgccctttctgtacctgggcagtgcgtatcacgcttcccgcaaggacatgctggatgccttgggcataactgccttgatcaacgtctcagccaattgtcccaaccattttgagggtcactaccagtacaagagcatccctgtggaggacaaccacaaggcagacatcagctcctggttcaacgaggccattgacttcatagactccatcaagaatgctggaggaagggtgtttgtccactgccagcgcaggcatttcccggtcagccaccatctgccttgcttaccttatgaggactaatcgagtcaagctggacgaggcctttgagtttgtgaagcagaggcgaagcatcatctctcccaacttcagcttcatgggccagctgctgcagttttgagttccccaggatgcttggtcccgcactgttcggcagaaggctgggaagcccccgacatggctgtgcttcgaccgaggcaccatccaccaccaccgtgttcaacttccccgtcttcatccctgttccactccacggaacagtgcgctgagcttacctttcagaggccccattaacggacctttcccagctggttgaaagggccacggggaggtgagggttttttcacatcccattgggacttccatgctccttgagaggagaaatgcaataactcttgggaaggggctccaaaaggcttggtcctaatttatttaacttcacccgagttcctctgggtttctaaggcagttatgggtgatgacttaggcgtcaagacatttgctggaacttcagcacatttcggggacccaatatatagtggggtaccatccaagtccattctggacaaaatggggggcaggaagaggaaagggacttcagtgtgttgatccccggtttctttttttgcttcgcccctgtttttttgtaggattctctttcatgcttggacatacctaccagtattattcccgacgacacatatacatatgagaatataccttatttatttttgtgtaggtgtctgccttcacaaatgtcattgtctactcctagaagaaccaaatacctcaatttttgtttttgagtactgtactatcctgtaaatatatcttaagcaggtttgttttcagcactgatggaaaataccagtgttgggtttttttttagttgccaacagttgtatgtttgctgattatttatgacctgaaataatatatttcttcttctaagaagacattttgttacataaggatgacttttttatacaatggaataaattatggcatttctattg

SEQ ID NO: 11672 - DNA, 1263 bp, Homo sapiens
  SIMILAR (977)..(2311): 881254mologous to Homo sapiens putative p150,accession number U93574,Smith-Waterman Score=2196.
cttgcgctctacgcccaagggagccgggctgcagagctggagaaacttccgcggctacgggtgcagttgccttcggttcccggttccgggccgacacccgcgcagggctgagacaggtgtctgcgctccccgcaatgggctgctccagcagcgccctcaacaaggccggcgacagcagcaggttccccagcgtaacttcaaatgagcatttttcaactgcagaagaaagtgagtcctgctttgcccaaccaaagccacatgcactgggaagaggaatctactgttgatggcaatgtacaaagggaaagccgtcctcccttacaaaagctcaaggtttcagcagagcctacagctaatggtgttaaacccctccaagaacagcccctggccaaggacgtagcccctgggaaggggatgccacagaccaattcagggtccacagaaaagactcagcctggagagggactggaggaatctgggccgcctcaaccaggtggcaaagaggatgccccagcagcagaaggaaagaagaaagatgcaggagcagggacagaggccgagtctctaaaaggaaatgctgaagctcagcctttaggaccagaagccaagggtcagcctttgcaggcagcagtagagaaggactctctcagagcagtggaggtcactgagaatccacaaactgctgcagagatgaagcctctaggaacaactgagaacgttctgactctgcaaatagctggagagctacaacctcagggcacagtgggaaaggatgagcaggccccgcttctagaaacaatttccaaagagaatgaatctccagaaatattggaaggaagtcagtttgtggaaacagctgaagagcagcaacttcaggcaacattgggaaaagaggagcagccccagcttctagaaagaattcccaaagagaatgtaacaccagaagtattggacagaagtcagcttgtggaaaagcctgttatgaatgatccattccataaaactcctgaaggtccaggaaacatggagcagattcaacctgaaggaatagttggaagcatggagcatccagcacgaaatgtagaggcaggagcatatgtggaaatgatcaggaacatccatactaatgaagaggaccaacgcattgaaggtgagacaggggaaaaggtggaaacagacatggagaatgagaaagtgagtgaaggggctgaaaccaaagaagaagaaacaggagaagtggtggacctttcagcagccacatag

SEQ ID NO: 11673 - DNA, 743 bp, Homo sapiens
  SIMILAR (23)..(385): 281254mologous to Pyrus communis arabinogalactan- protein,accession number U14009,Smith-Waterman Score=108.
ctaaagttctgcatttaggtctgttcttttggaaatgcgtgtgtcttcacgtacctgcattatcgacaccttgcagggagcagtgcccacatatcctggttcagggactccggcgcttggcgagaagtccggctctttggggctagtggcttggtcttttccacgacctggtgaaagttcctctactgcgccccgcaggagcccctgctgctgcccttggtcgccttcccactcctctccggccagcttcccgcctctgcggccctctgccccagccacgcgtgcccccagagagggcttgccaactcctgcgtctagagcccactttcccggggcgacggctatacccaagacatctggactcctaatcgccaccgctagcctctgctgggggcaaacccaccaaccgtgcccgttacccctagcccgcttccttgggaagcgatagagtggaacaactcgacgtccgagctgttgacccttcccctgggggtccgggcgtcgaagcccatcagcatatctgcggtcacaaaacacttcttctttctgtcgcttctcattcagactattgataagatcatttggtggaatctgtttgagacccatgtaatattgacttaaaacggattttggtactgtttcatctaagattgtctgaaacaatctgttattagcatcacggcttgaatctctcccatatgttctttttttttctttacttgctttaaagcccatttgtatgc

SEQ ID NO: 11674 - DNA, 415 bp, Homo sapiens
  SIMILAR (16)..(276): 961254mologous to Homo sapiens aldose reductase (EC 1.1.1.21),accession number M34720,Smith-Waterman Score=441.
gggagcgcagcagccatggcaagccgtctcctgctcaacaacggcgccaagatgcccatcctggggttgggtacctggaagtcccctccagggcaggtgactgaggccgtgaaggtggccattgacgtcgggtaccgccacatcgactgtgcccatgtgtaccagaatgagaatgaggtgggggtggccattcaggagaagctcagggagcaggtggtgaagcgtgaggagctcttcatcgtcagcaagctgtggtgcacgtaccaagcccgaggacccttctctcctggaggatcccaggatcaaggcgatcgcagccaagcacaataaaactacagcccaggtcctgatccggttccccatgcagaggaacttggtggtgatccccaagtctgtgacaccagaacgcattgtg

SEQ ID NO: 11675 - DNA, 440 bp, Homo sapiens
  SIMILAR (18)..(344): 901254mologous to Homo sapiens aldose reductase (EC 1.1.1.21),accession number M34720,Smith-Waterman Score=516.
tcgtccagcgtggtggaattcatgaagggctggtgaaagctattggcatctccaacttcaaccattttcaggtggagatgatcttaaacaaacctggcttgaagtataagcctgcagttaaccagattgagtgccacccatatctcactcaggagaagttaatccagtactgccagtccaaaggcatcgtggtgaccgcctacagccccctcggctctcctgacaggccctgggccaagcccgaggacccttctctcctggaggatcccaggatcaaggcgatcgcagccaagcacaataaaactacagcccaggtacagccacttcaggtgttgctgaccgtccacaactgcctgcattcctgacagtcctgttagccaagaggaggaagtgactgagcctgttacaccctcacaggaagtatggttaggggtcctcag

SEQ ID NO: 11676 - DNA, 819 bp, Homo sapiens
  SIMILAR (133)..(816): 771254mologous to Homo sapiens aldose reductase (EC 1.1.1.21),accession number M34720,Smith-Waterman Score=950.
atggccagccaccttgtgctcaacaatggcaccaagatgcccatcctggggctgggcacctggaagtcccctccaggccgggtgactgaggccgtgaatgtggccatcaatgtcgggtactgccacattgactgtgcccaccatgagaatgaggtgggggtggccattcaggagaagctcagggagcaggtggtaaagcgtgaggagctcttcatcgttacctgggagggaatttttccattgaatgagttgggtaatgtggttcccagtgacaccaacattctggacacatgggcagccatggaagagctggtggatgaatggctgatgaaagctattggcatctccaacttcaaccacctccaagtggagaggctcttaaacaaacctggcttaaagtataagcctgtggttaaccagattgagtgccacccttacctcactcaggagaagttaatccagtactgccagtccaaaggcatcgtggtgaccgcctatagccccgttggcactcccagcaggccctgggtcaaccccgaggacccttccctcctgagggatcccaggatcaaggcgattgcagccaagcacaataaaactacagcccaggtcctgatccggttccccatgcagaggaatttgggtgtgatccccaagtctgtgacaccagaactcattgctgacaactttaaggtttttgactttgaactgaacagccaggatatgaccgccttactcagctacaacaggaattggagagtctgtgccttggtgagctgtgcctcccacaaggattaccccttccatgaagagttttga

SEQ ID NO: 11677 - DNA, 1380 bp, Homo sapiens
  SIMILAR (250)..(1101): 981254mologous to Homo sapiens aldose reductase (EC 1.1.1.21),accession number M34720,Smith-Waterman Score=1478.
atggcaagccgtctcctgctcaacaacggcgccaagatgcccatcctggggttgggtacctggaagggcagcatcctgcgagtggggtttgggagcagctcacgggagcccccgccctaccgcgggcaacccttgatgggcggcccaccagtccgcattttgggtcctagcgggcgccccaagcggcacaacgcgagagggaggcggggaaagtgggcttcacagaccggtggacctcgggcgcagacagggacgtggagccgtcggcaagggcaggtgactgaggccgtgaaggtggccattgacgtcgggtaccgccacatcgactgtgcccatgtgtaccagaatgagaatgaggtgggggtggccattcaggagaagctcagggagcaggtggtgaagcgtgaggagctcttcatcgtcagcaagctgtggtgcacgtaccatgagaagggcctggtgaaaggagcctgccagaagacactcagcgacctgaagctggactacctggacctctaccttattcactggccgactggctttaagcctgggaaggaatttttcccattggatgagtcgggcaatgtggttcccagtgacaccaacattctggacacgtgggcggccatggaagagctggtggatgaagggctggtgaaagctattggcatctccaacttcaaccatctccaggtggagatgatcttaaacaaacctggcttgaagtataagcctgcagttaaccagattgagtgccacccatatctcactcaggagaagttaatccagtactgccagtccaaaggcatcgtggtgaccgcctacagccccctcggctctcctgacaggccctgggccaagcccgaggacccttctctcctggaggatcccaggatcaaggcgatcgcagccaagcacaataaaactacagcccaggtcctgatccggttccccatgcagaggaacttggtggtgatccccaagtctgtgacaccagaacgcattgctgagaactttaaggtctttgactttgaactgagcagccaggatatgaccaccttactcagctacaacaggaactggagggtctgtgccttgttgagagtcaaactgtggacttgccattcctccaccatgccagggcctctacatcccctgtgccttggctcaggctgtgtcccccacttgggcaacccaagcctggcactccacaagtacttcctcaatggggctctgaatagttttgactatgtcttagaaaccttggcaccagagaacagccatgcttcaaaggaattgactacacaaatttgttttattcttactattttcctcttccaaaataagaaagctgttgaagtctgtgagtttgcctattag

SEQ ID NO: 11678 - DNA, 1403 bp, Homo sapiens
  SIMILAR (46)..(819): 951254mologous to Homo sapiens aldose reductase (EC 1.1.1.21),accession number M34720,Smith-Waterman Score=1293.
gaaggccgcaccgtactgggcgggggtctggggagcgcagcagccatggcaagccgtctcctgctcaacaacggcgccaagatgcccatcctggggttgggtacctggaagtcccctccagggcaggtgactgaggccgtgaaggtggccattgacgtcgggtaccgccacatcgactgtgcccatgtgtaccagaatgagaatgaggtgggggtggccattcaggagaagctcagggagcaggtggtgaagcgtgaggagctcttcatcgtcagcaagctgtggtgcacgtaccatgagaagggcctggtgaaaggagcctgccagaagacactcagcgacctgaagctggactacctggacctctaccttattcactggccgactggctttaagcctgggaaggaatttttcccattggatgagtcgggcaatgtggttcccagtgacaccaacattctggacacgtgggcggccatggaagagctggtggatgaagggctggtgaaagctattggcatctccaacttcaaccatctccaggtggagatgatcttaaacaaacctggcttgaagtataagcctgcagttaaccagattgagtgccacccatatctcactcaggagaagttaatccagtactgccagtccaaaggcatcgtggtgaccgcctacagccccctcggctctcctgacaggccctgggccaagcccgaggacccttctctcctggaggatcccaggatcaaggcgatcgcagccaagcacaataaaaactacagcccaggtcctgatccgtttccccatgcagaggaacttggtggtgatccccaagtctgtgacaccagaacgcattgctgagaactttaaggtctttgactttgaactgagcagccaggatattgaccaccttactcagctaccaacaggaactggagggtctgtgccttgttgagctgtacctcccacaaggattaccccttcccatgaaaaagttttgaggctgtggtttgcctgctcgtcccccaagtgacctatacctgtgtttcttgccctcatttttttccttgcaaaatggtagtatggcctgttgtcactccagcaagtgggtgacagcaaccctgtaggagttgggccagcgagggcgttgttttagctttgatgtttgggatctcaaggagccctgttcagtaggagtaggaagtttttttccagttttgctttgcccttcttttctaccctgctggggggaaagtacaacctgaataaccttttttggaccaaagagaagcaaaatctaccaggtcaaaatagtgccacctaccgttggggtttgaacggctgggaactggaatccttccagcaagacttctctttgcctcccaaccaaaagtgcttttgtg

SEQ ID NO: 11679 - DNA, 858 bp, Homo sapiens
  SIMILAR (448)..(855): 481254mologous to Homo sapiens Human secreted protein encoded by gene 76,accession number Y36299,Smith-Waterman Score=311.
atgactgagcccgtctgggtccccgcccgctcgcgctcccctggccacaccctccgcctggacgcagcagccaccgccgcgtccctctctccacgaggctgccggcttaggacccccagctccgacatgtcgccctctggtcgcctgtgtcttctcaccatcgttggcctgattctccccaccagaggacagacgttgaaagataccacgtccagttcttcagcagagctcaactatcatggacattcaggtcccgacacgagccccagagtaccatccctacaccagcaccaaatagacaccaccacggataagaaaacacaacattaccctcaaactagaggacccatcaaaaatcacaagcagcagctgcatgctgaggtcgatctaaggatccccaaattcctgaggtgcaacagatgcaccatcggtttggattcagctcagaacagagctaatattctgtccttcctgcatgccttagtcgactctagaggatcccacgtgttcctgtgcctcacacgctacattggggactccatggtcatgcgctgggacggctccatgtttcgtctgctgcagcaacttccctcgcgcggtgcccacgtcttccagccactgctcatcgccagggaccagctggccatcctaggcagcgacttcgccttcagccaggtcctccgccttgagcctgacaaggggctcctggagccactgcaggagctggggcctccggccctggtggccccccgtgcctttgcccacatcactatggccggcagacgcttcctctttgctgcttgctttaagggccccacacagatctaccagcatcacgagatcgacctcagtgcctga

SEQ ID NO: 11680 - DNA, 369 bp, Homo sapiens; identical to SEQ ID NO: 7968
  SIMILAR (2)..(364): 911254mologous to Homo sapiens p40,accession number U93569,Smith-Waterman Score=577.

SEQ ID NO: 11681 - DNA, 394 bp, Homo sapiens; identical to SEQ ID NO: 6145
  SIMILAR (76)..(372): 871254mologous to Homo sapiens p40,accession number U93569,Smith-Waterman Score=438.

SEQ ID NO: 11682 - DNA, 1539 bp, Homo sapiens; identical to SEQ ID NO: 3746
  SIMILAR (658)..(1536): 951254mologous to Homo sapiens putative p150,accession number U93568,Smith-Waterman Score=1457.

SEQ ID NO: 11683 - DNA, 2544 bp, Homo sapiens; identical to SEQ ID NO: 8585
  SIMILAR (1591)..(2541): 881254mologous to Homo sapiens p40,accession number U93569,Smith-Waterman Score=1432.

SEQ ID NO: 11684 - DNA, 1791 bp, Homo sapiens; identical to SEQ ID NO: 3749
  SIMILAR (1090)..(1788): 921254mologous to Homo sapiens p40,accession number U93564,Smith-Waterman Score=1089.

SEQ ID NO: 11685 - DNA, 1014 bp, Homo sapiens
  SIMILAR (457)..(1011): 941254mologous to Homo sapiens p40,accession number U93564,Smith-Waterman Score=887.
atgcaacctccaatcaaccccccagtagaccatgtcataggtcctcagttgactgcagttactgcagcttctcatgcagcaccagcttttaactctggcaaagtaaatattgtcgccatcaatgactccttcattgatctcaactacatagtctacatgttccagtataattccacccatggcaagttccatggcactgtcaaggctgtgaacagaaagtgtgtcaccaatggcaatactatcaccatcttccaggagcaagatcccaccaaaatcaaatgggttgatgctggcattgattatgctgtggaatcctccatgacacctgctcttcctctcttcaatgctggtgaaatgccctcaattaccacttactttgtcaacctcatttcctggtatgacaatgaatttggctacatcaacagggtgttagaccttatagtccacatggccttcaaggaaccaaatctacgtctcattggtgtacctgaaagtgatggggagaatggaaccaagttggaaaacactctgcaggatattatccaggagaacttccccaatctagaaaggcgggccaacgttcagattcaggaaatacagagaacgccacgaagatactcctcgagaagagcaactccaagacacataattgtcagattcaccaaagttgaaatgaaggaaaaaatgttaagggcagccagagagaaaggtcgggttacccacaaagggaagcccatcagactaacagcagatctctcagcagaaaccctacaagccagaagagagtggaggccaatattcaacatttttaaagaaaagaattttcaacccagaatttcatatccagccaaactaagcttcataagcgaaggagaaataaaatactttacagacaagcaaatgctgagagattttgtcaccaccaggcctgccctaaaagagctcctgaaggacgcgctaaacatggaaaggaacaaccggtaccagccactgcaaaatcatgccaaaatgtaa

SEQ ID NO: 11686 - DNA, 780 bp, Homo sapiens
  SIMILAR (223)..(777): 931254mologous to Homo sapiens p40,accession number U93569,Smith-Waterman Score=870.
atggctgaacaggaacagctccagtctgcagttcccagtcctctgctggtgatacccaggcaaaaagggtctggagtggacttccagcaatctccaacagacctgcagctgagggacctgactgataggaggaaaactaacaaacaaaaaggaatagcatcaacattaacaaaaaggacatccacaccaaaaccccatctgtacgtcaccaacatcaaagaccaaagaccaaatccacgtctgattggtgtacctgaaagtgatggggagaaaggaaccaagttggaaaacactctgcaggatattatccaggagaacttccccaatctagcaaggcaggccaacattcaaattcgggaaatacaaagaacgccacaaagatactcctcgagaagagcaactccaagacacataattgtcagattcaccaaagttgaaatgaaggaaaaaatgttaagggcagcaagagagaaaggtcgggttacccacaaagggaagcccatcagactaacagcggatctctgggcagaaaccctacaagccagaagagagtgggggccaatattcaacattcttaaagaaaagaattttcaacccagaatttcatatccagccaaactaagcttcataagtgaaggagaaataaaatcctttacagacaagcaaatgctgagagattttgtcaccaccaggcctgccctaaaagagctcctgaaggaagcgctaaacatggaaaggaacaactggtaccagctgctgcaaaatcatgccaaattgtaa

SEQ ID NO: 11687 - DNA, 1032 bp, Homo sapiens
  SIMILAR (346)..(1029): 751254mologous to Homo sapiens p40,accession number U93567,Smith-Waterman Score=850.
atgaagactcacttgcaagaaatgataactttccaggagcaaagaggacctaactgggaggcaacccccagtaggggcagactgacacctcatacggccaggtacccctctgagacgaagcttccagaggaacaatcaggcagcaacatttgttgttcagcaatattcgctgttctgcagtctccgctgctgatacccagtaaaatagggtctgggatggacctccagcaaactccaacagacctgcagctgaaggtcctgactgttagaaggaaaactaacaaacagaaaggacatccacacaaaaacccaatctgtatgtcaccatcatcaaacaccaaagagaagtccttaaatgaccggatggagccaaaaaccatggcacaagaactacatgacgaatgcacaagcttcagtagccaattcgatcaactggaagaaagggtatcagtgattgaagatgaaatgaatgaaatgaaacaaaatctacatctaattgatgtacctgaaagtgatggggagaatggaaccaaggtggaaaacactctgcaggatattatccaggagaacttccccaatctagcaaggcaggccaacattcaaattcaggaaatacagagaatgccacaaaaatactcctcaagaagagcaactccaagacacaaaattgtcagattcaccaaagttgtaatgcaggaaaaaatgttaagggcagccagagagaaaggtcgggttactcacaaagggaagcccatcagactaacagcagatctctcagcagaaacgctacaagccagaagagagtgggagccaatattcaacattcttaaagaaaagaattttcaacccagaatttcatatccagccaaactaagcttcttaagtgaaggagaagtaaaatcctttaaagacaagcaaatgctgagagattttgtcaccaccaggcctgccctaaaagagctcctgaaggaagcactgaacatggaaaggaacaactggtaccagccactgcaaaaacatgccaaattgtaa

SEQ ID NO: 11688 - DNA, 2055 bp, Homo sapiens
  SIMILAR (1204)..(2052): 731254mologous to Homo sapiens p40,accession number U93569,Smith-Waterman Score=1034.
atgaagcctttccgttcctgttttgatcacatccccgtgggaaaggagatgaagctccattcatcagtgctaagaaaggctccccaaccatgccatggccatgctattggaatggaaatacctgctttccagacaccagatctggcttttagggttgaactacatcccgtctcccctttcccaactgaccatgccttcagtgcacaatcacagatacacacacacttgtgtggggccccagaaaccagaaaccggaggtcttgtaaatttttttatctaagagcatcacggaaactgagaacaattttgtttgaagagcacctgtcaaagcctaaagtcaccatgggtctgcagagcaataagaatggcacctgtgtgaccaatctgacatgctgcatggaacatggggaagaggatgtgatttatacctggaaggccctggggcaagcagccaatgagtcccataatgggtccatcctccccatctcctggagatggggagaaagtgatatgaccttcatctgcgttgccaggaaccctgtcagcagaaacttctcaagccccatccttgccaggaagctctgtgaaggtgactgcctctcccctctccacaggagactctgcccaggtcctacaccttcttcagctcctagcccccatgggaacagacactgtatggaaactggaggccgctgggtggtcaccaggctgggaggaaggtggcaggtgctccaagacctgggtcgttttcctgagctgacttttctcccttccctgtgcctccacccattctctgaaggtgctgctgatgacccagattcctccatggtcctcctgtgtctcctgttggtgcccctcctgctcagtctctttgtactggggctatttctttggtttctgaagagagagagacaagaagagtacattgaagagaagaagagagtggacatttgtcgggaaactcctaacatatgcccccattctggagagaacacagagtacgacacaatccctcacactaataaccctccttttcctctcacatctcctcccatctctgctttcccctctctggattctgaatgtctctctggccttgtctatgtgattcaggagagaacaatcctaaaggaagatccagcaaatacggtttactccactgtggaaataccgaaaaaggatagcagttcctcaccagcaatggaacaaagctggatggagaatgactttgatgagttgagagaagaagtcatcagacgatcaaactacgagctacaggaggaaattcaaaccaaaggcaaagaagttaaaaactttgaaaaaaatttagacgaatgtataactagaatagtcaatacagaaaagtgcttaaaggagctgatggagctgaaagccaaggcacgagaactacaaagggtatcagcaatggaagatgaaatgaatgaaatgaagcaagaagggaacaaacaaagcctccaagaaatatgggactatgtgaaaagaccaaatctacgtctgattggtgcacctgaaagtgacggggagaatggaactaagttggaaaacactctgcaggatattatccaggagaacttacccaatctagcaaggcaggccaacattcagattcaggaaatacagagaacaccacaaagatactcctcgagaagagcaactccaagacacataattgtcagattcaccaaagttgaaatgaaggaaaaaatgttaagagcagccagagagaaaggtcgggttacccacaaagggaagcccatcagactaacagctgatctctcggcagaaactctacaagccagaagagagtgggggccaatattcaacattcttaaagaaaagaatcttcaacccagaatttcatatctggccaaactaagcttcataagtgaaggagaaataaaatcctttacagacaagcgaatgctgagagattttgtcaccaccaggcctaccataaaagagctgctgaaggaagcactaaacattgaaaggaacaaccagtaccagccgctgcaaaatcatgccaaaatgtaa

SEQ ID NO: 11689 - DNA, 1395 bp, Homo sapiens
  SIMILAR (607)..(1392): 941254mologous to Homo sapiens p40,accession number U93564,Smith-Waterman Score=1267.
atggctctgaagagagcagcagatctcccagcacagcgttcaagctctgctaaaggtcagactgcctcctcaaatgggtcactgacccccatgtctcctgactgggagacaccttccagtaggggccaacagacacctcatacaggagagctccagctggcctctggcaggtcaccaacatcaaacaccaaaggtaaggaaatccatgaagatggggagaaaccagtgcaaaaggcagaaaattccaaaaaccagaatgcctattctcctccaaaggatcacaactccttgccagcaagggaagaaaactggatggagaatgagtttgacaaattgacagaagtaggcttcagaagaaaactgaaactggaccctctccttacaccgtatacaaaaattaattcaagatggattaaagacttaaatgtaagacctaaaaccataaaaaccctagaagaaaaccgagacaataccattgaggacataggcgtgggcaaagacttcatgactaaaacaccaaaagcaatggcaacaagagccaaaattgacaaatgggatctaattaaactaaagagcttctgcacagcaaaagaaactatcatcagagtgaacagaataaccaatacagagaagtgcttaaaggagctgatggagctggaaaccaagcctggagaactacgtgaagaatgcagaagcctcaggagccgatgcgatcaactggaagaaagcgtatcagcaatggaagatgaaatgaatgaaatgaagcgagaagggaagtttagagaaaaaagaataaaaagaaatgagcaaagcctccaagaaatatgggactatgtgaaaagaccaaatctacgtctgactggtgtacctgaaagtgatggggagaatggaaccaagttggaaaacactctgcaggatattatccaggagaacttccccaatctagcaaggcaggccaacattcagattcaggaaatacagagaacgccacaaagatactcctcgagaagagcaactccaagacacataattgtcagattcaccaaagttgaaatgaaggaaaaaatgttaagggcagccagagagaaaggtcaggttaccctcaaagggaagcccatcagactaacagccgatctctcggcagaaaccctacaagctagaagagagtgggggccaatattcaacattcttaaagaaaataattttcaacccagaatttcatatccagccaaactaaacttcataagtgaaggagaaataaaatactttacagacaagcaaatgctcagagattttgtcaccaccaggcctgccctaaaagagctcctgaaggaagtgctaaacatggaaaggaacaaccggtaccagccactgcaaaatcatgccaaaatgtaa

SEQ ID NO: 11690 - DNA, 996 bp, Homo sapiens; identical to SEQ ID NO: 7970
  SIMILAR (373)..(993): 811254mologous to Homo sapiens p40,accession number U93567,Smith-Waterman Score=862.

SEQ ID NO: 11691 - DNA, 1589 bp, Homo sapiens
  SIMILAR (180)..(1106): 431254mologous to Homo sapiens p40,accession number U93570,Smith-Waterman Score=425.
ccaacggaccccgcagctgagggtccctgtctgttagacgcaaaaactaacaaacggaaaggtccatccacacccatactcccattctgtccttcaccattcatcagaggacctaaggttgattcaacccacggtgcatggggacaaaaacagcaccgataaactgggatattctaaagaagcagagcaccctctcctccctccagaaggaacacggctcctcaccagcaacagaacaaagctggatggagaatgactttgatgagttgagagaagaaggcttcagacgaattaaattactccgagctaaaggaggaagctcgaacccatggcaaagaagttataaaccttgaaaaaaaaactagacgaatggataactagaataaccaatgcagagaagtgcttaaaaggagctgatggagcttgaaagccaaggcctcgagaacttcgtgaagaatgcagaagccctcaggagccgacgcaatcaactggaagaaagggtatcagcaatggaagatgaaatgaatgaaatgaagccaagaagagaagtttagagaaaaaaagaataaaaagaaatgaacaaaagccttgaaggaattatgggactatgtgaaaagaccaaaatctacgtctgattggtatacctgaaagtgacgaggagaatggaaccaagttggaaaacactctgcaggatattatccaggagaacttccccaacatagcaaggcaggccaaccgttcagattcggggaaattacagagaacgcccacaaaggttgcctcctcgaggaagagcaactccaaggacacattaattgtcagattcaccaaagttggaaatggaagggaaaaaatgtttaaggggcagccaggggggaaaggtcggggtcaccctcaaagggaagcccatcacactaacaacagctgatctctcagcagaaacttctacaagccagaagacagagtgggggccaatattcaacattctggaaggaaaagaattttccaacccagaaatttcatatcttagccaaacttaagctttcataagtggaagggaggaattaaattccttttaccggacaagccaaatgctgagagatttttgtcaccaccaggcctcccgcctgccctaaaagagcaccaggcctgccctaaaagagctcctgaaggaagaagcacttaaacatgggaaagggaacaacccggtacccagccacttgcaaaaattcattgcttaaatttgttaaaggccatttgagggcttggggaggaaacttgcatcaactaatggacaaaataaccagctaacattcataatgacaggatcaaattcacacataacaatattaactttaaatgtaaatgggctaaatgctcccatttaaaagacacagactgggcaaattggataaagagtcaagacccatcaatgtgctgtattcaggaaacccatctcacgtgcagagacacacataggctcaaaataaaaggatggaggaagatctaccaagcaaatggaaaacaaaaaaaggcagggtttgcaatcctagtctctgataaagcagactttaaaccaacaaagatca

SEQ ID NO: 11692 - DNA, 1920 bp, Homo sapiens
  SIMILAR (2772)..(2302): 861254mologous to Homo sapiens RING zinc finger protein,accession number AF037204,Smith-Waterman Score=719.
atggtgattggccgtgcagatggagagaacaaaaggaaaaaaacatttattgagcatttattatgtcccaacccctgtgatttccagcacaagataaccgtgcaggcctctcccaacttggacaaacggcggagcctgaacagcagcagttccagtcccccgagcagccccacaatgatgccccgactccgagccatacagttgacttcagatgaaagcaataaaacttggggaaggaacacagtctttcgacaagaagaatttgaggatgtaaaaaggaattttaagaaaaaaggttgtacctggggaccaaattccattcaaatgaaagatagaacagattgcaaagaaaggataagacctctctccgatggcaacagtccttggtcaactatcttaataaaaaatcagaaaaccatgcccttggcttcattgtttgtggaccagccagggtcctgtgaagagccaaaactttcccctgatggattagaacacagaaaaccaaaacaaataaaattgcctagtcaggcctacattgatctacctcttgggaaagatgctcagagagagaatcctgcagaagctgaaagctgggaggaggcagcctctgcgaatgctgccacagtctccattgagatgactcctacgaatagtctgagtagatccccccagagaaagaaaacggagtcagctctgtatgggtgcaccgtccttctggcatcggtggctctgggactggacctcagagagcttcataaagcacaggctgctgaagaaccgttgcccaaggaagagaagaagaaacgagagggaatcttccagcgggcttccaagtcccgcagaagcgccagtcctcccacaagcctgccatccacctgtggggaggccagcagcccaccctccctgccactgtcaagtgccctgggcatcctctccacaccttctttctccacaaagtgcctgctgcagatggacagtgaagatccactggtggacagtgcacctgtcacttgtgactctgagatgctcactccggatttttgtcccactgccccaggaagtggtcgtgagccagccctcatgccaagacttgacactgattgtagtgtatcaagaaacttgccgtcttccttcctacagcagacatgtgggaatgtaccttactgtgcttcttcaaaacatagaccgtcacatcacagacggaccatgtctgatggaaatccgaccccaactggtgcaactattatctcagccactggagcctctgcactgccactctgcccctcacctgctcctcacagtcatctgccaagggaggtctcacccaagaagcacagcactgtccacatcgtgcctcagcgtcgccctgcctccctgagaagccgctcagatctgcctcaggcttacccacagacagcagtgtctcagctggcacagactgcctgtgtagtgggtcgcccaggaccacatcccacccaattcctcgctgccaaggagagaactaaatcccatgtgccttcattactggatgctgacgtggaaggaatgaagccgcagaccttcgcagtgagtgttgcagctcttaaaggtgccgcctctggagttgtttcttcctcccagagggttcgtgatctcgctgacttgagaagtgaagctgtagaccttcacactccccgggaccggaccctccccactcaccaggtgcagggccaggggcagcagcaggaggaacagccacaggtagaggtggcagctgttggtgaacttgctctgctccgggtcgtggtaccagcccccggtctccttcagtacatccccctgtcaattacaactccaagtaaacacagatctccttatgatcgtactagcagaggattgagatatggctatgccaaagagcagaccctcatgagcatgtga

SEQ ID NO: 11693 - DNA, 384 bp, Homo sapiens
  SIMILAR (101)..(283): 551254mologous to Saccharomyces cerevisiae Yhr217cp,accession number U00029,Smith-Waterman Score=131.
  misc_feature (1)...(384): n = a,t,c or g
gcagcttatttnctttttattgtatttaattccaaaagaatggncacacttctttgctaggtaggcaagangtnccggaggacacactagagaaagcaccactccccaccctaacccacatccccaacacactcacctgcccacactcacacaatcacatacacatgcccacacttatatacacatgctgacacccgtgcactcatgtgcacacactcattcacactcatacacattcacactcaggcatactcatactcctcatgagcacaccacactcacctgtgtcttctgaccgagagccctcctgaagggaggtctgtacctcctccctcatctcaattttacacaaggcgacagggtcagagggccagggtggggacg

SEQ ID NO: 11694 - DNA, 501 bp, Homo sapiens
  SIMILAR (3)..(485): 311254mologous to Rana catesbeiana alpha 1 type I collagen,accession number AB015440,Smith-Waterman Score=108.
gcggccgcgctgctgctccgcgcgcacccgggtgtcctctccgagcgctgcaccgacgagaagagccggcgcatcctggccgcgctgtgccaggactaccagggcggcacgctggccggggacctctgcgaggacctgtgtgtggcgggaaagctgctgttccaacgctgcctgcactacaacagaggcaagaaggtgctgcaggccgactggcgcggccggcccgtggtcctcaagtccaaggaggaggccttctccagcttcccgcccctcatgcctgttggaagaggaggcaggggagggtggccagggacatgcccgaggccgaactcctcctgatggtggctaggggaggtcaagagcgctctgggcctgggagttgtccaacagcagcctgggggccgtggtggccgggcaggcggggcccacgctggcggggacagctgggccagcctgtgggccctgctgcagcaggaggagtacgtctacttcagcctgctg

SEQ ID NO: 11695 - DNA, 1756 bp, Homo sapiens
  SIMILAR (161)..(6): 531254mologous to Homo sapiens Human secreted protein, SEQ ID NO: 6644,accession number G02563,Smith-Waterman Score=134.
atgacagactgggggaagaaaaagtgggacatctacaccagggtgaatactatgccagccataaaaaagaaagagaacatgtcctttgcaagaagatggatggagcctggggccatcatccttagtcaactaatgcaggaacagaaaaccagacactgcatgttctcatttttggtaactggaaccaagaagctgatcaaagatgtgaggatttgtatgggtttgtgccaggactaccagggcggcacgctggccggggacctctgcgaggacctgtgtgtggcgggagagctgctgttccaacgctgcctgcactacaacagaggcaagaaggtgctgcaggccgactggcgcggccggcccgtggtcctcaagtccaaggaggaggccttctccagcttcccgcccctcagcctgttggaagaggaggcaggggagggtggccaggacatgcccgaggccgaactcctcctgatggtggctggggagcaggaggagtacgtctacttcagcctgctgcaggacctgagcccacacgtgctgcccgtgctgggttcctgcggccacttctacgcggtggtggctattgatgtggacatggccttttttgaacctaaaatgagggaaatccttgagcaaaactgcacaggagatgaagactgcaatttctttgactgtttttcaagatgtgatttacgagtcaacaaatgcggagcgcagcgcgtaaacaacaacctgcaggtcatctgtgacaaaatatttcgccattggttttccgcgcctctcaagagctctgcggtctctttccagcttcagctgcagttacaggaggcggtgcaggaatgtgcagaccctggggtccccagtgggaacacccggagagcagcctccagcgtgttctggaagcttcgccgactcctccaaagcccacactgagggagcttgcaaggaggccagagaaagtagccactcttcttggcctttaaacatgctcacacagggaaaagtgaccttggctggatttcttctgccattgttttaaagatgagccatttcccccgtgctctctggggtgccgttctggtctccacattgtggagtggcaagtgctgctgccagagacagtgctccctcgctctcgtcccaccctggcctctgacctgtcgccttgtgtaaaatgagatgagggaggaggtacatgacctcccttcaggagggctctcggtcagaagacaccaacctgtgtgcacttattctctgcagagagcacttgtacctggttatcccagcacgagttccagctgttctttcctgtaaatcgttaccacgttaaaaagtgtgcgtgtgtgcatacaaatgatgtgtatgcctgtgtctgggtgcaaatgagcatgtgagcatgtgtgaatgtgccccatgagtgtcctgccatgtgtgtgagtgtgcacaggtgagtgtgccacaggtgagtgtggtgtgctcatgaaggagtatgagtatgccctgagtgtgaatatgtatgagtgtgaatgagtgtgtgcacatgagtgcacgggtgtcagcatgtgtatataagtgtgggcatgtgtatgtgattgtgtgagtgtgggcaggtgagtgtgttggggatgtgggttagggtggggagtggtgctttctctagtgtgtcctccggaacatcttgcctacctagcaaagaagtgtgaccattctttcggaattaaatacaataaaaagaaaataagctgcaaaaaaa

SEQ ID NO: 11696 - DNA, 606 bp, Homo sapiens
  SIMILAR (1)..(237): 971254mologous to Homo sapiens ferritin heavy subunit,accession number M12937,Smith-Waterman Score=416.
atgaagctgcagaaccaacgaggtggccgaatcttccttcaggatatcaagaaaccagactgtgatgactgggagagcgggctgaatgcgatggagtgtgcattacatttggaaaaaagtgtgaatcagtcactactggaactgcacaaactggccactgacaaaaatgacccccatttgtgtgacttcattgagacacattacctgaataagcaggtgaaagccatcaaagaattggcccaggctcatgaattagttctgctgagcctggccatggccagttgtaaagtgctgtgtgtgctgataccaaaagttatgtacaaaacaccaagaagtcccaggattggtactgcctttcagtatttgtccaaaatggtgcttttctctgcttccctggtcaagcagaatgaacaggtcaccagcgcaggtggtgatatagacactgaggacatgtccccatatgttaccaaggtcacctgtctggaccccagaatccagaggctcggaaaacaaaaacataagctcacagtcaaatcaagcaaatatcaaaaacataacagaagcagaagttttatgaccttaaagcttgaagcagagatagcataa

SEQ ID NO: 11697 - DNA, 423 bp, Homo sapiens
  SIMILAR (1)..(183): 801254mologous to Homo sapiens ribosomal protein L9,accession number U21138,Smith-Waterman Score=252.
atgatcaagggtgtgacactgggcttctgttacaagatgaggtctgtgtatgttcacttccccatcaacatcattatccaggagaatggttctcttgttgaaatccgaaatttcttgggtgaaaaatacatccgcagggttcagatgagaccagctgtatcctccagccaggtcctggaagacttattttccaggtttcttctagaaaaggaatgtaaaactgagctttctagacacttcaagagctggaatgacagaagagaaaccacccgatatcaaggagtcaggctgcccctggagtttaagtccagccagataaccacattgagaggaagactggatgatatcccggaaagctccgtgacactagcatctagattcagcctctgggtgttttccccaataaatctcttgcacatctaa

SEQ ID NO: 11698 - DNA, 927 bp, Homo sapiens
  SIMILAR (221)..(793): 481254mologous to Mus musculus 60S ribosomal protein L9,accession number AF260271,Smith-Waterman Score=312.
cagacgttctttctttgctgcgtctactgcgaggctgggacacactggggcccgctgtcggtctcccgtcctccgacatcttgtctggaacttccgcctggcagtctccagtaggagtggagctctgtgcggcgtagtttggtggaaaaacgggccttgcgtcggcctcacccccagtgtttgtgtttcagaatgaagactattctcagcaatcagacctgtcgacattccagaaaatgtcgacatgtactctgaagggacgcacagttatcgtgaagggcccccagaaggaaccctgcggagggactttcaatcaccttcaatggagaacttcacctttttggaaagaaaaaaaaagaggctccgggttgacaaatggtggggtaacagaaaggaaactggctaccgttcggactatttgtagtcatgtacagaacatgatcaagggtgttacactgggcttccgttacaagatgaggtctgtggtatgctcactttccccatcaaccgttgttatccagggggaatgggtctcttgtttgaaatcccgaaatttctttgggtgaaaaaatatatccgcacgggttcggatgagacccaggtgttgctttgttcagtaatctcaagcccagaaaggtgaatttaatcccttgaaggaaatgacatttgagcttgtttcaaattcagcgggctttgattcagcaagccacaacaagttaaaaacaaggatatcaggaaatttttggatggtatctatgtttttgaaaaaggaactgttcagcaggctgatgaataagatttaagagttacctggctacagaaagaagatgccagatgacacttaagacctacttgtgatatttaaatgatgcaataaaagacctattgatttggaccttttttttaaaaaaaaaaaaaaaaaaaaaa

SEQ ID NO: 11699 - DNA, 417 bp, Homo sapiens; identical to SEQ ID NO: 11087
  SIMILAR (179)..(262): 821254mologous to Homo sapiens Human secreted protein, SEQ ID NO: 6834,accession number G02753,Smith-Waterman Score=115.

SEQ ID NO: 11700 - DNA, 342 bp, Homo sapiens; identical to SEQ ID NO: 6988
  SIMILAR (3)..(248): 601254mologous to Homo sapiens Human secreted protein, SEQ ID NO: 6720,accession number G02639,Smith-Waterman Score=254.

SEQ ID NO: 11701 - DNA, 182 bp, Homo sapiens
  SIMILAR (1)..(111): 861254mologous to Homo sapiens Human secreted protein, SEQ ID NO: 6834,accession number G02753,Smith-Waterman Score=164.
atggaatactatgaagccataaaaaaggatgagttcatgtcctttgcagggacatggatgaagctggaaaccatcattctcagcaaactatcacaggaacagaaaaccaaacactgcaggttctcactcacctgcgagcggcctggtgatgtcttcacagatgagggcgtgggagcccacgg

SEQ ID NO: 11702 - DNA, 439 bp, Homo sapiens; identical to SEQ ID NO: 6989
  SIMILAR (1)..(129): 881254mologous to Macaca fascicularis hypothetical protein,accession number AB047968,Smith-Waterman Score=193.

SEQ ID NO: 11703 - DNA, 325 bp, Homo sapiens
  SIMILAR (179)..(12): 761254mologous to Homo sapiens Human secreted protein, SEQ ID NO: 7217,accession number G03136,Smith-Waterman Score=216.
atggaatactatgcagccataataaaggatgagttcatgtcctttgcagggacatggatgaagctggaaaccatcaatctcagcaaactatcacaaggacagaaaaccaaacacctcatgtcctcacttataagtgggagtggaacaataaaaacacatggacacagggaggagaacatcacacaccagggtctgttggggctaaatgtcacatcctcagggaaactgtcccttaccaccaagcatgttgctcctttttctctgaatcttatcacttatcccaatggtggaattggtgattaccgtgtccctctgcctactacag

SEQ ID NO: 11704 - DNA, 525 bp, Homo sapiens
  SIMILAR (111)..(1): 761254mologous to Homo sapiens Human secreted protein, SEQ ID NO: 7217,accession number G03136,Smith-Waterman Score=140.
atggatgaagctggaaaccatcattctgagcaaaccatcacaaggacagaaaaccaaacactgcatgttgtcactcataggtgggaactgaacaataagacttggacacaggggtttctgggaaagcaaaacagtgagactgatatttgtgtgcaagaaatgtattgggggtgcttttgggatgaacacatcttgggtaatgaaggaacaaggaggactgggcagaggaggaagtggaaagctttcacgctctcacaagacctcagcagtcacaccgacccaccccagcaggctctgtctaactggaaaggcactagagcattgcctaatgaaaacaaaagggatggcctttatccccgctgttgtttggcatcctatgtgtgctgccccaaaaaggaggcatggtcttggggcaaagtggctgtctttagcaaagggaagttgcagagagggtctcagctgagagctgcctgtgatcaaccttctgggcaattgggctatgagcactttgtcctccagggggcg

SEQ ID NO: 11705 - DNA, 864 bp, Homo sapiens
  SIMILAR (421)..(510): 861254mologous to Homo sapiens Human secreted protein, SEQ ID NO: 6720,accession number G02639,Smith-Waterman Score=151.
atggcgctgaacacaggactgctcacagagttacgcaggtgccagtgcccaggtaaagctccacgactgaccgtcccaagagaactgcatgaaatggagagggcaatgaatgagagttcctgttccttcacattcttgccaatctttggtgttgtcagtgttctagatatgggctattctggcagacccaaggatggctcaggggaagctgcgtatggaaataggaacaaagctcagatgccttatctggacagtccacaagggtgtgcactgggtaaccttctggtgggtggagaggagccagactgggaatctggaggtcagaaggctttggcttggcctcctcacacatctacactcgggtgtgaactctctatttacaagagcaaggatttggaacccatcaatgatagactggataagaaaatgtggcacatatacaccatggaatactatgcagccataaaaaagaatcagttcatgtcctttgcagggacatggatgaagctgtctgccccagcagcaccaactgtgcttttcttggcatcctttacaaaccactataatctccgtgcaagtttgctagtggaatcctgtctagcacccagttacacttcagtggagccaaggttctcaattcctcaatcacttacaccagccaggggctcctctgatgggcacacgtgcttttcccaccagagccatgattctctgctgatttgtgctgattctacacacttctggttgtcagctcatatttggatccaagcaaatgcacctcctgtccctcgggcaccaagtgagttgtctttgaagactcgacttaaatgttcacctcagttaaatctccgtagacctccatga

SEQ ID NO: 11706 - DNA, 663 bp, Homo sapiens
  SIMILAR (1)..(153): 841254mologous to Homo sapiens hypothetical protein,accession number AL096744,Smith-Waterman Score=209.
atgcgggacatatacaccatggaatactatgcagccataaaaaaggatgagttcatgtcctttgcagggacacggatgaagctgaaaaccatcattctcagcaaaccatcagaaggacagaaaaccaaacactacatgttctcactcatagacacagagctgtgtacccaacaggtactcaacacatgctgctccttgctttgtggtctatggaccagcagcaccagcgtcaccagggagcttgctagaaattcacctcagatctgctgtatcaggatctgcattgaacaaggtcccaggttcttcgtgtgcacgctaaccccagcttcccggttccttagtgccatctgtgtgagcagagcatatcgcatgagcagcggcttcacacctgagctggatgatgaagggatcttgccatgccgagctggcaaattcctagtcagcagagccatctgccccaacttgtttaacgccagcaaacagttgacttacaaggcaaggctgtgtcaccagaagggatctgagacctggatactctcaggagaggccaaggcagattcacctcctacagagaaagtctgtatttcctacagtatttacagaggctacagcagcttgtgtcccgctaatgagctggtcctgaacactcccatgaccaagtag

SEQ ID NO: 11707 - DNA, 2636 bp, Homo sapiens
  SIMILAR (7620)..(9479): 941254mologous to Homo sapiens putative p150,accession number U93572,Smith-Waterman Score=3044.
atgaacatcgatgcaaaaatcctcaataaaatactggcaaaccgaatccagcagcacatcaaaaagcttatccaccatgatcaagtgggcttcatccctgggatgcaaggctggttcaacatacgaaaatcaataaacatagtccagcatataaacagaaccaatgacaaaaaccacatgattatctcaatagatgcagaaaaggcctttgacaaaattcaacaacgcttcatgctaaaaactctcaataaattaggtattgatgggacgtatctcaaaataataagagctatctatgacaaatccacagccaatattgtactgaatgggcaaaaactggaagcattccctttgaaaactggcacaagacagggatgccctctctcaccacttctattcaacatagtgttggaagttctggccagggcaatcaggcaggagaaggaaataaagggtattcaattacgaaaagaggaaatcaaattgtccctgtttgcagatgacatgattgtacatctagaaaaccccattgtctcagcccaaaatctccttaagctgatagacaatttcagcaaagtctcaggatacaaaatcaatgtgcaaaaatcacaagcattcttatacaccaataacagacaaacagagagccaaatcatgagtgaactcccattcacaattgcttcagagagaataaaatacctaggaatacaacttacaagggacgtgaaggacctcttcaaggagaactacaaaccactgctcaatgacataaaagaggatacaaacaaatggaagaacactccacgctcatgggtaggaagaatcaatatcatgaaaatggccatactgcccaaggtaatttatagattcaatgccatccccatcaagctaccaatgactttcttcacagaattggaaaaaactactttaaagttcatatggaaccaaaaaggagcccgcattgccaagtcaatcctaatttatagattcaatgcccaagaattggaaaaaactactttaaagttcatatggaaccaaaaaggagcccgcattgccaagtcaatcctaagccaaaagaacaaagctggaggcatcacgctacctgacttcaaactatactacaaggctacagtaatcaaaacagcatggtactggtaccaaaacagagatatagaccaatggaacagaacagagccctcagaaataatgccacatatctacaaccatctgatctttgacaaacctgacaaaaacaagaaatggggaaatgattccctatttaataaatggtgctgggaaaactggctagccatatgtagaaagctgaaactggatcccttccttataccttatacaaaaattaattcaagatggattaaagacttaaatgttagacctaaaaccataaaaaccctagaagaaaacctaggcaataccattcaggacatagccatgggcaaggactttatgtctaaaacaccaaaagcaatggcaacaaaagccaaaattgacaaatgggatctaattaatctaaagagcttctgcacagcaaaagaaaccaccatcagagtgaacaggcaacctatagaatgggagaaaatttttgcaatctactcatctgacaaagggcgaatatccagaatctacaatgaactcaaacaaatttacaagaaaaaaacaaacaaccccatcaaaaagtgggcaaaggatatgaacagacacttctcaaaagaagacatttatgcagccaaaagacacatgaaaaaatgctcatcatcactggccattagagaaatgcatatcaaaaccacaatgagacaccatctcacatcagttagaatggcgatcattaaaaagttaggaaacgactggtgctggaggggatgtggagaaataggaagacttttacactgttggtgggactgtaaactagttcaaccattgtggaagtcagtgtggcgattcctcagggatctagaactagaaacaccatttgacccagccagcccattactgggtatatactgggtgtatacccaaaggattataaatcatgctgctataaagatacatgcacacatatgtttattgcagcactattcaccaatagcaaagacttggaaccaacccaaatgtcccatccaatggatagactggattaagaaaaaaatgtagaacatatacaccatggaatactatgcagccataaaaaaatgatgagttcatgtcctttgtagggacatggatgaagctggaaaccatcattctcagcaaactatcgtcagcaaactatcgcaagggcaaaaaaccaaacaccgcatgcttctcactcataggtggggaattgaacaatgagaacacatggacacagggcaggggaccatcacacaatcacacactggggcctgttgaggggtggggggtggggggcaaggggagggatagcattaggagaaatacctaatgcatgcagggcttaaaacctagatgatgggttgacaggttgataggtgcagcaaaccaacatggcacatgtatacctatgtaacaaacctgcacgttgtgcacatgtaccctaaaacttaaagtataataacaaaaataaaataaaataaaaaaggaaaataaataaaaaa

SEQ ID NO: 11708 - DNA, 2988 bp, Homo sapiens
  SIMILAR (1237)..(2247): 861254mologous to Homo sapiens p40,accession number U93564,Smith-Waterman Score=1479.
atggatgaaatgagtactcagacacaggtatgcagtgtaagagcagctaggggactggccggctctggtggccaaagtgcagccccgaggagctggagctgcttgctttttattcagtgcaggcacaatgccaaaaacctggagccaacacaaccagcagaagatgagaagggctgttttgaggacaagattcccaacagaagggaatcctttggtggcaagtgtaaacagctttggcagaaagccgccctccaaagaaaaaggacttcagcttgttttaaactacaggacaattcctcctcgcttcaagaagatgaagaagtagagatggaggccatcagctggcaggccagcagtccagccatgaatgggcaccctgcccctccagtgacctctgctcgttttcccagctgggtcacctttgatgacaatgaagtcagctgccctttaccaccagtcacctctcctctgaagccaaatacaccaccaagtgcatctgtgatcccagatgtaccttataattcaatgggatcatttaagaagagggaccgtcccaagagcactttgatgaacttctccaaagttcagaagctggatatttcctctttaaaccgcacgccttctgtaactgaggcttcaccttggagggcaaccaaccctttcctgaatgagactctgcaggatgtacagccctcccctatcaaccctttcagtgctttctttgaggagcaggagaggcgctcccaaaacagttccatttccagtaccacgggcaaaagccaaagagattccctcattgtcatctaccaggatgccatcagttttgatgattcaagcaaaacccagtcacactctgatgctgttgaaaaactcaaacaactccaaattgatgaccctgatcactttggcagtgcaactctacctgatgatgacccagtagcctggattgaactagatgctcacccgcctggatcagcacggtcccagcctcgtgacgggtggccaatgatgttgaggatccctgagaagaaaaacatcatgtcctccaggcactggggaccgatcttcgtcaaactgacagacactggttacctgcagctgtattatgagcagggcctagaaaaaccattccgtgagttcaagctggagatctgtcatgagatttcagaaccccggcttcaaaactatgatgagaatggcagaatccacagcttgcggatagaccgtgtcacctataaagagaagaagaaataccagcccaaacctgctgtggcccacacagcagagagggaacaggtgattaagctgggcaccaccaattacgatgacttcctgagtttcatccatgcagttcaggaccgtctcatggatctgccagtgttgtcaatggacttgagcacagttggcctcaactaccttgaagaggagattacagtggatgtcagagatgaattctctggcattgtgagcaaaggagacaaccagattctccagcaccatgtcttgacacggatccacatcctgagtttcctgtctgggctcgcagagtgccgcctgggcctcaatgacatcctcgtcaaagggaatgaaatagttttgaggcaggacatcatgcccaccaccaccacaaagtggatcaagctccatgagtgccgtttccatgggtgtgtggatgaggatgttttccacaactcacgggtcattctgttcaaccctttggatgcgtgccggtttgagctaatgcggttcaggacagtgtttgctgagaagaccttgcctttcacactcaggacggccacaagtgtcaatggggcagaggtggaggtgcagagctggctgaggatgtcaactggcttctccgccaatcgtgaccccctcactcaggttccctgtgagaatgtgatgatccgttaccctgtgcccagtgagtgggtgaaaaacttccgcagggaaagtgtcctgggggaaaagtctttgaaagccaaagtgaaccggggggcaagttttggctccactagtgtttctggctctgagcctgtcatgagagtaactctgggaactgccaagtacgagcatgccttcaactccattgtgtggaggataaaccgactgccggacaaaaactcagcttccggtcacccacactgtttcttttgccaccttgaactcggctctgaccgggaagtgccttccagatttgccaatcacgtgaatgtcgagttcagcatgcccacaacttctgcctccaaagccagcgtgagatctatctctgtagaagacaagactgacgtcaggaacgtacctgtggtgtttggtgagagttggaagaaacacctcaatggagagttcggaaaactgtattctataaaacgaacgggatttgttgcagaagaaagaaaacattacactgtttatcctccccaacaccaagtcttcacctggacccagatgtgtgacataggaggtgtggaggttgtcatcctgggacaggatccatatcacagaccctatcaagctcacgaagctgctttagtgtccaaaggcctgtgcgatctctgcctagtttggaaaacatgtatgaagagctgcctacagacagatggttttgatcatcctggccatggagatttatctggacccactgagtggaatggcagacaaaataacttgatgggaggggaccgttggagttggccagcccctttctccatggtaaccatgtgcgaccgaaaggccgtgatcaaaaatgcggacatgtcggaggagatgcaacagaactcagtggagtgcgctcctcaggcgctggagaaatacaacatagagaagaacactgcggctcatatcaagaaggaatgtgacaagaagtacaatgccacctggcactgcatcctggggaggaacttcagtagttacgtgacacatgaaaccaaacacttcatctacttctacctgggccaagtggccattcttctgttcaaatctggttaa

SEQ ID NO: 11709 - DNA, 1036 bp, Homo sapiens
  SIMILAR (1381)..(2235): 311254mologous to Xenopus laevis apical protein,accession number Z14997,Smith-Waterman Score=343.
  misc_feature (1)...(1036): n = a,t,c or g
gagtatcncaggnngnnnnnaactgagacccnctcgagaccctaggaagngcggtggaattcactaggcggcggcggctggcgtggggctgcttagatgcgccacggtttcggtagcgacggtagctctatccgggcctgagctgtgctagcacctcccccaggagaccgttgcagtcggccagcccccttctccacggtgagaaactcggggggccagggggtgtcctcgctgccttatttcgccccactccggacttagccctccgcgtagcccgcgcttcctgagaagtggggtggggggcgtcgtcccgtggtggcgccggccggggtgggggcagttagtgcctggggggcgcggcccaactcaaccccttaccccaggccttgcccactaggtaaccatgtgcgaccgaaaggccgtgatcaaaaatgcggacatgtcggaagagatgcaacaggactcggtggagtgcgctactcaggcgctggagaaatacaacatagagaaggacattgcggctcatatcaagaaggtgaggatgggcgcgggggccgatacgcagccgggagcagggggttccttccccccgatcctgctttcctaagggcgcctgacaggtcccgggaatactgctggcggcttggggcgtagaagcttccagaaaggacgcagatgcattttgcgctcccagctccgcggggggaaagcgccacctagcaacggtatctaagatcagggagcagcggttcccccttctgtgtggttcctgcgccgaggatccatctgggtgttccggaggggggagctgcgtgggtgtttccagccgggccgggaggagatcttgccagccttccagtggggagttgagggaaggtggtgggtggtggcggggctgggggctggggtaggggcttggtaaatggcagtctagaaagccggcaggactgccaacttctcgagcagtgtttgccgcgtggctaatgttccccaggtccccatcatgcacccgctcagtgcttgttctctctgccat

SEQ ID NO: 11710 - DNA, 803 bp, Homo sapiens
  SIMILAR (742)..(1608): 701254mologous to Homo sapiens putative p150,accession number U93572,Smith-Waterman Score=1010.
atccttaattaaattaagctcccccccccggggagcagggcggggcctgagcactaggcggcggcggctggcgtggggctgcttagatgcgccacggtttcggtagcgacggtagctctagccgggcctgagctgtgctagcgacctcccccaggagaccgttgcagtcggccagcccccttctccacgggcttgcccactaggtaaccatgtgcgaccgaaaggccgtgatcaaaaatgcggacatgtcggaagagatgcaccaggactcggtggagtgcgctactcaggcgctggagaaatacaacatagagaaggacattgcggctcatatcaagaaggaatttgacaagaagtacaatcccacctgggcattgcattcgtgggggagggaactttcggtagtttatgttgacacattgaaaccaaacactttcatcttacttcttacctgggggccaagtgggccatttctttctgtttcaaattctggtttaaaaggcatgggactgttgccacacacccagtgattcccttccaaaaacaagggattgcagccttaaatttccaattaccagaggattgaaatttttcagccttggttaaggggaacatctcgatgtttggaacctttgttgtgttttgtacagggcattctctgtactagtttgtcgtggttataaaacaattagcagaatagcctacatttgtatttattttctattccatacttctgcccacgttgttttctctcaaaatccattcctttaaaaaataaatctgatgcagatgttaaaaaaaaa

SEQ ID NO: 11711 - DNA, 813 bp, Homo sapiens
  SIMILAR (1)..(330): 961254mologous to Homo sapiens dJ254P11.1 (novel protein similar to RNA polymerase II elongation factor SIII, subunit P15),accession number AL136318,Smith-Waterman Score=557.
atggatggagaggagaaaacctgtggtggctgtgaaggccctgatgcgatgtatgtgaaattgatatcatctgatggccatgaatttattgtaaaaagagaacatgcattaacatcaggcacaataaaaaccacattgggtggcccaggtcagtctgctgtgaatgaaaccaatgaggtcaattttagagagataccttcgcgtgtgctatcaaaagtatgcacgtattttatgtataaggttcgctaccctaacagctccaccgaggttccagagctcccaattgcacctgaaattgcactagaactgttaatggattcagaggactgcctgaagaggaaagctataggagatatacagtgtcgaggaagcacgaacaagccagctaatttagttcaagtgggaataaggacagtttctggcagaagtgactttgaagttataaactactcaatgtcgttaagcccatggggagactggggctgtggaattagccctgaagtcttacaggatacagataggcttcctcgggtatgtctaacctctgcaaaagttcaggtttctggttatggagaaaaatctccattggaaggaatcagctatgttctgccttttgctggagactctcaggaaagttgtccagggtttagggatatgagcaaatggattcatagaaagtatgtaaggttcaaagtggatgtgagagacaaatttgggggcagcttcagatcatggtctctgaagccaaacctgagtttggtttctagctacatgattaaccaacaatttcctcttctgccaattaaccactga

SEQ ID NO: 11712 - DNA, 563 bp, Homo sapiens
  SIMILAR (22)..(1461): 781254mologous to Homo sapiens putative p150,accession number U93572,Smith-Waterman Score=1795.
ccttcggctcttacccaccggaagtcattctttcgactgccccggaacccaccggagcattttgctggttgtgggggggcggccctgggataggggctgtgggagtacgcggggacccggctgcggtggctgcgggactgacgagaaactactaaagttcctggggaagcaaagtagaatttcataagaacaaaatggatggagagaggagaaaacctatggtagctgtgaaggccctgatgccatgtatgtcaaattgatatcatccgatggccatgaatttattgtaaaaagagaacatgcattaacatcaggcacgataaaagccatgttgagtggcccaggtcagtttgctgagaacgaaaccaatgaggtcaattttagagagataccttcacatgtgctatcgaaagtatgcatgtattttacgtacaaggttcgctacactaacagctccaccgagattcctgaattcccaattgcacctgaaattgcactggaactgctgatggctgcgaacttcttagattgttaaataaaataaattataataaactgttaac

SEQ ID NO: 11713 - DNA, 1191 bp, Homo sapiens
  SIMILAR (34)..(276): 451254mologous to Homo sapiens gag,accession number AF156961,Smith-Waterman Score=191.
atgagctttgtatcacatatagcttcagggaaggaggcaaatattatcccaactggaagagaagcagtaccaatggatgaccctagacgggatcctaatgatgaggtggaagcctggaagaggagacactttcaggagtgcataatggaaggcttatgtagaactaggaccaagcctctcaattacactaagttgtccatgattgaccagagatttgatggaaaccccactgccttcctggagaagataagagaggccctgcctcaagaccctagcgggcagggacacaagctgctggatatcgagaggaatacatccgcggaagaagatgcaagcagctggacgtcaagaggacgtcgaggggagcaaaccagtggaagagcacacgacgctggcacaccggcaggccatcagagttcggccgggaaataccaaagcacaatcaacccatcaaacgaaaaaaacaacaacagcctaaaagacaaggttgatgtggaggagaaaaaaaagaccagccaacacttagggaaaatagaaagaacctacgttgaaatattggggaatggttcccctgataactttgtgtactcccatggtgttaatcagggcttatggtattgcactaagcaggatgaaaaatttgtgagaactttgagatcattttttactgcaatacacaatttattggagagacaacttgctcctgtggagatgattaatgtcacaaggtggattttaagtggatactcactacacaaatgggtaacaggtaggggctgcaacagtttggagggctcagaagaagacaggaagatttgtgaggctttgaatcatcttagagacttgttgaatggttttggccaaaatgctgatagtgatatagacaatgaaattcaggctgaagtggtctcagatggagatgtgcaacttcttgggaactggagcaaaggtcgctcttgccatgctttagcaaagagactggcggcattttgcccctgccctagagatctgtggaattttgaacttcagagacataagttagggtgtcgggatgaaagagagagtggagaaggatgtattcttcgcctgctacatcttgaacacagcaaccacgagcagtcttcatcccatgaccgctgcccccgccttgtttccacagacccaagctcctgcagtgctcgagtcacatga

SEQ ID NO: 11714 - DNA, 1140 bp, Homo sapiens
  SIMILAR (2427)..(1321): 931254mologous to Homo sapiens putative p150,accession number U93563,Smith-Waterman Score=1778.
atgacatcactctgcattttaattatcagcagaatgtcaatcagggacttttctaattctttacagaatggcatagaatcaggaaatgaaactacatcctacttatcaacttgcatgtttagtgatggggttagagatcccatgctcaagggccagaagaagaaagaaggaagaaggaagaagaagaagaatgaggaggaggaggagaaggagaagaagaagaggaagaaggagaaggagaaggagaagaagcagaaggagaaggagaaggagaagaaaaaggagaaggagaagaaaaaagagaagaagaagaagactagagaaattagagaaacacacacacatttacctaatcctcaacatgctttggccagggagaacttactctggagagggaaatgctatagacagcaggctgcagagccagactctcgaattcaaatggcctccaggggacaaaggactcgcaggcttttgagtccagaggttggagtggagtatgatgtatccaggtccattgctggggcaggccagttggtgttggccatagatgccagctccctgttattagaaagcgcacggttcttcttctatgcatttgttctcctggctggtagtttgggctgtgacttacaatacgatgttggccattcattcaataaatattttttgagtgtggagctacctgactttctgtccctgactgagattattcagcagcgtacacacctctgtctaacttgcctaagaaaaagcgacgataaggacgctttcatccatttgctcgacttctctgagtggactctggacagcgctgtttgggagcctacttctcatatcactgtcgaaggtgtcagctgtccagaaaactgccgagagaaaataacactgagattagctaaatgcagatggccacctgatatactcaatgctcactatgatatactcaatgctcacaatgatatactcaacgctcacaatgatatactcaacgctcacaatgatatactcaacgctcacaatgatatactcagtgctcacaatgatatactcaatgctcacaatgatatactcaatgctcacaatgatatactgtacaacaggatgtgccacagtctctttgctatgagcatagagtga

SEQ ID NO: 11715 - DNA, 475 bp, Homo sapiens
  SIMILAR (158)..(427): 951254mologous to Homo sapiens dJ702J19.1 (glycine cleavage system protein H (aminomethyl carrier)),accession number AL033531,Smith-Waterman Score=432.
  misc_feature (1)...(475): n = a,t,c or g
catcgagttcactancncgagcggaggaattctgggaacatggcgctgcgagtggagcggagcgtgcgggccgtgctctgcagcctgcacgtggtcctggcacctgccgcgccctgcctatcgaggccctggcagcttgggatgggcgccgtctggttactgtaatctgcctgaagttgggacaaaattgaacaaacaagatgagtttggtgctttggagagagtgaaagctgctagtgaactctattctcctttatcaggagaagtaaccgaaattaatgaagctcttgcagaaaatccaggacttgtaaacaaatctcgttatgaagatggttggctgatcaagatgacactgagtaacccttcataactagatgaacttatgagtgaagaagcatatgagaaatacataaaatctattgaggagtgaaaatggaaccactaaataagctagtatgaaataacgcaacccagc

SEQ ID NO: 11716 - DNA, 1192 bp, Homo sapiens
  SIMILAR (157)..(630): 481254mologous to Homo sapiens dJ702J19.1 (glycine cleavage system protein H (aminomethyl carrier)),accession number AL033531,Smith-Waterman Score=256.
ggctccctccggccgcgaactgcccctccccgccccgcctcccggcgcgggtggccgaggcgtagcgccgcgacccccgcacccctgcgaacatggcgctgcgagtggtgcggagcgtgcgggccctgctctgcaccctgcgcgcggtcccgttacccgcccgcgccctgcccgccgaggccctggcagctgggggtgggcgccgtccgtacgctgcgcactggaccccgctctgctctcggtgcgtaaattcacagagaaacacgaatgggtaacaacagaaaatggcattggaacagtgggaatcaggcaattttgcacagrgaagcgttgggagatgttgtttattgtagtctccctgaagttgggaccaaaatttgaaccaaaccaagctggagtttggtgcttttggaaaggtgtgaaagctgctagtgaactctattctcctttatcagggagaagtaactgaaattaattgaagctctttgcagaaaatccagggacttgtaaaacaaatttttgttatggaagatggttggctgatcaagatgacactgagtaacccttcagaacctagatgaacttatgagtgaagaagcatatgagaaatacataaaatctattgaggagtgaaaatggaactcctaaataaactagtatgaaataacgcaagccagcagagttgtcttaaattagtggtgggataggaagacttaggaataggaaacttttagtattacccgatggggggaaaaaaaaactactgttaacactgctaatgaaagaaaaatgccctttaactttctaatgattataggataaatataatatgcgtctttttcacaatatcccatgatttttagactagggctctagtattcatgaaattatccatgaaattatccatgggtaaaaacctaagttataaaaattacataattccaaagataacattgttattcttaagccttatataatattgtaacttgcatgtatccatacctggatttgggatgaaatacttaatgatctttccattggaaataactggaagtgaagaggttttgttgcttgtacagtgtcagatgaggaacaccactatcttaattttgcgatacactgcatttgctggtgctatttttatacagtgaagcaacagctttgcagcaaaataataaaatacttcttcgtt

SEQ ID NO: 11717 - DNA, 758 bp, Homo sapiens
  SIMILAR (1903)..(1643): 971254mologous to Escherichia coli S-adenosylmethionine- dependent methltransferase,accession number D26440,Smith-Waterman Score=434.
cacttggtaagattggtgtcttcttggttcatccttgccctgcagaagtggatcatagacctggccatgtcatcctggatgcacctttatcatcacgtttgccagactgcattattattaaggatttattccctcagcaaggatttgttgagtgccggccaggtgccagcactgtcacaggtcctggggacccagcaggaaacagaccgagtgttccccatgagctttccttctccaggggagacagaaggtgtcaccttgtctcccttcggtctacactcaacccagagactggagtttcagctgctgaagaggctgatgctggcagggctggtggtggtcagcgtcgaggatgctgtgagagcagcaggcttatttcctgggtgacagagactgcgtctcagaagagtgtcgaagaaaggagaagagggaggaaggaggaagacaagggaggagggaagatgagggaggaggagggaggaggaggaggagaagaagaagaaataatattttctaagtttcctttgctactcaagaaaaaagaaaaagttcatatcactcagtcacacactatggaatccatgtcattcacctaccagcgttcctctacttctctcaatattgccactaagccttccagttctcacacgctccttgactctgattctgactcagaagaagaatctttgccttacttacccatttcatcggaacctaatggtacagactcagttaaaaataaactgctgcatgaataa

SEQ ID NO: 11718 - DNA, 407 bp, Homo sapiens
  SIMILAR (161)..(60): 971254mologous to Homo sapiens 3',5' cyclic nucleotide phosphodiesterase,accession number U40370,Smith-Waterman Score=172.
  misc_feature (1)...(407): n = a,t,c or g
ggttgacttccgatcacaaagtggggaaaatggaagccctaattcagcttctttatctccattcctttcaggcgctgccacattttttcagtctgttctcctgtaagatacttaaaagtggtgttttccaattcttcaatctctgtggcactagaccccatgatgatgctcctgggaggagttgagagacttctcacaggaggtttcatttaaactggaactgaaagtatgagtaggcattttcttgtttgactgtaggtcatcatgagaggtgacacccggnnnnnnnnnnnnnnnnnnnnnnnnnnnnnnnnnnnnnnnnnnttcagcccgcagctgcaccgtgggagcccttttctgggnnnnnnnnnnnnnnnnnnnnnnnnnnnnnnnnncgaggagaagtg

SEQ ID NO: 11719 - DNA, 1763 bp, Homo sapiens
  SIMILAR (613)..(1524): 881254mologous to Homo sapiens putative p150,accession number U93569,Smith-Waterman Score=1375.
cccacgcgtccgcccacgcgtccgaagtcattcacgtttctcttgtgcataatagagctcgtaaactgtaggaattctgatgtgcttcagtgcacagaacagtaacagatgagctgcttttggggagagcttgagtactcagtcggagcatcatcatggggtctagtgccacagagattgaagaattggaaaacaccacttttaagtatcttacaggagaacagactgaaaaaatgtggcagcgcctgaaaggaatactaagatgcttggtgaagcagctggaaagaggtgatgttaacctcgtcgacttatagaagaatattgaatatgcggcatctgtgctggaagcagtttatatcgatgaaacaagaagacttctggatactgaagatgagctcagtgacattcagactgactcagtcccatctgaagtccgggactggttggcttctacctttacacggaaaatggggatgacaaaaaagaaacctgaggaaaaaccaaaatttcggagcattgtgcatgctgttcaagctggaatttttgtggaaagaatgtaccgaaaaacatatcatatggttggtttggcatatccagcagctgtcatcgtaacattaaaggatgttgataaatggtctttcgatgtatttgccctaaatgaagcaagtggagagcatagtctgaagtttatgatttatgaactgtttaccagatatgatcttatcaaccgtttcaagattcctgtttcttgcctaatcacctttgcagaagctttagaagttggttacagcaagtacaaaaatccatatcacaatttgattcatgcagctgatgtcactcaaactgtgcattacataatgcttcatacaggtatcatgcactggctcactgaactggaaattttagcaatggtctttgctgctgccattcatgattatgagcatacagggacaacaaacaactttcacattcagacaaggtcagatgttgccattttgtataatgatcgctctgtccttgagaatcaccacgtgagtgcagcttatcgacttatgcaagaagaagaaatgaatatcttgataaatttatccaaagatgactggagggatcttcggaacctagtgattgaaatggttttatctacagacatgtcaggtcacttccagcaaattaaaaatataagaaacagtttgcagcagcctgaagggattgacagagccaaaaccatgtccctgattctccacgcagcagacatcagccacccagccaaatcctggaagctgcattatcggtggaccatggccctaatggaggagtttttcctgcagggagataaagaagctgaattagggcttccattttccccactttgtgatcggaagtcaaccatggtggcccagtcacaaataggtttcatcgatttcatagtagagccaacattttctcttctgacagactcaacagagaaaattgttattcctcttatagaggaagcctcaaaagccgaaacttcttcctatgtggcaagcagctcaaccaccattgtggggttacacattgctgatgcactaagacgatcaaatacaaaaggctccatgagtgatgggtcctattccccagactactcccttgcagcagtggacctgaagagtttcaagaacaacctggtggacatcattcagcagaacaaagagaggtggaaagagttagctgcacaagaagcaagaaccagttcacagaagtgtgagtttattcatcagtaa

SEQ ID NO: 11720 - DNA, 627 bp, Homo sapiens
  SIMILAR (1)..(102): 1001254mologous to Homo sapiens calcium/calmodulin-stimulated cyclic nucleotide phosphodiesterase,accession number AF110236,Smith-Waterman Score=175.
atggggtctagtgccacagagattgaagaattggaaaacaccacttttaagtatcttacaggagaacagactgaaaaaatgtggcagcgcctgaaaggaatatatgtggttcagatatgcagaaaggtaactaagaaagccatttgccgggatactgccacaaataaaatttccctcagccagtgggcccttaccaaatgtgacacaatcaaaggcttagaaagggcttatgcactggagtttaagctctctggaaccctcaaactggcgtgtgaagaagcctgccagtgggcccttaccaaatgtgacacaatcaaaggcttagaaagggcttatgcactggagtttaagctctctggaaccctcaaactggcgtgtgaagaagcctggaaaaggctaaagccaagagactgtgactggagctgcctttgtcagcaaggagaaagaagatccaatgggcttgtactaatgtcaggggcacgtgtccctctgccggccacgtgcaccttagaaagaagtcagcctggaccaattcaagagatcctgcctaagatgactgcctggaagtgccgagcacccccgacagagtggaccactgaagctagggatgagaaagggagtccttaa

SEQ ID NO: 11721 - DNA, 478 bp, Homo sapiens; identical to SEQ ID NO: 1263
  SIMILAR (463)..(1314): 791254mologous to Homo sapiens p40,accession number U93569,Smith-Waterman Score=1159.
  misc_feature (1)...(478): n = a,t,c or g

SEQ ID NO: 11722 - DNA, 171 bp, Homo sapiens
  SIMILAR (61)..(150): 711254mologous to Trypanosoma brucei probable similar to ring -h2 finger protein rha1a,accession number AL359782,Smith-Waterman Score=120.
ctagtctccagtgatgatgagcttttttctttttgtgtgtttgttgaccacataaaggtccccttcttcttcttcttcttcttcttcttcttcttcttcttcttcttcttcttcttcttcttcttctccttctccttcctcttctttttctgggtctgttgtataatgcat

SEQ ID NO: 11723 - DNA, 201 bp, Homo sapiens; identical to SEQ ID NO: 3959
  SIMILAR (7)..(129): 751254mologous to Arabidopsis thaliana putative protein,accession number AL162506,Smith-Waterman Score=163.

SEQ ID NO: 11724 - DNA, 403 bp, Homo sapiens
  SIMILAR (187)..(396): 301254mologous to Homo sapiens Human secreted protein sequence SEQ ID NO:130,accession number Y87091,Smith-Waterman Score =61.
cctgccccgatcacctccccttcctgattgttagtccttttgtttctccaggaagtctcttctcatccctgttcacgccttcatgtaacaagcatttatcacactagtaccgtgagccacgcgtgtgctgtggttacatccgtggaacagacagacagcagtgcctgatcttgtaattcttccatcctttcattcctttctctcagtctcgtagctgatccacagattgcaacgtacagatgtgatgttccaggcttggccacaaggggacactgttgccaggttcctgagagtgcttggggaaaatgtgggcgagagaggcacagcacagtcctccggcttggtaggtttcaagctcttttgactgggctggcgctgacatttgcaggggcagctgctgtgg

SEQ ID NO: 11725 - DNA, 429 bp, Homo sapiens; identical to SEQ ID NO: 3963
  SIMILAR (259)..(1008): 641254mologous to Homo sapiens NAG13,accession number AF194537,Smith-Waterman Score=754.

SEQ ID NO: 11726 - DNA, 282 bp, Homo sapiens; identical to SEQ ID NO: 2959
  SIMILAR (116)..(232): 841254mologous to Homo sapiens Human secreted protein HCHPF68, SEQ ID NO:163,accession number Y86248,Smith-Waterman Score =168.

SEQ ID NO: 11727 - DNA, 377 bp, Homo sapiens
  SIMILAR (337)..(1347): 801254mologous to Homo sapiens p40,accession number U93566,Smith-Waterman Score=1334.
aagaagaagaagaagaagaagaagaggaagaggaagaggaagaggaagaagaagaagaagaagaagaagaagaagaagaagaagaagaagaagaagaagaagaagaaaggtcagttgctcatgtggaacccagaacaggctacttgttcaatagtcaacagacactgaacacctatcatgtgagaggcacagatccaggtacttgggataaatcagtacacagaatagcaaaggcaagaatagtcaacatcaaccatgattttcaaatatcccatcggatatcatcaagatcaaccctttctcttcctcctcctcagcctactcaacatgaagacaatgaggatgaagaactctatgataatccacttccacaatga

SEQ ID NO: 11728 - DNA, 939 bp, Homo sapiens
  SIMILAR (54)..(881): 1001254mologous to Homo sapiens Elongation factor-1alpha enzyme,accession number W11237,Smith-Waterman Score=1453.
atggtagatgtcaagcattactggaactctgccaatgtccctgttgagcaagcccagagtagcacagagtcagcccaggatgcctacatggacggacagggccagcgaggagatattatcagccagtctggactcagcaactccaccgagagcctggacagtatgaaggctctgacagccgccatcgaagctgcaaacgcccagatccatggccctgccagtcaacacatgggcaataacactgccaccgtcaccaccacgactaccatagccaccgtcaccacgggggacaggatagaaggaccactttaagaaaaatcgatgcctgtctatcgggatacaggtggatgatgctgaagaacctgacaaaacaggggagaataaagcacccagtaagttccagtccgtgggagtgcaagtagaagaagagaagtgcttccgcaggttcactcgatccaacagtgtgacgacagcagtacaggccgacctgggacttccatgataatctggaaaattctctggaatctatagaggacaattcgtgtcctggccccatggccagacagttctcccgcgatgccagcacctccacagtcagcattcagggctcaggaaaccattaccatgcctgtgccgccgatgatgactttgacacggattttgacccctctattctgcctcctccggacccctggattgactctatcactgaagaccctctggaggccgtgcaaaggtcagtgtgccaccgggatggccactggttcctgaagcttctccaggcagagcgagaccgcatggaggggtggtgtcaacagatggagcgggaagaacgggaaaacaacctgcccgaagacagaggcaaggttgttgaagatgagggaataggggttgagttgagaatggataagattcaggaaattagagttagagagggag

SEQ ID NO: 11729 - DNA, 2456 bp, Homo sapiens
  SIMILAR (1)..(489): 1001254mologous to Cloning vector pZC320 SopB,accession number U26464,Smith-Waterman Score=819.
ttctttttcctttgtaagaatccacttcaaattcagtttcttcttactatacttttctgatgcttcactgcagctgccatggggcttttataagctgggaatgggttaagcatagtcccagctgttcattcagccacgatgttggcaggagttagcttctttacacataaagttggcatcaaatttggaattcacaatcactagttcacgaacgtcacaggcatttcttaggcgctttcttatataaatggaaataccattaactttcttcttcatgcacgctctctgacagcatcgggtcaaaggaacttttttcctgcctcttttcatagcttccaccgccccatccttcttctaaatctttaattttgcaaagccatagggagtggtggtagcctgtggcgagttgaagattttgaacaataggtgtttctgagctggatttattgaaagggtcttgtctgtgtcctgttgccaggttcctgagagtgcttggggaaaatgtgggcgagagaggcacagcacagtcctccggcttggtaggtttcaagctcttttgactgggctggcgctgacatttgcaggggcagctgctgtggattgcctgcgcattgtttggctgtagttctttccattcttcctccttgctgagaacaatgttgcgtttgattagcagcgcagccagtgctttctgaaagatctgctctccccagaagaggcggctgctatcagttgaatagatctcatggtagatgtcaagcattactggaactctgccaatgtccctgttgagcaaggtatccagagttatccctatcgatagcgaagatgagctgacaacagccaccaggtggcgtccaattgcagttggcctggggagtgtaggagccgcactggaggctcagtccccaagcttccgcaggttcactcgatccaacagtgtgacgacagcagtacaggccgacctggacttccatgataatctggaaaattctctggaatctatagaggacaattcgtgtcctggccccatggccagacagttctcccgcgatgccagcacctccacagtcagcattcagggctcaggaaaccattaccatgcctgtgccgccgatgatgactttgacacggattttgacccctctattctgcctcctccggacccctggattgactctatcactgaagaccctctggaggccgtgcaaaggtcagtgtgccaccgggatggccactggttcctgaagcttctccaggcagagcgagaccgcatggaggggtggtgtcaacagatggagcgggaagaacgggaaaacaacctgcccgaagacaacacagttccattccacaaacacttgaaggctttctctattttttcatactttgagagacacgaaataggagcttcaaactactgggattccaaaattctagtcagtgccgtggcaaaccctgcgcccaggacagagtcaccaatttcaaatgcggccaatccagatcagggagaattggaccataaagcagtagcaaccctctccaggaagaagggaaaatatcagtgcatgaaagaatattcatcttgccctcacaatacccctgacgatggcctagagactttgacaggtagactttgcttctgggagcatctgcgggaaaccgctatttttggttcttatgagaggcaggaagagcgttcagtgagtactacctggttcagagaaaatgacgcggcagaaatgagctgccagcagggccaggctgtcggctttgaaattccagaggcctgcccagcccttttggtttcctggaatgctttcattcagtcgtcatgcggtgaggaaaaaccctgcaacatcagtgttgagctggaagaatatctcatctgccgtcaggggacagcggcccagggcgacaggcacacatccctgcctgtgctcagcggcacagtcaatggaccgcggggcaggggcacgcaggctcgcccagcagcagtgtcagacctatgcgcacaaacagacggttcacgcccaggtcacaggcgcccgttgtctcctggccagaggttgacgcacaggccaaccgttggacaggctcatgctctgtgtcatgagaaaggtggagcagagaaagggcctaaatgtgccttacttccgctgctggagcggtggaatgtggcagcagctgtctggatgatgtggaagcccagcacgaggaggagggaggaaaagtaccagatcccactgaaccgaaatagaattgaagaagaagaagaaagaaaggactgtgaagaagaaagaaagaaggactgcgaagaagaagaagaaagaagaaagaagaagaagaagaagaagaagaagaagaagaagaagaagaagaagaagaagaagaagaagaagaagaagaggaaagaaagacggactgccaagcctaagagttggtgtcctgtggcataa

SEQ ID NO: 11730 - DNA, 315 bp, Homo sapiens
  SIMILAR (541)..(1140): 461254mologous to Homo sapiens dJ845O24.4 (Heterogenous Nuclear Ribonucleoprotein HNRNP C1 LIKE protein),accession number AL022101,Smith-Waterman Score=302.
atggcctccatctccgagctcgcctgcatctactcagccctcattctgcacgacaatgaggtgactgtcacagagtataagatcaaggccctcattaaagcagctggtgtaaatgttgaaccttttcggcctggcttgtttgcaaaggccccggccaatgtcaacattaggagcctcatctgcaatgtaggggctggaggacctgctccagcagctggtgctgcaccagcaggagctgaggagaagaaaatggaagcaaagaaagaagaatttgaggactctgatgatgacatgggctttggtctttctgactaa

SEQ ID NO: 11731 - DNA, 440 bp, Homo sapiens
  SIMILAR (201)..(395): 1001254mologous to Homo sapiens acidic ribosomal phosphoprotein (P1),accession number M17886,Smith-Waterman Score= 332.
cggacgcgtggggccgccaaggtgctcggtccttccgaggaagctaaggctgcgttggggtgaggccctcacttcatccggcgactagcaccgcgtccggcagcgccagccctacactcgcccgcgccatggcctctgtctccgagctcgcctgcatctactcggccctcattctgcacgacgatgaggtgacagtcacggccctggccaacgtcaacattgggagcctcatctgcaatgtaggggccggtggacctgctccagcagctggtgctgcaccagcaggagggcctgccccctccactgctgctgctccagctgaggagaagaaagtggaagcaaagaaagaagaatccgaggagtctgatgatgacatgggctttggtctttttgactaaacctcttttataacatggttcaataaaagctgaactttagag

SEQ ID NO: 11732 - DNA, 428 bp, Homo sapiens
  SIMILAR (132)..(278): 1001254mologous to Homo sapiens acidic ribosomal phosphoprotein (P1),accession number M17886,Smith-Waterman Score= 249.
tccgcgtcgacgatttcgtccaaggtgctcggtccttccgaggaagctaatgctgcgttgtggtgaggccctcacttcatccggcgactagcaccgcgtccggcagcgccagccctacactcgcccgcgccatggcctctgtctccgagctcgcctgcatctactcggccctcattctgcacgacgatgaggtgacagtcacggaggataagatcaatgccctcattaaagcagccggtgtaaatgttgagcctttttggcctggcttgtttgcaaaggtaaggtgatggtggcaaagtgattgtggtaaggcctgctgatttacgagggcagttgtacatgctaaagtacccccagcggtgccataacgccccacatgccgctggatctcctaggtgtttttcgttgcatgtatatctctaggagct

SEQ ID NO: 11733 - DNA, 423 bp, Homo sapiens
  SIMILAR (484)..(1134): 761254mologous to multiple sclerosis associated retrovirus polyprotein,accession number AF009668,Smith-Waterman Score=897.
atggttgattctggacctgagacaggcaaaatgcaagatgagcctgaaatacctgaagctacggtggcggcacatctacccagggcctgtacaagtacacgtagaaaggaagcccaaacccttttcctttgtcacattcccacttccaacccttgtctccctggaagcccagaactagcccaagtacaaatgccgctgcagccttctcggcaggccctggccaacgtcaacattggaagcctcatctgcaatgtaggggctggtggacctgctctagcagctggtgctgcaccagcaggaggtcctgccccctccattgctgctgcttcagctgaggagaagaaaatggaagcaaagaaagaagaatctgaggagtctgatgatgacatgggctttggtctttttactaaacctgttttataa

SEQ ID NO: 11734 - DNA, 709 bp, Homo sapiens
  SIMILAR (379)..(227): 381254mologous to Mus musculus formin-2,accession number AF218940,Smith-Waterman Score=84.
  misc_feature (1)...(709): n = a,t,c or g
gacgcactntccggatcgacccacgcgtccgtgccgccaatgtgctcggtccttccgaaggaagctaaaggctgccgttggggttgagggcccctcactttcatccggcgaactaggcacccgcgtcccggcagcgcccagccctacaactcgcccgcgcgcaatggccttctgtctcccgagcttcgcctgcatcctactcggccctcattctgcacgacgatgagggtgacaagtcacggaggataagatcatatgccctcattaaaagcagccgggtgtaaatgttgagccctttttggcctggcttgtttgcaaaggccctgggccaacgtcaacaatggggagcctcatctgcaatgtaggggccggtggaccttgctgcccagccagctgggtgctgcaaccagcagggaggtccctgccccctccactgctggctgcttccagcttgagggagaagaaagtgggaagcaaagaaagaaggattccgagggagttttgattgattgacatggggctttgggtctttttgactaaaacctcttttataaacatgtttcaataaaaaagctggaactttactgctgttggtcttgtccatagttttggaatgtgctctgcaaaaatggtctggtttgtaatgttggctttcagcctattctgccatgacacaggctggattttccctgccaccattgccggatgt

SEQ ID NO: 11735 - DNA, 451 bp, Homo sapiens
  SIMILAR (246)..(395): 981254mologous to Homo sapiens ribosomal protein L35,accession number U12465,Smith-Waterman Score=255.
tcttccacagctttgccaagacttggacactcagcccagtaggtcagcagacttacatgaaatgaggatggtcccaccagccttagatttggggggattaattgagttagtgacgtgtggcctgctggcagtcccatggtggcagcctcctcctgagtggctctggatggccctccccagcccccttagctgctgcagtagctcctcagccctgggtccttggattcaccctgccgtctgtctcccagggcaagaagtacaagcccctggacctgcggcctaagaagacacgtgccatgcgccgccggctcaacaagcacgaggagaacctgaagaccaagaagcagcagcggaaggagcggctgtacccgctgcggaagtacgcggtcaaggcctgaggggcgcattgtcaataaagcacagctggctgagaaaaaaaaaaaaaaaaaaa

SEQ ID NO: 11736 - DNA, 636 bp, Homo sapiens
  SIMILAR (547)..(852): 641254mologous to Homo sapiens bA486O22.3 (similar to RPS3A (ribosomal protein S3A)),accession number AL356115,Smith-Waterman Score=269.
gggcgattcgacggctgaggatttcggcacgagaagaagagagagagaaccagccccgcctacttcctctttccctcggagcgggcggcggcgttggcggctttgtgcagcaatggccaagattcaaggctcgagatcttcgcgggaagaagaaggaggagctggttgaaacagctggaacgacctgaaggtggagcttgtcccatctgcgcgtcggcaaaagcgacagggcggtgcggcctcccaagctctctaagatccgaggtcgtccggaaatccattgcgccgtgttctccccggttatttacccagactcagaaagaaaacctcaggaaattttacaagggcaagaagtacaagcccctcggacctgcggcctaagaagacacgtgccatgcgccgccggctcaacaagcacgaggagaacctcgaggaccaagaagcagcagcggaaggagcggctgtacccgctgcggaagtacgcggtcaaggccttagggggcgcattgtcaataaagcacaaggagaacctgaagaccaagaagcagcagcggaaggagcggctgtacccgctgcggaagtacgcggtcaaggcctgaggggcgcattgtcaataaagcacagctggctgagaaa

SEQ ID NO: 11737 - DNA, 370 bp, Homo sapiens
  SIMILAR (262)..(53): 981254mologous to Homo sapiens ribosomal protein,accession number Z26876,Smith-Waterman Score=344.
aggatttttagtattttaatataatacagttccaatcagtgtgtctggttcatttcagttccttcactgccaaaccggggggcagggactgcttcagtttctctgccttctctttgtcagtgatgaccagggtgtaaaggtatctgctgcatcgaactttaaacttcacgttgtccttatgtttcttgatcttgacagatttggcatcctttcgtcgggctgtgagcaggaagtccttgatttcctcaattttccgaggcatgaagacgaggcgcgttgggctctggcgcggaccaggacctttctcaccctcgtatcaccatagagacactcacctcgtgcagaagtctacagacgtcaagtccccgcc

SEQ ID NO: 11738 - DNA, 9466 bp, Homo sapiens
  SIMILAR (1)..(150): 701254mologous to Homo sapiens HSPC039 protein,accession number AF125100,Smith-Waterman Score=171.
gccgtggctccggtagcagcaagttcgaaccccgctcccgctccgcttcggttctcgctccttcggcccttgggcctccaaacaccagtccccggcagctcgttgcgcattgcgctctccccgccaccaggatgccggtaaccgagaaggatctagctgaggacgcgccttggaagaagatccagcagaacacgttcacacgctggtgcaacgagcacctcaagtgcgtgaacaaacgcatcggcaacctgcagaccgacctgagcgacgggctgcggctcatcgcgctgctcgaggtgctcagccagaagcgcatgtaccgcaagtaccatcagcggcccacctttcgccagatgcagctcgagaatgtgtccgtggcgctcgagttcctggaccgtgagagcatcaagctcgtgtccatcgatagcaaagccattgtggatgggaacctgaagctcatcttgggtctggtgtggacgctgatcctccactactccatctccatgcccgtgtgggaggatgaaggggatgatgatgccaagaagcagacgccaaagcagaggctgctggggtggattcagaacaagatcccctacttgcccatcaccaactttaaccagaactggcaagacggcaaagccctgggagccctggtagacagctgtgctccaggtctgtgcccagactgggaatcctgggacccgcagaagcctgtggataatgcacgagaagccatgcagcaggcagatgactggctgggtgtcccacaggtcatcactcctgaagaaatcattcacccggatgtggacgagcactcagttatgacttacctgtcccagttccccaaagccaagctcaagccgggggctcctctcaaacccaaactcaacccgaagaaagccagggcctatggcagaggaatcgagcccactggaaacatggtgaagcagccagccaagttcactgtggacaccatcagcgccgggcaaggagacgtgatggtgtttgttgaggacccagaagggaacaaagaggaggcacaagtgacccctgacagtgacaagaacaagacatactctgtggagtatctgcccaaggtcaccgggctacacaaagtcacagtcctctttgcaggacagcacatctccaagagcccatttgaagtgagtgttgacaaggcccagggagatgccagtaaagtcactgcaaaaggtccagggttggaagctgtagggaacatcgccaataagcccacctactttgacatctatacggcaggagctggtgtgggtgacattggtgtggaggtggaagatccccaggggaagaacaccgtggagttgctcgtggaagacaaaggaaaccaggtgtatcgatgtgtgtacaaacccatgcagcctggccctcacgtggtcaagatcttctttgctggggacactattcctaagagtcccttcgttgtgcaggttggggaagcctgcaatccaaatgcctgccgggccagtggccgaggcctacaacccaaaggcgtccgtatccgggagaccacagatttcaaggttgacaccaaagctgcaggaagtggggagctcggtgtaaccatgaagggtcctaagggtctggaggagctggtgaagcagaaagactttctggatggggtctacgcattcgagtattaccccagcaccccggggagatacagcattgccatcacatgggggggacaccacattccaaagagcccctttgaagttcaagttggccctgaagcgggtatgcagaaagtccgtgcttggggccctgggctccatggtgggattgtcgggcggtcagcggacttcgtggtagaatccattggctctgaagtggggtctctggggtttgccattgaaggcccctctcaggcaaagattgagtacaacgaccagaatgatggatcgtgtgatgtcaaatactggcccaaggagcctggcgaatatgctgttcacatcatgtgtgacgacgaagacatcaaggacagcccgtacatggccttcatccacccagccacgggaggctacaaccctgatctggttcgagcatacgggccaggtttggagaaatctggatgcattgtcaacaacctggccgagttcactgtggatcctaaggatgctggaaaagctcccttaaagatatttgctcaggatggggaaggccaacgcattgacatccagatgaagaaccggatggacggcacatatgcatgctcatacaccccggtgaaggccatcaagcacaccattgctgtggtctggggaggcgtgaacatcccgcacagcccctacagggtcaacatcgggcaaggtagccatcctcagaaggtcaaagtgtttgggccaggtgtggagagaagtggtctgaaggcaaatgaacctacacacttcacggtggactgtactgaggctggggaaggtgatgtcagtgttggcattaagtgtgatgcccgggtgttaagtgaagatgaggaagacgtggattttgacattattcacaatgccaatgatacgttcacagtcaaatatgtgcctcctgctgctgggcgatacactatcaaagttctctttgcatctcaggaaatccccgccagccctttcagagtcaaagttgacccttcccacgatgccagcaaagtgaaggcagaaggcccagggctcagcaaagcaggtgtggaaaatgggaaaccgacccacttcactgtctacaccaagggggctgggaaagccccgctcaacgtgcagttcaacagccctcttcctggcgatgcagtgaaggatttggatatcatcgataattatgactactctcacacggttaaatatacacccacccaacagggcaacatgcaggttctggtgacttacggtggcgatcccatccctaaaagccctttcactgtgggtgttgctgcaccgctggatctgagcaagataaaactcaatgggctggaaaacagggtggaagttgggaaggatcaggagttcaccgttgataccaggggggcaggaggccaggggaagctggacgtgacaatcctcagcccctctcggaaggtcgtgccatgcctagtgacacctgtgacaggccgggagaacagcacggccaagttcatccctcgggaggaggggctgtatgctgtagacgtgacctacgatggacaccctgtgcccgggagcccctacacagtggaggcctcgctgccaccagatcccagcaaggtgaaggcccacggtcccggcctcgaaggtggtctcgtgggcaagcctgccgagttcaccatcgataccaaaggagctggtactggaggtctgggcttaacggtggaaggtccgtgcgaggccaaaatcgagtgctccgacaatggtgatgggacctgctccgtctcttaccttcccacaaaacccggggagtacttcgtcaacatcctctttgaagaagtccacatacctgggtctcccttcaaagctgacattgaaatgccctttgacccctctaaagtcgtggcatcggggccaggtctcgagcacgggaaggtgggtgaagctggcctccttagcgtcgactgctcggaagcgggaccgggggccctgggcctggaagctgtctcggactcgggaacaaaagccgaagtcagtattcagaacaacaaagatggcacctacgcggtgacctacgtgcccctgacggccggcatgtacacgttgaccatgaagtatggtggcgaactcgtgccacacttccccgcccgggtcaaggtggagcccgccgtggacaccagcaggatcaaagtctttggaccaggaatagaagggaaagatgtgttccgggaagctaccaccgactttacagttgactctcggccgctgacccaggttgggggtgaccacatcaaggcccacattgccaacccctcaggggcctccaccgagtgctttgtcacagacaatgcggatgggacctaccaggtggaatacacaccctttgagaaaggtctccatgtagtggaggtgacatatgatgacgtgcctatcccaaacagtcccttcaaggtggctgtcactgaaggctgccagccatctagggtgcaagcccaaggacctggattgaaagaggcctttaccaacaagcccaatgtcttcaccgtggttaccagaggcgcaggaattggtgggcttggcataactgttgagggaccatcagagtcgaagataaattgcagagacaacaaggatggcagctgcagtgctgagtacattcctttcgcgccgggggattacgatgttaatatcacatatggaggagcccacatccccggcagccccttcagggttcctgtgaaggatgttgtggaccccagcaaggtcaagattgccggccccgggctgggctcaggcgtccgagcccgtgtcctgcagtccttcacggtggacagcagcaaggctggcctggctccgctggaagtgagggttctgggcccacgaggcttggtggagccagtgaacgtggtggacaatggagatggcacacacacagtaacctacaccccatctcaggagggaccttacatggtctcagttaaatatgctgatgaagagattcctcgcagtcccttcaaggtcaaggtccttcccacatatgatgccagcaaagtgactgccagtggccccggccttagttcctatggtgtgcctgccagtctacctgtggactttgcaattgatgcccgagatgccggggaaggcctgcttgctgttcaaataacggaccaagaaggaaaacccaaaagagccattgtccatgacaataaagatggcacgtatgctgtcacctacatccccgacaagactgggcgctatatgattggagtcacctacgggggtgacgacatcccactttctccttatcgcatccgagccacacagacgggtgatgccagcaagtgcctggccacgggtcctggaatcgcctccactgtgaaaactggcgaagaagtaggctttgtggttgatgccaagactgccgggaagggtaaagtgacctgcacggttctgaccccagatggcactgaggccgaggccgatgtcattgagaatgaagatggaacctatgacatcttctacacagctgccaagccgggcacatatgtgatctatgtgcgcttcggtggtgttgatattcctaacagccccttcactgtcatggccacagatggggaagtcacagccgtggaggaggcaccggtaaatgcatgtccccctggattcaggccctgggtgaccgaagaggcctatgtcccagtgagtgacatgaacggcctgggatttaagccttttgacctggtcattccgtttgctgtcaggaaaggagaaatcactggagaggtccacatgccttctgggaagacagccacacctgagattgtggacaacaaggacggcacggtcactgttagatatgcccccactgaggtcgggctccatgagatgcacatcaaatacatgggcagccacatccctgagagcccactccagttctacgtgaactaccccaacagtggaagtgtttctgcatacggtccaggcctcgtgtatggagtggccaacaaaactgccaccttcaccatcgtcacagaggatgcaggagaaggtggtctggacttggctattgagggcccctcaaaagcagaaatcagctgcattgacaataaagatgggacatgcacagtgacctacctgccgactctgccaggcgactacagcattctggtcaagtacaatgacaagcacatccctggcagccccttcacagccaagatcacagatgacagcaggcggtgctcccaggtgaagttgggctcagccgctgacttcctgctcgacatcagtgagactgacctcagcagcctgacggccagcattaaggccccatctggccgagacgagccctgtctcctgaagaggctgcccaacaaccacattggcatctccttcatcccccgggaagtgggcgaacatctggtcagcatcaagaaaaatggcaaccatgtggccaacagccccgtgtctatcatggtggtccagtcggagattggtgacgcccgccgagccagagtctatggccgcggcctgtcagaaggccggactttcgagatgtctgacttcatcgtggacacaagggatgcaggttatggtggcatatccttggcggtggaaggccccagcaaagtggacatccagacggaggacctggaagatggcacctgcaaagtctcctacttccctaccgtgcctggggtttatatcgtctccaccaaattcgctgacgagcacgtgcctgggagcccatttaccgtgaagatcagtggggagggaagagtcaaagagagcatcacccgcaccagtcgggccccgtccgtggccactgtcgggagcatttgtgacctgaacctgaaaatcccagaaatcaacagcagtgatatgtcggcccacgtcaccagcccctctggccgtgtgactgaggcagagattgtgcccatggggaagaactcacactgcgtccggtttgtgccccaggagatgggcgtgcacacggtcagcgtcaagtaccgtgggcagcacgtcaccggcagccccttccagttcaccgtggggccacttggtgaaggaggcgcccacaaggtgcgggcaggaggccctggcctggagagaggagaagcgggagtcccagctgagttcagcatttggacccgggaagcaggcgctggaggcctctccatcgctgttgagggccccagtaaggccgagattacattcgatgaccataaaaatgggtcgtgcggtgtatcttatattgcccaagagcctggtaactacgaggtgtccatcaagttcaatgatgagcacatcccggaaagcccctacctggtgccggtcatcgcaccctccgacgacgcccgccgcctcactgttatgagccttcaggaatcgggattaaaagttaaccagccagcatcctttgctataaggttgaatggcgcaaaaggcaagattgatgcaaaggtgcacagcccctctggagccgtggaggagtgccacgtgtctgagctggagccagataagtatgctgttcgcttcatccctcatgagaatggtgtccacaccatcgatgtcaagttcaatgggagccacgtggttggaagccccttcaaagtgcgcgttggggagcctggacaagcggggaaccctgccctggtgtccgcctatggcacgggactcgaagggggcaccacaggtatccagtcggaattctttattaacaccacccgagcaggtccagggacattatccgtcaccatcgaaggcccatccaaggttaaaatggattgccaggaaacacctgaagggtacaaagtcatttacaccccccatggctcgtggtaactacctgatcagtgtcaaatacggtgggcccaaaccacatcgtgggcaagtccccttcaaggccaaggtgacaggccagcgtctagttagccctggctcagcccaaacgagacctcatccatcctggtggagtcagtgaccaaggtcgtctacaagaagacttgggtatagcgccaattccccaaaggaatctttgggacgccaaacaaggtgacctcctaagggggccagggctctcaaaaggcctttgtgggccaagaagagttccattcctggtggacttgcagcaaagctggctccaacatgctgctgattcggggtccatgggcccacccactcccctgcgaggaggtctccatgaagcatgtaggcaaccaagcaatacaaccgtcacatacgtcgtcaaggagaggggcgattatgtgctggctgtgaagtggggggaggaacacatccctggcagcccttttcatgtcacagtgccttaaaacagttttctcaaatcctggagagagttcttgtggttgcctttgttgcttgtttgtaattcattttatacaaagccctccagcctgtttgtggggctgaaaccccatccctaaaatattgctgttgtaaaatgccttcagaaataagtcctagactggactcttgagggacatattggagaatcttaagaaatgcaagcttgttcagggggctgagaagatcctgagtacactaggtgcaaaccagaactcttggtggaacagaccagccactgcagcagacagaccaggaacacaatgagactgacatttcaaaaaaacaaaactggctagcctgagctgctggttcactcttcagcatttatgaaacaaggctaggggaagatgggcagagaaaaaggggacacctagtttggttgtcatttggcaaaggagatgacttaaaaatccgcttaatctcttccagtgtccgtgttaatgtatttggctattagatcactagcactgctttaccgctcctcatcgccaacacccccatgctctgtggccttcttacacttctcagagggcagagtggcagccgggcaccctacagaaactcagagggcagagtggcagccaggcccacatgtctctcaagtacctgtcccctcgctctggtgattatttcttgcagaatcaccacacgagaccatcccggcagtcatggttttgctttagttttccaagtccgtttcagtcccttccttggtctgaagaaattctgcagtggcgagcagtttcccacttgccaaagatcccttttaaccaacactagcccttgtttttaacacacgctccagcccttcatcagcctgggcagtcttaccaaaatgtttaaagtgatctcagaggggcccatggattaacgccctcatcccaaggtccgtcccatgacataacactccacacccgccccagccaacttcatgggtcactttttctggaaaataatgatctgtacagacaggacagaatgaaactcctgcggctctttggcctgaaagttgggaatggttgggggagagaagggcagcagcttattggtggtcttttcaccattggcagaaacagtgagagctgtgtggtgcagaaatccagaaatgaggtgtagggaattttgcctgccttcctgcagacctgagctggctttggaatgaggttaaagtgtcagggacgttgcctgagcccaaatgtgtagtgtggtctgggcaggcagacctttaggttttgctgcttagtcctgaggaagtggccactcttgtggcaggtgtagtatctggggcgagtgttgggggtaaaagcccaccctacagaaagtggaacagcccggagcctgatgtgaaaggaccacgggtgttgtaagctgggacacggaagccaaactggaatcaaacgccgactgtaaattgtatcttataacttattaaataaaacatttgctccgtaaaaaaaaaaaaa

SEQ ID NO: 11739 - DNA, 639 bp, Homo sapiens
  SIMILAR (1)..(126): 881254mologous to Homo sapiens HSPC016,accession number AF077202,Smith-Waterman Score=183.
atggacgaggaagataaggcttttaagcagaaacaaaaagaggagcagaaggaactcgaggagctgaaagtgaaggccagaaagaaggggcccctggacacaggtggaattaagaaatctggcaaaaacgtgtgggatggggtgaggtatgcaggttatttgcataaaacaagcagccaagtgcattcactcatttatttgttcgtggagtacctagcaaatgcaaggtgctctgttaaacactatggcagacacaaagatgaaacggacaaggattttgtcttcaaaggttctctagggctgctgagcgcccagcggacaccggcagcgcgcggtcgacgcgggcctgagctccctccaggtaggcggcgagctcgcgagcggcggctcgtcgctgccacgcgggaactggccccacgaccgccggcgcaggcacttcccgggcggtccagaccgctcgccccggggagcgaggaacggtcggcggtccaagtcctgcagacccccctggtttctcgtcactccccgaggcctccttccaggaactcagagcacgagcccgtgcgtgcccccaaaataacgggtattcgggactgcccagcagggctgttgggtggagagtgcttggaagactcataa

SEQ ID NO: 11740 - DNA, 544 bp, Homo sapiens
  SIMILAR (133)..(222): 861254mologous to Homo sapiens HSPC016,accession number AF077202,Smith-Waterman Score=131.
accagaagaagccactgaaacagcccaagaagcaggcctaggagatggacgaggtgagggcgggcgcggaggcactggcgggtgcgggggcgctgggagacaggcctgagttgaacacgctctgcctctccccaggaagataaggctttcaagcagaaacaaaaagaggagcagaagaaactcgaggagctaaaagcgaaggccagcggggaaggggcccttggccacacggtggaattaagaaatctggcaaaaagtaagctgttccttgtgcctgaggagatggtgaccctttatttcatctgtatttaaacctctctattccctgccataacatcttttgccacgtatagctggaattaagtgttgtcttggagctgttgtacatttaagaataaacttttgtaaaaaaagaaaaatcttacagtggctcatcatctctttatgttgttttcactaagtcggtcctaccataactgtgaatttaaagtaaaaccagctcagaatcttgccagagtctgttctttggtccttgttctaccct

SEQ ID NO: 11741 - DNA, 624 bp, Homo sapiens
  SIMILAR (343)..(621): 901254mologous to Homo sapiens CD2 cytoplasmic domain binding protein,accession number AF104222,Smith-Waterman Score=457.
atgctttcttctaaactaggaaacaccggagcccaggcccagggtgagagagtgcatgccttccacttaaagaaattaactgtaaaacagcctcaggtagatccttcagggggtatccagaagaagactaggaaaactggatgcattcttcagctcctgcttttgaagctgccatacattaaaaaagtgtactttccagaaaaagacctcttaggtagtgaaatcaaagctaaactgcagaagtgcccggaccggctctccgaattggccgaccagatggtggcccagggaaaccttggcatgtaccaggaaacgagggaacagttggccatgcggctgaaggacatgttcgctgaggaagtggcagagggggaactggagaccccaacccctacccagagaggagaagcagagttgccaggagatggtctggtggatgtgatgtgggaatataagtgggagaacccgggggatgccgagctgcatgggcccttcaccagcgaccagatgcagacctgggtgagcgaaggctactttcctgatggtgtttactgccggaagctggacccccttcgtggtcagttctacaactccaaacgcattgactttgacctctacacctga

SEQ ID NO: 11742 - DNA, 1195 bp, Homo sapiens
  SIMILAR (1)..(1152): 951254mologous to Homo sapiens Human secreted protein clone yj28_1 protein sequence SEQ ID NO:78,accession number Y73428,Smith- Waterman Score=1918.
atgccaaagaggaaagtgaccttccaaggcgtgggagatgaggaggatgaggatgaaatcattgtccccaagaagaagctggtggaccctgtggctgggtcagggggtcctgggagccgctttaaaggcaaacactctttggatagcgatgaggaggaggatgatgatgatggggggtccagcaaatatgacatcttggcctcagaggatgtagaaggtcaggaggcagccacactccccagcgaggggggtgttcggatcacaccctttaacctgcaggaggagatggaggaaggccactttgatgccgatggcaactacttcctgaaccgggatgctcagatccgagacagctggctggacaacattgactgggtgaagatccgggagcggccacctggccagcgccaggcctcagactcggaggaggaggacagcttgggccagacctcaatgagtgcccaagccctcttggagggacttttggagctcctattgcctagagagacagtggctggggcactgaggcgtctgggggcccgaggaggaggcaaagggagaaaggggcctgggcaacccagttcccctcagcgcctggaccggctctccgggttggccgaccagatggtggcccggggcaaccttggtgtgtaccaggaaacaagggaacggttggctatgcgtctgaagggtttggggtgtcagaccctaggaccccacaatcccacacccccaccctccctggacatgttcgctgaggagttggcggaggaggaactggagaccccaacccctacccagagaggagaagcagagtcgcggggagatggtctggtggatgtgatgtgggaatataagtgggagaacacgggggatgccgagctgtatgggcccttcaccagcgcccagatgcagacctgggtgagtgaaggctacttcccggacggtgtttattgccggaagctggacccccctggtggtcagttctacaactccaaacgcattgactttgacctctacacctgagcctgctgggggcccagtttggtgggcccttctttcctggactttgtggaggaggcaccaagtgtctcaggcagcgaggaaattggaggccatttttcagtcaatttccctttcccaataaaagcctttagttgtgtactggggccttggctgtgctgatggccaaaag

SEQ ID NO: 11743 - DNA, 363 bp, Homo sapiens
  SIMILAR (256)..(185): 501254mologous to Homo sapiens DCC,accession number M63700,Smith-Waterman Score=60.
atggcagaagcaatgaaatctccccacattatggagtcctcacacgctgccagaatcctggcaaatctagaccgagaaactgtgcaagaaaaatatcaggatggcgtatatgtgctgcatccccaatatcgaacaagttacagctatgatttgtcccactcacttcaatataatctcactgtcttgcgaatgcccctggagatgttaaagtcagaaatgacccagaatcgccaagagagctttgacatctttgaagatgaaggattaattacacaaggtggaagcggagcatttgagaggagtggtgccaagggcacagctggcgaggttagccttgaagagcagcagggctgccttctgtga

SEQ ID NO: 11744 - DNA, 1326 bp, Homo sapiens
  SIMILAR (502)..(1305): 361254mologous to Drosophila melanogaster CG10383 gene product,accession number AE003660,Smith-Waterman Score=428.
atgcctcagcagtccccaccccagtcaccaccaccagactggtggcttgatgaagatgaggatgaggctgtcttatttatcacctttaccaagacagggtggtttatggtgtttttggaggaaatggacttccttatgctgaaagtttttggagaagttccttcagcaacagtggaaatgttctgtttagaagctatagtaaaacattctgagatatccacacattgtgataaaatcgaagcaaatggaggcctgcagctacttcagaggctgtaccgacttcacaaggactgccctaaagtacagagaaatataatgcgtgtcattggaaatatggctttgaatgaacatcttcattcttctatagttcgctcaggctgggtttccatcatggcagaagcaatgaaatctccccacattatggagtcctcacacgctgccagaatcctggcaaatctagaccgagaaactgtgcaagaaaaatatcaggatggcgtatatgtgctgcatccccaatatagaacaagtcagcccattaaagcagatgtcctttttattcatggccttatgggagcagcattcaaaacatggcgccagcaggacagtgagcaggctgtaattgaaaaacctatggaggatgaagacagatatacgacgtgctggcccaagacatggttagcaaaagactgtcctgctctccgaattatatctgtggagtatgacaccagcctcagcgactggagagcaaggtgccctatggaaagaaagtccattgcattcagaagcaacgaacttcttaggaagctcagagctgctggtgttggggataggccagtggtttggatatcacatagcatgggaggtcttcttgtcaaaaagatgctgttggaagcctctacgaagccagaaatgagtactgttatcaacaataccagaggaataattttttatagtgtccctcatcatggatcacgtttggctgaatactctgttaatattcgctatcttctcttcccctcgttggaagtcaaagaactcagcaaggattctcctgcacttaaaacactacaagatgactttctggagtttgctaaagacaaaaacttccaggtgctgaattttgtggaaacactaccaacctacattggcagcatgattaagctccatgtggtacctgtggaatcagcagatttaggcattggagatctaattcctgtggatgttaaccatttgaacatttgtaagccaaagaaaaaggatgcttttttgtaccagcgtactttacaattcattcgtgaagctttagccaaagaccttgaaaactaa

SEQ ID NO: 11745 - DNA, 2325 bp, Homo sapiens; identical to SEQ ID NO: 5581
  SIMILAR (7)..(1416): 1001254mologous to Cloning vector pBACe3.6 levansucrase,accession number U80929,Smith-Waterman Score=2472.

SEQ ID NO: 11746 - DNA, 339 bp, Homo sapiens
  SIMILAR (31)..(156): 971254mologous to Rattus norvegicus RYB-a,accession number D28557,Smith-Waterman Score=224.
atggagaaatctgacaaatactacctcatccagggtgcagaagctgccaatgtgactggcccggatggagttcctgtggaagggagtcgttacgctgcagatcggcgccgttacagacgtggctactatggaaggcgccgtggccctccccggaataaaatagcgctaagcaaatccagtattgcctccctactatgggtcaagagtgatgggtgctttccaggtccacaaatgattggactcctcgtaactgtaggacagatggctcaacatcgtaactataagactcgttcctcctttcctgcttgcattcagttctgttgcaaccagagaccttga

SEQ ID NO: 11747 - DNA, 826 bp, Homo sapiens
  SIMILAR (577)..(2748): 761254mologous to Homo sapiens MYB-binding protein 1A,accession number AF147709,Smith-Waterman Score=2674.
gagcggccgccgcctctttagccaccgccgccggcagcgaagacgcggagaaaaaaagttctcgccaccaaagtccttggcactgtcaaatggttcaacgtcagaaatggatatggatttataaatcgaaatgacaccaaagaagatgtatttgtacatcagactgccatcaagaagaataacccacggaaaatatctgcgcagtgtagggagatggagaaactgtagagtttgatgtgggttgaaggagagaagggtgcagaagctgccaatgtgactggcccggatggagttcctgtggaaagggaagtcgttacgctgccagatcggcgccggttacagacgttgctactagtgatagggcgccgtggccctcccccggaatactggtgagattgggagagatgaaggatgggagtcccagagggaggccacaactttcaggggaccggttccatcgaaaatccaacttaccgcccaaggtaccgtagcaaggggacctcctccgccccacgaccttgcccccagcagtttgggagaggcttgaagattaagaaaatcagcaagccaccaagtggtccaaaacacccgtctgttcgccttgggataccggcgtccctacaattacccggcgtcgcccgcgtcctcctaacgctccttcacaagatggcaaagaggccaagggcaggtgaagcaccaacttgagaaccctgctccacccacccagcagagcaatgctgagtaacaccaggctcctcatgcaccttcaccatctgcatgtgaccttaagtattaatgaccattcaaaaaaaaaaaaaaaaaacgg

SEQ ID NO: 11748 - DNA, 1594 bp, Homo sapiens
  SIMILAR (454)..(789): 581254mologous to Homo sapiens OSBP-related protein 1; ORP1,accession number AF323726,Smith-Waterman Score=282.
gaattcgggcgggggagcccaaggagcgagcgcgccagacgaagctcgagccgcctccgccagcgcgaccccacctcggccgccgccgcctgcgccgcgagatccgccccggcctccccgagagcgagccccggccgccgcgaccaccagccgcgctaaccgccgaccaaccgccaccgaggcgcctgagcgagagcagaggaggaggaggcatgagtgaggcgggcgaggccaccaccaccaccaccaccaccctcccgcaggctccgacggaggcggccgccgcggctccccaggaccccgcgcccaagagcccggtgggcagcggtgcgccccaggccgcggccccggcgcccgccgcccacgtcgcaggaaaccccggtggggacgcggcccccgcagccacgggcaccgcggccgccgcctctttagccaccgccgccggcagcgatagacgcggagaaaaaagttctcgccaccaaagtccttggcactgtcaaatggttcaacgtcagaaatggatatggatttataaatcgaaatgacaccaaagaagatgtatttgtacatcagactgccatcaagaagaataacccacggaaatatctcgcgcagtgtaggagatggagaaactgtagagtttgatgtggttgaaggagagaagggtgcagaagctggccaatgtgactggcccggatggagttcctgtggaaagggagtcgttacgctgcagatcggcgccgttacagacgttggctactatgggaaggcgcggtggcccttccccgcgaattacgctgggggagggaggaggaggaagggagcggcacaagttgaagggtttttaccccccttgccacttgattagggcagtttttctgggggccccgattcagcttgcgccgcccccagtattcgccctcagtagcggcgagcggcggtgtccgcgtttaccacgtgggacagacctttgaccgtcgctcacgggtcttaccccattcccaacagaatacaggctggtgagattggagagatgaaggatggagtcccagagggagcacaacttcagggaccggttcatcgaaatccaacttaccgcccaaggtaccgtagcaggggacctcctcgcccacgacctgccccagcagttggagaggctgaagataaagaaaatcagcaagccaccagtggtccaaaccagccgtctgttcgccgtggataccggcgtccctacaattaccggcgtcgcccgccgtcctcctaacgctccttcacaagatggcaaagaggccaaggcaggtgaagcaccaactgagaaccctgctccacccacccagcagagcagtgctgagtaacaccaggctcctcaggcaccttcaccatcggcaggtggacctaaagaattagatgaccattcagaaataaagcaaaaagcaggccacataccttaaccaacaccaaagaaacatccaagcaataaagtggaagactaaccaagatttggacattggaatgtttactgttattctttaagaaacaactacaaaaagaaaatgtcaacaaatttttccagcaagctgagaacctggaattc

SEQ ID NO: 11749 - DNA, 484 bp, Homo sapiens
  SIMILAR (81)..(482): 991254mologous to Homo sapiens Sp17,accession number Z48570,Smith-Waterman Score=687.
ggcacgagcggcacgagaccggaaccggcggcaccagctcggagagaaaggaggttccataggcagttcttaccaagaagatgtcgattccattctccaacacccactaccgaattccacaaggatttgggaatcttcttgaagggctgacacgcgagattctgagagagcaaccggacaatataccagcttttgcagcagcctattttgagagccttctagagaaaagagagaaaaccaactttgatccaccagaatgggggagtaaggtagaagaccgcttctataacaatcatgcattcgaggagcaagaaccacctgagaaaagtgatcctaaacaagaagagtctcagatatctgggaaggaggaagagacatcagtcaccatcttagactcttctgaggaagataaggaaaaagaagaggttgctgctgtcaaaatccaagctgccttccggggacacatagcccgagaggaggcaaa

SEQ ID NO: 11750 - DNA, 822 bp, Homo sapiens
  SIMILAR (94)..(282): 871254mologous to Homo sapiens Sp17,accession number Z48570,Smith-Waterman Score=272.
atgggcccctcgggcttccaacccagtgtcctgacatcaagagcaagtcaagagctgcagccacagctgaaccttcaaccagagaatccagagcatcatgcattcgaggagcaagaaccacctgagaaatgtgatcctaaacaagaaaactctccaatatctgggaaggagaaagagacaccagtcaccatcttagactcttctgaggaagataaggaaaaagaagaggttgctgctgtcaaaatccaggctgccttctggggacacacagccagagaggaggatgagaataatggtcccaacttcccagggttatgtaactggggagaacgggacctggaaggtggtaagcgctctaaacctcttaggtattccggaaatgaagacagtcatttcaggcctgtgttaaatctgcctccgcagtcttccaagggccacttcccacccagaggtgctgagcaggccatgctgtgggtgacagtcgcggaagatggcgaatacgtgcacgaccctgaagaggggcggagcttgtgcgccttaagaagagggaggcactgcatctctctggaaggaagctctcaaggatacagggatgtacaagaaaaggtctttgccttctctgggtctctgccagaggcaaaccaagcagattggtccagggatgaatgcctgatgggcacctacctgatccaagctgggccaatcacaaatggcttcaggaataaggtgctgagacccgagaaagaagtcagtctggctctgggtgtgaaatcaaggatgtatgagagtctgagagcagccatggtaggccgtatagactga

SEQ ID NO: 11751 - DNA, 503 bp, Homo sapiens
  SIMILAR (6)..(590): 281254mologous to Caenorhabditis elegans strong similarity to a part of the triple-helical region of collagen alpha chain,accession number U50312,Smith-Waterman Score=104.
catcatctcatcaaagagagttaaaagtagggatgttctctgcatggcctcttctgatatgattaattgattgtaaattaagtaatcaaggcatactttgttgatttgtcatatctgggtaaaaggtttatggtttatttaataaatgaaactgcaaaatcagttttctacatttctgttatatttttgttaaagcacttaaaagaatttctgctctgtccaggggcaagattcttgccaagagaattaatgtgcgtattgagcacattaagcactctaagagccgagatagcttcctgaaacgtgtgaaggaaaatgatcagaaaaagaaagaagccaaagagaaaggtacctgggttcaactaaagcgccagcctgctccacccagagaagcacactttgtgagaaccaatgggaaggagcctgagctgctggaacctattccctatgaattcatggcataataggtgttaaaaaaaaaaataaaggacctctgggctaca

SEQ ID NO: 11752 - DNA, 703 bp, Homo sapiens
  SIMILAR (221)..(382): 371254mologous to Homo sapiens Sequence of human microtubule- associated protein tau,accession number R59837,Smith-Waterman Score =65.
atccttaattaaattaatcccccccccccgccctttcggccggaaccgccatcttccagtaattcgccaaattgccgaaccccaaagggaaaggaggagaggcaacccgatatatgttctctaggcccttttaggaaaaccatggagttgttcctttgggccacaataattagcgattctaataagaagggtgatattgtagacatccaaggggaatggggtaccttgttccaaaaagggaattgcccccacaaagttgttacccatggccaaaacctggaaggagtcttaccaatggttaccccagccatgcttgttggccatttgttgtaaaccaaccagttttagggcaaagttttttcccaagagaattaatgtgcgtattgagcccattaagccactctaagagccggagatagcttcctgaaaccgtgtgaaggaaaatgatcagaaaaagaaagaagccaaagagaaaggtacctgggttcaactaaagcgccagcctgcttccacccagagaagcacactttgtgagaaccaatgggaaggagcctgagctgctggaacctattccctatgaattcatggcataataggtgcccaaaaaaaaaaataaaggacctctgggctacaaaaatgtttctcttcattgagtagaagtgtggtgtcctctcccccaaagaaatatttaaagcaaaaaaaa

SEQ ID NO: 11753 - DNA, 1378 bp, Homo sapiens
  SIMILAR (520)..(912): 361254mologous to Homo sapiens synapsin Ib,accession number M58378,Smith-Waterman Score=118.
atatgctcctccacctcttttaccagtcggtagtcctgagagcagggttttccaaactggattttgtaagccacctaccggaggcatggcacagggagggcctcgcctcactgtcacagcagcatggcacagcaagatcaacttcatgctcggtgccaaagctgatggcaagaccattctaaaaggcctccagtccattttccaggagcaggggatggcagagtctgcacacctggcagtagggatgttgattcggcagagtgatttggcatatacctgggccatcacgggcagcagcaaagcagatttcactggcaaagaggatgggaaatattttacacaggcaaactgtgtcaatctgacagaagccctgccactctatgaagaacagcttgggtgcctgtattgccttgtggaattctcaaaggagatcgtctatgtcccttcaaacttcgaattgagcaacgatttcggggacggcacacgcctgtgtgaccgcttcccactccacttgggttccgtgagcgcgcggagccggaggagtcagggacgtgaggatgccctacttcccgcagcatccggatggcagggtctgcgtcggaaggcccgggagggcgacgccctccactgctgccgcgggcaccagggggaggaggcaggcggaggagaggaggaggaccgcagcgtgcaagccgggagccactttcccgcccctcctctcgccgctgacacgctcagaggagtcaccactccgcgcgctgcaggcgagagtggcagacggaggcagcccggggaagcgagccggagcggcgcccgcactgaggcggctgcagtgctgacaccactcagggcaagggtctccgacggctggagcgagagagcaagagagggctggagagcaggggagcccgcggggctgaggctctttgtcagcgcctgcacttcctacgttacaacgccttcattcagcaaaaaccttttgggcgcctgctgtgcgccaggccaggcgaagcagacccgaggctgtgaagctcagaggggagagggaccaatcgcagtaaataagctaccgagcaacacaagcaaccacagcgacagccacgacacgcacgtcgacacatcacgcaacacaccacgagggcagttgtggactgtcccttcttccagagggagattaaagctaatactagacttcaggacaggtgaggagagtgtggaacagaaatctgagaaaggactggaggagaaagattccagatctccagatccagattccattctctttcttcaaggaaaccacagagctcaggccctggacgtgagaggagatgtgagccttccacaagggctcctcccaccaggcgggagtcttccttga

SEQ ID NO: 11754 - DNA, 429 bp, Homo sapiens
  SIMILAR (587)..(399): 571254mologous to Homo sapiens Human secreted protein, SEQ ID NO: 7083,accession number G03002,Smith-Waterman Score=176.
tcgggtgagtaattcgtccaaagagaaccgtactctttatttggttgaagagaacataatattaagtttctttacctatgacttctctgatgtttttctggagggctctcttatagactatttcaacaaatatgacattttcccttcctttggctgcggttgtgagagcctggatgaaaccaactggctctggaatgttcctgtatcaatatttgccagtagtcaaatcttcacaagctgtttttcctgttgttattgaaatcagctccatttctggctccatcctccccaaattcccaatgctctctttaatgtctttgcacactggatccatcatataattgtgattagcagctggaactgacagaatatatgaaaatatcctgcttttctcaaactgctgagccacctttcatgacactaggctga

SEQ ID NO: 11755 - DNA, 331 bp, Homo sapiens
  SIMILAR (1)..(168): 1001254mologous to Homo sapiens 39 kDa encoded by N33,accession number U42349,Smith-Waterman Score=293.
tcgcctgattgggcagatcgtgtcctccatcacagcctccctgcgatttgatggggccctgaatgtggacttgacggaattccagaccaacctagtgccgtacccccgcatccacttccccctgggccacctatgccccagtcatctcagctgagaaggcctaccacgagcagctctagagaaggattatgaagaggtgggcgtggattccgtggaagctgaggctgaagaaggcgaagaatactgaggggagggtgtggtgggttctcccctgccacccccgggatggctgcttccaagttgtttgcaattaaaggttctgtataaaacc

SEQ ID NO: 11756 - DNA, 630 bp, Homo sapiens
  SIMILAR (45)..(200): 551254mologous to Nicotiana tabacum Pistil extensin like protein, partial CDS only,accession number Z14020,Smith-Waterman Score=149.
atgggccgcgcgtggggccggcggcgggcgcagcgcgtgtggagccgcccggtcgccccggggagaggccgagggcgcggccccgccgccggcccccgccccggtcccgcccccgcccctggcctggagcgcggccccggcgtcccggatgcccgaggcctgctggtcccggccagagccgtccccgtcccgcgccgccgctcaagctcagagaaggggcgtggggccaccccgggagcggcgcagccttttccctacgcgttggagccctgggctctgctcggctccgctagtggtgccggatccaggcgacagcgcgacagacaccattgccacgtgggtgcagcctcaggacgtcctgaaagccggagagaatcaggtcacacgaacgtggccgtaaaggaggagaagacccaccaggcagaagagacagggagaggacactggggtgtcttggggctgccagcacaaagttccatgagctggagggctcagaacaacagaaacgtcttctctcacagtttggagagaaataacaaggtctacgggaattatgaggcaggcacggtggaggaaaaccaattgataaatatcatcatctcacaagggtctttgcagatgatcaagtga

SEQ ID NO: 11757 - DNA, 467 bp, Homo sapiens
  SIMILAR (1)..(369): 1001254mologous to Homo sapiens Human RNA-associated protein- 10 (RNAAP-10),accession number Y70229,Smith-Waterman Score=609.
tttttttttgccactatggacactaaaaccagtgttcggtccctaggagtgaacatttcaatactgcgaaaaaagaaaaatacgacagcgacacaacaaccaaagtgagactaagcagcacctttgaagacactcaatttgaaggcactgcgtaaggatgagctgggggcagggaggccaccatgtggagctgggatgtctgattgcgggcacctcacgttgcctgctcccgctgtaatcagggtccatgcatggaaaactgtctaaacaccgaccaaacacacacacaaacacagaggcaaggttaagaggaaaaatcgtcttcctcaaaacaatatccagccttatggaatattataagaggtctcaatgctcagttaaaagtaaagcacgatcagtgttttaactgaagttaagggcacaagctcaattacttcaggaaactaagaaacctgtgttcaggctgc

SEQ ID NO: 11758 - DNA, 1380 bp, Homo sapiens
  SIMILAR (1)..(87): 931254mologous to Homo sapiens Human secreted protein sequence encoded by gene 2 SEQ ID NO:250,accession number Y91577,Smith-Waterman Score=150.
  misc_feature (1)...(1380): n = a,t,c or g
atgcagagtcagagacaggaggatgtgaaactcttcagaatatctggaaagcgatctccccctggaggtggcagcaaggttccacagaaaaaagtaaaatttgctgttgctgaagatgatgatgatgatgataaggaaactgaagacaaatctccagtgaagaaatctatacgagatactctacccaatcatgcacaacaatcaaaccagaatggaaaagactccaagtcaccaatgtcaagaaaagcagggtttggtggggggaacctgcagaagcatggccgatcctctgccttactctctacggcttttgtgtctgcgactggaaggtttcgtttcaaaaagaacaccaacaccacagtgaccgtgggcaaccccctttcctcgccccacctcctcaggagtgaacatttcaatactgcgaaaaaagaaaaatacgacagcgacacaacaaccaaagtgagactaagcagcacctttgaagacactcaatttgaaggcactgctgacttcacatcctttgacatcagcacagctttgaaagggggatgggagagcgagcagaaagcagaaaaaccagctttgaactatgcatgcaaggcctctttcaagcctcaaattctacaaggacggcttgagccagggcagttcaggaaacacttgaggagcagaggcagcagggcgctggaccagacagaggacgggaatgtccaagaagtggtctctgtgtgcggtaatgagccgagattacagctggcagctggaaactaaaccccatgggtgccacccagagagagctgagactgaccatggagtaacggccaaggtcatgtgtgtagccccgggccatggagagggggtaccctggaggggctgggctggctggctgggctcaggctgtctgacaggcaacgggctccccagtgttctgaagagggagtggccctggtggtaactctctgtggcttagaggggctgaagctagaacaccgctgtgactccgggcccgctggttccctgagggcaagggccaccttgggtcatcgctctgaacaccttccccttgctctgagaagcacagatggccagtgtgaactgcctcagcaatccagggactgtgtcctctcattaagatatcatggcaaatcacgagaagacacaaaaatcaaaacatgcaagagaagaaaagactaatgaaagcagagattccctgcgcggctctttctaagctgactagaagagcagcaggcactccgataacttccgcacagtccatttttattattcttcaactaacaggcaagaagcccaaagttcctggaaatatatgcataaattcatttgtagcagtaaacctctacttttatggntaagcttcat

SEQ ID NO: 11759 - DNA, 617 bp, Homo sapiens
  SIMILAR (248)..(616): 851254mologous to Homo sapiens zinc finger protein Cezanne,accession number AJ293573,Smith-Waterman Score=527.
  misc_feature (1)...(617): n = a,t,c or g
tttcgtaggaatcaggcaggcatccgtacattgtgactcttattttctgtaccatcctaacctgaagggatacagccaggaggcataagattccttgtagaagtttttgtgtttacacaccttactatgctgagcctgcttgttcctgtctcgtagtgcaccaacctgtggggaagtctcaagactatggccggattctcctcaagagcttatagtggaggcctgaattttgatctatgttctacctacatccagctggctgaaagtacttgaggatcacatgaccctggacatggatgctgttctgtcagattttgtccgttccacaggagcagagccagggctagcgcgagatctcctataaggaaagaattgggatgtgaatgccgccctcagtgattttgaacagctacgtcaagtccatgctggaaacctacccccatcctttattgaggggagtggtggctccaggacccctgaaaaagggttttctgacagagagcctactcgccctccccgacccatccttcagcggcaggatgacatcgttcaagataacgcctgtctagggcatcntccacgccagcttcagcattgtttccttgcccggtcccatg

SEQ ID NO: 11760 - DNA, 843 bp, Homo sapiens
  SIMILAR (364)..(792): 981254mologous to Homo sapiens zinc finger protein Cezanne,accession number AJ293573,Smith-Waterman Score=725.
atgtcaggacgcggaaagcagggaggcaaggcccgcgctaaggccaagtcgcgctcgtcccgcgctggtctccagttcccggtggggcgagtgcaccgcttgctgcgcaaaggcaactacgcggagcgggtcggggcaggcgccccggtgtacctggcggcggtcctcgagtacctgaccgcggaaattctggagctggcgggcaacgcggctcgggacaacaagaagacgcgcatcatccctcgccatctgcaactagccgtgaggaatgacgaagagctcaacaagttactcgggggtgtcaccattgcccagggcggcgtcttgcccaatatccaggctgtcctgttgcccaagaaaacggagagaaagaattgggatgtgaatgccgccctcagtgattttgaacagctacgtcaagtccatgctggaaacctacccccatcctttagtgaggggagtggtggctccaggacccctgaaaaagggttttctgacagagagcctactcgccctccccgacccatcctccagcggcaggatgacatcgttcaagaaaaacgcctgtctaggggcatctcccacgccagctccagcattgtttccctggcccggtcccatgtctcctccaatggtgggggtggggggagcaatgagcaccccctggaaatgcccatctgtgccttccagcttccagatctcactgtatacaatgaagacttccgcagcttcatagagagagacctcattgagcagtccatgctggttgccttggaacaggcaggcagccttgtggaggggctggacttgatcgctagcttccagtttaagtgtgttatctga

SEQ ID NO: 11761 - DNA, 416 bp, Homo sapiens
  SIMILAR (1381)..(1920): 631254mologous to Ornithorhynchus anatinus olfactory receptor pla24,accession number AF262724,Smith-Waterman Score=601.
gacatcgcgagtacctatgaatggatttcccgaactttatggttccaatggtcctcagctgtttacaatagagcaatggggcagtcctgagaaactgcccagagctcacacatgctttaatcgccttgacttacctccatatgaaacctttgaagatttacgagagaaacttctcatggccgtggaaaatgctcaaggatttgaaggggtggattaagcaccctgtgcctcgggggtggttgttcttcaagcaagttctgcttgcacttttgcatttgcctttcccaccacaaattatcaactggtagatgtgtacactaattacatttcaggaggacttaatgctatttatgttgtgcctctgcaggcaaagcccttaataaatattttacatcctttaaaaaaaaaaaaaaaaa

SEQ ID NO: 11762 - DNA, 729 bp, Homo sapiens
  SIMILAR (309)..(545): 781254mologous to Cloning vector pZC320 SopB,accession number U26464,Smith-Waterman Score=305.
atggccctatgcaccaggcgaggcaaattgccacaacaagtagaaacaaggtttgcagtagccctctggacagcagaaacctgcttacactaccagactggccaagtatcctctgctgcatccccatccacccccaccgtggcagccaaatgggggtcttggccacaaggtggccgtaagcatctacttgggcctgtagaacgacgtctcattgaacttgaagtggtttatgttgaaaagttcaagatcgatgatgtctatagaaatcatatacctcaagcctttcctctgataggtgggaaactgaggcagagagcagctgggtttacccagcaaggttttggcacgttgctcatgtgcggcctcggtgatgtggatgtgaatgactggagacagcattctatttacaagaacggctactgcccaaaccaccccgtcattcagtggttctggaaggctgtgctactcatggacgccgaaaagcgtatccggttactgcagtttgtcacagggacatcgcgagtacctatgaatggatttgccgaactttatggttccaatggtcctcagctgtttacaatagagcaatggggcagtcctgagaaactgcccagagctcacacatgctttaatcgccttgacttacctccatatgaaacctttgaagatttacgagagaaacttctcatggccgtggaaaatgctcaaggatttgaaggggtggattaa

SEQ ID NO: 11763 - DNA, 3447 bp, Homo sapiens
  SIMILAR (237)..(2462): 991254mologous to Homo sapiens Human ZGGBP1 protein,accession number W93167,Smith-Waterman Score=3979.
gcccgggtgggtggctgcgcagggccctacctgggcgggagcggctgcagagccctgtccacgcggtgcctccccagcacggcacctcccactccaggctgttggttacctggccgggagctggcagagaccaggatttctcctcgccgccgttgctgttgttaggggaaacagaccatctgcatctagacctgcctctctctccgctccccacttcagacgagctcttcctgcctggaatctgtgatccgtatgtgaaactttcattgtacgtagcggatgagaatagagaacttgctttggtccagacaaaaacaattaaaaagacactgaacccaaaatggaatgaagaattttatttcagggtaaacccatctaatcacagactcctatttgaagtatttgacgaaaatagactgacacgagacgacttcctgggccaggtggacgtgccccttagtcaccttccgacagaagatccaaccatggagcgaccctatacatttaaggactttctcctcagaccaagaagtcataagtctcgagttaagggatttttgcgattgaaaatggcctatatgccaaaaaatggaggtcaagatgaagaaaacagtgaccagagggatgacatggagcatggatgggaagttgttgactcaaatgactcggcttctcagcaccaagaggaacttcctcctcctcctctgcctcccgggtgggaagaaaaagtggacaatttaggccgaacttactatgtcaaccacaacaaccggaccactcagtggcacagaccaagcctgatggacgtgtcctcggagtcggacaataacatcagacagatcaaccaggaggcagcacaccggcgcttccgctcccgcaggcacatcagcgaagacttggagcccgagccctcggagggcggggatgtccccgagccttgggagaccatttcagaggaagtgaatatcgctggagactctctcggtctggctctgcccccaccaccggcctccccaggatctcggaccagccctcaggagctgtcagaggaactaagcagaaggcttcagatcactccagactccaatggggaacagttcagctctttgattcaaagagaaccctcctcaaggttgaggtcatgcagtgtcaccgacgcagttgcagaacagggccatctaccaccgccatcagtggcctatgtacataccacgccgggtctgccttcaggctgggaagaaagaaaagatgctaaggggcgcacatactatgtcaatcataacaatcgaaccacaacttggactcgacctatcatgcagcttgcagaagatggtgcgtccggatcagccacaaacagtaacaaccatctaatcgagcctcagatccgccggcctcgtagcctcagctcgccaacagtaactttatctgccccgctggagggtgccaaggactcacccgtacgtcgggctgtgaaagacaccctttccaacccacagtccccacagccatcaccttacaactcccccaaaccacaacacaaagtcacacagagcttcttgccacccggctgggaaatgaggatagcgccaaacggccggcccttcttcattgatcataacacaaagactacaacctgggaagatccacgtttgaaatttccagtacatatgcggtcaaagacatctttaaaccccaatgaccttggcccccttcctcctggctgggaagaaagaattcacttggatggccgaacgttttatattgatcataatagcaaaattactcagtgggaagacccaagactgcagaacccagctattactggtccggctgtcccttactccagagaatttaagcagaaatatgactacttcaggaagaaattaaagaaacctgctgatatccccaataggtttgaaatgaaacttcacagaaataacatatttgaagagtcctatcggagaattatgtccgtgaaaagaccagatgtcctaaaagctagactgtggattgagtttgaatcagagaaaggtcttgactatgggggtgtggccagagaatggttcttcttactgtccaaagagatgttcaacccctactacggcctctttgagtactctgccacggacaactacacccttcagatcaaccctaattcaggcctctgtaatgaggatcatttgtcctacttcacttttattggaagagttgctggtctggccgtatttcatgggaagctcttagatggtttcttcattagaccattttacaagatgatgttgggaaagcagataaccctgaatgacatggaatctgtggatagtgaatattacaactctttgaaatggatcctggagaatgaccctactgagctggacctcatgttctgcatagacgaagaaaactttggacagacatatcaagtggatttgaagcccaatgggtcagaaataatggtcacaatttgaaaacaaaagtgattatatcgactttagtcatccagtggagatttgtgaacagggtccagaagcagatgaacgccttcttggagggattcacagaactacttcctattgatttgattaaaatttttgatgaaaatgagctggagttgctcatgtgcggcctcggtgatgtggatgtgaatgactgggagacagcattctatttacaagaacggctactgccccaaaccaccccgtcattcagtgggttctgggaagggctgtgctacttcatgggacgcccgaaaagcgtatcccggttacttgcagttttgtcacagggggacatcgcgagtacctatgaatggatttgcccgaactttatggttccaatgggtcctcagctgtttacaatagagccaatgggggcagtcctgaggaaactgcccagagcttcacacatgcttttaatcgccttgacttacctccatatgaaaccctttgaaagatttacgagagaaacttctcatggccgtggaaaatgctcaaggactttgaaggcggtggattaaacgacccttgtgcctcagggggtggttgttcttcaagcaagttctgcttgcacttttgcatttgcctaacagacttttgcagaggcgatggcagagagcagctgcaggcatggtccctggagccgagccttcaccacgcactcgtccaagttcggatgcgggaacctggtcccagcttgagttcctgcctttcccaccacaaattatcaactggttgatgtgtacactaattacatttcaggaggacttaatgctatttatgttgtgcctctgcaggcaaagcccttaataaatatttgtacatcctttctaatgacaatgaatggaattaatcactcaacaggtatagtattacgactcatgtttactttttaaaatgatttagaccgattttcagattttatttcgttatgattaaagatgtctcatgt

SEQ ID NO: 11764 - DNA, 627 bp, Homo sapiens
  SIMILAR (112)..(453): 291254mologous to Caenorhabditis elegans Similarity with 39.2kd yeast protein (Swiss Prot accession number P42836), contains similarity to Pfam domain: PF01529 (DHHC zinc finger domain), Score=130.4, E-v,accession number Z71177,Smith-Waterman Score=106.
atgagcagtttgcactggctcgtgggagggcatttactgagcatctactatattccaggcgtgggtgacacagatacagtgacagtaaaggcctggattctggccccgagaagctcccaatctagagatgcatgtaaacagggcattacagcccagtgtactcagggctcaaagccaggagcccagagggtacaggagtgtagaggaggctgctggtctccctctccagaggctggcatgcagggagggcttcctggaggtggtgatgacatagatacagggtgtgtaggggtggtcaggcaaaggggctgtggaggacagtgcttcaggcagggggaacagcccaagcgaaggtgtggcagcatctgcctccttcactgctgtctctctgtgcccagcacagttcctggcacacacaggtgctcagtcaacggttggggaataagtgaaaatgtctggtttacaggggtgagcgtcacgcgtcaagggcggttcgtgcgtgtgcagggcttgctaagtcgcaggaaatgggaggtcgcagcacgccgctacctgcaagcccgaaagctgaatgcagctctagtgtggcgcgtagtcttactgggtactattttacttaatcgctga

SEQ ID NO: 11765 - DNA, 495 bp, Homo sapiens
  SIMILAR (146)..(355): 381254mologous to Strongylocentrotus purpuratus tektin A1,accession number M97188,Smith-Waterman Score=161.
atgcccagccccacaagtgaggaaactgaggcaggagtggaggatgaaactgaaggtcacagaggagatcattatgatgaaacaccttacgtgtatagcacgcatgttgtctgtgttgagtgccatgaagcgtgctttaggttccttgttaacggaggtacacgaggttgacgacaccatccagaccctgcagcagcgcctgagggatgcagaggacaccctgcagtcgctggtccacatcaaagccacactcgagtatgacctggctgtcaaagccaattccctgtacatcgaccaggaaaaatgcatgagcatgcgcaagagctaccccaacaccctccggctggtcggcttctgctagggaccccaccgggtgtggttttgatacccctaagttaaggctgagccagagcactgtctcagcatttgaaccgaatgctaatatagtcacttattaaaggattatgctgatggaaatgtaccaacaaaaaaaaa

SEQ ID NO: 11766 - DNA, 432 bp, Homo sapiens; identical to SEQ ID NO: 4245
  SIMILAR (148)..(432): 981254mologous to Homo sapiens L7a protein,accession number X52138,Smith-Waterman Score=480.

SEQ ID NO: 11767 - DNA, 687 bp, Homo sapiens
  SIMILAR (1)..(507): 891254mologous to Homo sapiens L7a protein,accession number X52138,Smith-Waterman Score=774.
atgccaaaaggaaagaaggccaagggaaagaaggtggctctggcccctgctgtcatgaagaagcaggaggctaagaaagtggtgaatcccctgtttgagaaaaggcctaagaattttggcatcggacaggacatccagcccaaaagagacctcacccactttgtgaaatggccccgctatatcaggttgcagcggcagagagccatcctctataagcggctgaaagccctggactgccaaacagctactcagctgcttaagctggcccacaagtacagaccagagacaaagcaagagaagaagcagagactgttggcctgggctgagaagaaagctgctggcaaacgggacgtccccaccaagagaccacctgtccttcgagcaggagttaacatcgtcaccaccttggtggagaacaagaaagctcagctggtggtgattgcagacgacgtggatcccatcgagctggttgtcttcttgcctgccttgtgtcgtaaaatgggggtgaactcggaagacaaaggcactttggctaagctgatggaagctatcaggaccaattacaatgacagatacgatgagatccgccgtcactggggcggcaacatcctgggtcctaagtctgtggctcgtatcgccaagctcgaaaaggcaaaggctaaagaacttgccactaaactgggttaa

SEQ ID NO: 11768 - DNA, 1132 bp, Homo sapiens
  SIMILAR (27)..(641): 461254mologous to Homo sapiens L7a protein,accession number X52138,Smith-Waterman Score=289.
  misc_feature (1)...(1132): n = a,t,c or g
attgangtgcagtgacctctgacgagccgaaaggaaagaaggccaaggcaaagaaggtggctccggccccagctgtcgtgaagaaccaggaggctaagaaagtggtggatcccctgtttgagaaaaggcataagaatttgtggcattggacaggacatccagcccaaaagagcctcaccccgcttgtgtgaattgccccggctatatcaggttgcagcggcagagagccatcctctataaaccggctgaaaggtcccttctgcgattaccccggtttcaccagggccctggaccgccaaacagtctaatccagcttgcttaagctgggcccacaagtacagacccagagacaaagcaagagaagaaagcagagactgtttgcccgggcccgagaagaaggcgtgctggcaaagggtgacgtccccaacgaaagagacccacctgtcccttcgagccaggagtttaaccccgtttcaccacccttgggtggagaaacaagaaaagctccagctggtggtgaattggcacacggacgtggtatcccattcgagctggttgtccttcttgccctgcccctgtgtcgtgaaaaatggggggtcccttaactgcaattatcgaagggaaaaggcaagactttgggaccgtctagtcccacaggaaagaccttgcaccacttgtccgcctttcacacaaggtgaacttcggaagacaaaaggcggcttttggctaaagctgggttggaagctaatcaggacccaatttacaattgaccagatactgatgagatcccgccgtcacttggggttggcaatgtcctggggtcctaagtctgtgggctcgtaatcgccaaagctcgaaaaaggcaaaggctaaagaacttgcccactaaactggggttaaatgttacactgttgagttttctgtacataaaaataattgaaataatacaaattttccttcnnnnnnnnnnnnnggggggcccctttaaaaagaaaaaattttaatacccgggggtgggaaaggaaaacttttttttagggggccccaaaataaatttccggggccgggttttaaaaacgggggagggggaaaaacccgggggtacccaaattaaaaccccttggaaaaaaaa

SEQ ID NO: 11769 - DNA, 276 bp, Homo sapiens
  SIMILAR (1)..(129): 691254mologous to Homo sapiens clathrin-like protein,accession number D38293,Smith-Waterman Score=140.
atgagtcttcaggctggagcttccaaaccagatgaaaaccccacaattaacctgcagtttaagatccagcagctggccatttctgccttcagtgccatggaactaatcaagggaggaaaaggtcaccagggagaactggacagaactgaaacacagcaacaccagttctcaaggacaaggcatgaaacggtgtcgcagtactctggcgtctttattccaggagaggcttcttacaagataaggcactgcgagtcgattgttacgccacacctgtaa

SEQ ID NO: 11770 - DNA, 218 bp, Homo sapiens
  SIMILAR (1)..(216): 701254mologous to Homo sapiens mitogen inducible gene mig- 2,accession number Z24725,Smith-Waterman Score=251.
ggggtccaggcagatgcaaagcttctcttcacccctcagcataaaatgctgcgccttcgtctgccgaatttgaagatggtgaggttgcgagtcagcttctcagctgtggtttttaaagctgtcagtgatatctgcaaaatcctgaatattagaagatcagaagagctttccttgttaaagccgtctggtgactattttaagaaaaaaaaaaaaaaaaa

SEQ ID NO: 11771 - DNA, 2965 bp, Homo sapiens
  SIMILAR (1)..(756): 671254mologous to Homo sapiens mitogen inducible gene mig- 2,accession number Z24725,Smith-Waterman Score=899.
  misc_feature (1)...(2965): n = a,t,c or g
tcctcacgctcccttatggaacaaggcatccaagaggatgagcagctgctctacgacttanaatattattctttcttcgacttgaatcctaaatatgatgctgtccgaataaaccaactctatgagcaagccaggtgggccattctcttagaagaaattgattgcacagaggaagaaatgttgatctttgcagctctacagtaccacattagcaaactgtcgttgtctgctgaaacacaggattttgcaggcgagtccgaggttgatgaaatagaagcggcgctttctaatttggaagtaaccctagaaggtggaaaagcggacagccttttggaggacattactgatatccctaaacttgcagataatctcaaattatttaggcccaagaagttattaccaaaagctttcaaacaatattggtttatctttaaagacacatccatagcatactttaaaaataaggaacttgaacaaggagaaccactagaaaaactaaatcttagaggctgcgaagttgtgcccgatgtaaatgtagcaggaagaaaatttggaatcaagttactaatccctgttgccgatggtatgaatgaaatgtatttgagatgtgaccatgagaatcaatacgcccaatggatggctgcctgcatgttggcatcgaagggcaaaaccatggcagacagctcctaccagccagaggtcctcaacatcctttcatttctgaggatgaaaaacaggaactctgcatctcagctggccgcccggatcctggaggcgcaccagaacgtggcccagatgcccctggtcgaagccaagctgcggttcatccaggcgtggcagtcactgcctgagtttggcctcacctactaccttgtcagatttaaaggaagcaaaaaagatgacattctgggagtttcatataacaggttgattaaaattgatgcagccaccgggattccagtgacaacatggagattcacaaatatcaaacagtggaatgtaaactgggaaacccggcaggtggtcatcgagtttgaccaaaacgtctttactgctttcacctgcctgagtgcagattgcaagattgtgcacgagtacattggcggctacattttcttgtccacccgctccaaggaccagaatgaaacactcgatgaggacttgttccacaaattgaccggcgatattagaagatcagaagagctttccttgttaaagccgtctggtgactattttaagaagaagaagaaaaaagacaaaaataataaggaacccataattgaagatattctaaacctggagagttctccaacagcttcaggttcatcagtaagtcctggtttatacagtaaaaccatgacccctatatatgaccccatcaatggaacaccagcatcatccaccatgacttggttcagtgacaagccctttgacggaacaaaactgcagcatcctcgcattcagccaacccccccagtccccagaagcacttgcggatatgtaccagcctcggtctctggttgataaagccaagctcaatgcaggttggctagactcctcacgctcccttatggaacaaggcatccaagaggatgagcagctgctcttacgatttaaatattattctttcttcgacttgaatcctaaagtcctatcgatcaacctctttggcaaccccctcacttgcagttgtgacttgtcttggctcctcacggatgcaaagagaactgtcctaagcagggcagcagacactatgtgcgcgccagctgcgggatccagcggccccttctcagcctccctgtcactctcccagctgcccggagtgtgccagtccgaccaaagcaccactctcggggcttcacacccaccttgcttcaaccgctccacctacgcacagggtaccaccgtcgcgcccagcgcagcccccgccacccggcctgcgggagaccagcagagtgtctccaaggcccctaacgtgggctctcgcacgatagctgcatggccgcacagcgatgcacgggaggggactgccccctccacgaccaactctgtagcaggtcacagcaactccagcgttttccccagggctgccagcaccaccaggacccagcaccgaggagaacatgcccccgagcttgtccttgagcctgatatctcagctgcctccaccccactggccagcaagctcctgggccccttccctacctcgtgggaccgcagcataagctcgcctcagcccggccagaggacacacgccacaccccaagcccccaacccgagtctttccgagggcgagattccagtcttgctgctggacgactacagtgaggaggaggaagggaggaaggaggaggtgggaacgcctcaccaggacgtcccctgtgattaccatccctgcaagcacctgcagaccccgtgcgcggagctgcagaggcggtggcggtgccggtgccccggcctcagcggggaagacaccatcccagacccgcccaggctgcagggggtgacggagaccacggacacgtcggcgctggtccactggtgtgcccccaactcggtagtgcatgggtaccagatccgctactctgcggagggctgggcggggaaccagtcggtggtgggggtcatctacgccacggcccggcagcaccctctgtacgggctgtcgccgggcaccacctaccgcgtgtgcgtgctggcggccaacagggcgggcttgagccagccacggtcttcgggctggaggagcccgtgcgccgccttcaccaccaagcccagcttcgcgctcctgctctctgggctgtgcgccgccagcggcctgttgctcgccagcaccgtggtgctgtccgcatgtctctgcaggcggggccagacgctgggcctgcagcgctgcgacacgcacctggtggcctacaaaaacccggcctttgatgattacccgctggggctccagaccgtcagttag

SEQ ID NO: 11772 - DNA, 474 bp, Homo sapiens
  SIMILAR (430)..(173): 321254mologous to Homo sapiens Vpr binding protein B29-1 amino acid sequence,accession number W68196,Smith-Waterman Score= 77.
  misc_feature (1)...(474): n = a,t,c or g
tgccgacgtccaagtctcttgcggtccagaaatgccaggatggttgtttcaaatgcattgggtatgaattgcaccttgaatctgcccttccctttttcgattaaaccttttcacatagctgctgctgctccttagcagtccatcccctggacggaggcggcctctcaggacctggagcagagctgtagggagctgccgtctcttatggtagatgtggcccatcacaatatacctgcaggtttaaactctggacacggcttattgcagctggaggagtccagggctaacatgtggactcggaagaagaagccgtcgggggtgaggtacaggcggttcatcttgtacagcccgtcccgatccaccagcagggtcaacagccggatgcccgcgcccagcacgtccacatcgtgcacgatcccgttgaattccaccgctctggcctaatgtcatacgatnctcaaannnnnggcccca

SEQ ID NO: 11773 - DNA, 925 bp, Homo sapiens
  SIMILAR (270)..(1): 301254mologous to Arabidopsis thaliana putative protein,accession number AL137189,Smith-Waterman Score=80.
aggtcggacctgcgatgacctgatcacgccaagcttggcacgaggcagcttcggcctcagcccgccgcagagggacgcggagcccggcgctgagccctgcgcgcgcgcctgccggtccgatctggacgaacgcgaggcgttctgcgagagcgaattcggtgagcccggccgccgcgccgccgccccgccgccccgtgagcctttccgagccccggagaatcctgcacgcgagatcccagggcgcccgacccatgcgggccgtttcgctgttgctaaaaaccacctcctgggggactgggagaggaactcggggtaatgctcttctccaaactgtttttcggaagcagcggtgaacgggatcgtgcacgatgtggacgtgctgggcgcgggcatccggcctggtgaccctgctggtggatcgggacgggctgtacaagatgaaccgcctgtacctcactcacccccgacgtcttcttcttccgagtccacatgttagccctgggactcctccagctgcaataagccgtgtccagagtttaaacctgggtattgaaactgacctgaatgacgctgcatatgtactttataccaccgtttgtaaacgtggggtgccacagcccgggcttttagggtcgcccagcctttttttggggagcgatgggggaacaatggacatgaatggggattttaggacgacaggcaggcaggtatattgtgatgggccacatctaccataagagacggcagctccctacagctctgctccaggtcctgagaggccgcctccgtccaggggatggactgctaaggagcagcagcagctatgtgaaaaggtttaatcgaaaaagggaagggcagattcaaggtgcagttcatacccaatgcatttgaaacaaccaatctggcatttctggaccgcaagaga

SEQ ID NO: 11774 - DNA, 661 bp, Homo sapiens
  SIMILAR (212)..(331): 1001254mologous to Homo sapiens Human secreted protein pu334_2 (alternative sequence),accession number Y32151,Smith- Waterman Score=243.
tttcagaggaagacattaccatcagtgtgtggtttattttttcaaattccagtatatttttaaagacccatatttcactaagcagtgtacttgttgaaacccatgtgagtgactttgtttccacatgtgatagagcatcagatactggagtttgccaggggtagaatggttggattcaggaatgtttagctgactcatagcaggaagttatcatttccatttcggatcttgcagattttttattggccatgatcggtgtcagaattggtaccatgggtgctgcattggcatcttgcagagtgaggcagagctcattgatgagtatgtctgttacagaagcagttgcaatgccagcatcactcagtgacagctcatcatgtagggcccagaatactgattttgtgacttctaagcttgtgttccaccccccacacctgctgccaacttgctggcagagcccagaggatgactgctggcaactgctgatgaaggagaggaagttgcttggaggtcctggggcatgtggactcggaagaagaagacgtcgggggtgagtgaggtacaggcggttcatcttgtacagcccgtcccgatccaccagcagggtcaccagccagatgcccgcgcccagcacgtccacgtcatgcactatcccgttcat

SEQ ID NO: 11775 - DNA, 782 bp, Homo sapiens
  SIMILAR (344)..(781): 951254mologous to Homo sapiens Human lysophosphatidic acid acyltransferase,accession number W99716,Smith-Waterman Score=724.
cttctggtggtgggcacaactgtggtggtatactttccaaatgggaggtttaaggagttcatgagtagacatgttcacttaatgtgttaccggatctgcgtgcgagcgctgacagccatcatcacctaccatgacagggaaaacagaccaagaaatggtggcatctgtgtggccaatcatacctcaccgatcgatgtgatcatcttggccagcgatggctattatgccatggtgggtcaagtgcacgggggactcatgggtgtgattcagagagccatggtgaaggcctgcccacacgtctggtttgagcgctcggaagtgaaggatcgccacctggtcgtaaaagagactgactgaacatgtgcaagataaaagcaagctgcctatcctcatcttcccagaaggaacctgcatcaataatacatcggtgatgatgttcaaaaagggaagttttgaaattggagccacagtttaccctgttgctatcaagtatgaccctcaatttggcgatgctttctggaacagcagcaaatacgggatggtgacgtacctgctgcgaatgatgaccagctgggccattgtctgcagcgtgtggtacctgcctcccattgactaggagaggcagattgaagatgctgtccagtttgcgaatagggtgaaatctgccattgccaggcagggaggacttgtggacctgctgtgggatgggggcctgaagagggagaaggtgaaggacacgttcaaggaggagcagcagaagctgtacagcaagatgatcgtgg

SEQ ID NO: 11776 - DNA, 917 bp, Homo sapiens
  SIMILAR (165)..(473): 881254mologous to Homo sapiens Human lysophosphatidic acid acyltransferase,accession number W99716,Smith-Waterman Score=479.
gaatggagaccattatggatgatgaggtgacaaagagattctcagcagaagaactggagacctggaacctgctgagcagaaccaattataacttaaggatagcgctggccttgacagggattagccttctagtggtgggcacgactgtggcgggatacttgcttcatacctcgccaatcgatgtgatcatcttggccagcgatggctattatgccacagtgggtcaaatgcatgggggactcataggtttgattcagagagccatggtgaagacttgcccacacatctggtttgagcgcttggaagtgaaggatcgccacctgctggctaagagactgactgaacaagtgcaagatataagcaagctgcctatcctcatcttcccagaaggaatttgcatcaataatacatcggtgatgatgttcaaaaagggaagttttgaaattggagccacagtttaccctgatgctatcaacatgtggtacctgccttccatgaccagaggggcagatgaagatgccgtccagtttatgaatacgataaaatccgccatcgccaggcagggagaacttgtcgacctgctgtgggatgggggcctgaagagggagaagaatccagggctccctgggctgctctggatcccaggactctggatttcaccaagcacagtgggatccctgtgcaccggagctacctgcccttggcggtatgaacggatgctgctgggtgtcgcgacccaggataaaatgccttgtttcttttacaataagttgttggagaacctaaagcatactaatataattgcaaaagcaattgcagcaaaagcaaaaattaacaaatgggatctaaataaactaaagcgtttcggcacagcaaaagaaactatcatcagagtgaagaggcaacctacagaatga

SEQ ID NO: 11777 - DNA, 473 bp, Homo sapiens
  SIMILAR (265)..(468): 281254mologous to Arabidopsis thaliana,accession number AB022220,Smith-Waterman Score=128.
ttatggtcgtaggaccctccaacggattccctctcccccgacggcggcagcatcgagctggagttctacctggcgcccgagccgttctccatgcccagcctgttgggagctccaccctactctggcctgggcggtgtaggggatccctatgcgcccctcatggtgctgatgtgccgggtgtgcctggaagacaagcccatcaagcccctgccttgctgcaagaaggccgtgtgcgaggagtgcctcaaagtctacctgagcgcccagatccagtgccctacctgccaattcgtctggtgttttaagtgccactctccttggcatgaaggtgttaactgcaaggagtacaaaaaaggagacaaattgttgcgtcactgggccagcgaaattgagcatgggcagaggaatgcccagaagtgtccaaagtgcaagatccacatccagcgaactgaaggatgtgaccatatgacctg

SEQ ID NO: 11778 - DNA, 1105 bp, Homo sapiens
  SIMILAR (365)..(739): 321254mologous to Arabidopsis thaliana putative protein,accession number AL138657,Smith-Waterman Score=181.
atgcaggtacaacttggccaagtagaaatcaaatgccccatcacagagtgttttgaattcttggaagaaacaactgttgtctataacttaacgcatgaagactccatcaagtataagtacttcttggaacttggccgtattgattccagcaccaagccatgtcctcagtgcaagccctttacaaccttcaagaaaaaaggacatattcccaccccttccagatcagaaagcaaatacaaagactttgggctatgcaaatcagggaagaattttccagtaccctttgtgttcaccagtgaagaaatgggtcctcggacaagaaatagacccagacaaatgcttctctgggctttgctctctggatttacaggaagagtctgtaaatgctgaaggtgtttccagacactgtttttattttgtgggttgtttccttactcgacttgatgaattatcaggagaaaatgccattttcttagggcagatccagtgccctacctgccaattcgtctggtgttttaagtgccactctccttggcatgaaggtgttaactgcaaggagtacaaaaaaggagacaaattgttgcgtcactgggccagcgaaattgagcatgggcagaggaatgcccagaagtgtccaaagtgcaagatccacatccagcgaactgaaggatgtgaccatatgacctgctcacaatgtaacactaatttttgttaccgatgtggtgagagataccgccagctccgattttttggagaccacacatcaaacctcagtatatttggatgcaaatatcgctacctcccagagagacctcatttaaggagattagtgcgagggtcagtctgtgctggaaaattattcattgcacctctaattatggttttgggattggcactaggggccatagcggttgtaatcggtttatttgtatttcctatctattgcctttgtaaaaaacagagaaaacgatcacggacagtcccgggagggcggatgtcccctgggaagatgcgcgaggagagcgactgggaggcagctagcagcacctgcgtgtgggcaacacgacccgaggctgtctccattgcctgcgtgctgaaagcataa

SEQ ID NO: 11779 - DNA, 516 bp, Homo sapiens
  SIMILAR (64)..(372): 361254mologous to Hylobates muelleri dopamine receptor D4,accession number AB032914,Smith-Waterman Score=106.
agcaaaaaaaaaaaaaaggaaaaggaatttaagttgaaaaatactccaacaaacgaaccaacatgttttcagaactttttgggacccagctggggccggcccttccttcccttctcctgtcgcacgactaggcctgtgcccggtcccacctgccgccctccccctcctcctaatgggaccgaaaagagcccgaagggcctgggagggcgggtgaggttcccaggcctttccagatgccctgccgtgtttggcaaagcgattgtcttccctcttggagctccgcggacacccgacccctcttcctctccctcgccaccttccgtcattcgccacgctgaccacttcccctctgctccgccggggagaaggagggatggattctttccaaactctctccgctctcccggagccccctacctcaccctttctccccgaattcttgtgggcttgggagcgagagagaaggagctggtcccagcgctagtcaccgccaccctcagcccacagatcgggggg

SEQ ID NO: 11780 - DNA, 645 bp, Homo sapiens
  SIMILAR (241)..(474): 791254mologous to Homo sapiens proteasome subunit XAPC7,accession number AF022815,Smith-Waterman Score=284.
atgaaaattaatcctggacagattagtgactacaaggaaaagaaaactcacaacgccgacatgaaaacacaggtgagtaggtgcttggtggagacgatggcggtgaaactttcaacagcgcgcctgtttgggtttaagcttcagagaacaggcgcagaatccctgcacgtcacttccagcatcccagagcaggtgcggctcctgggtgtccaggcctatgctcagtgctttagggaggctcagctgcaggagcagagcacgtgtgggaccctgcaccatggagaggtggctgccaatgccataggccgttttgccaagtcagtgcgcgagttcctggagaagaactatactgacgaagccattgaaacagatgatctgaccattaagctggtgatcaaggcactcctggaagtggctcagacaggtggcaaaaacattgaacttgctgtcatgaggcgagatcaatcccttaagtcaggctgtgatacaataaccagggaggcggacaagaaagtccccagtgacagcgcctcttatgtgctgtttgttggaagcaaacctcagttcggcttaggagacgtggccactcgcgcttggttcacagatattttcaatgcctcgagaagctacgttgtacctgcctga

SEQ ID NO: 11781 - DNA, 639 bp, Homo sapiens
  SIMILAR (888)..(22): 701254mologous to Homo sapiens putative p150,accession number U93572,Smith-Waterman Score=1010.
  misc_feature (1)...(639): n = a,t,c or g
gtcctaggtgagtttttctaggagtgaaaatgcagaaaaggatgttgaaagctattggctaatgtatcatttgaactgctgataacctgagaaggggctcaggcatggtttaaaatgttcgtatcttcactaagtacggttctttcctcacatgcagtttcttaattggatggcactgacctgtttcttttcttgctagcgttatacgcagagcaatgggcgcaggccgtttggcatctctgccctcatcgtgggtttcgactttgatggcactcctaggctctatcagactgacccctcgggcacataccatgcctggaaggccaatgccataggccggggtgccaagtcagtgcgtgagttcctggagaagaactatactgacgaagccattgaaacagatgatctgaccattaagctggtgatcaagggcactccctggaagtggttcagtcaggtggcaaaaacattgaacttgctgtcatgaggcgagatcaatccctcaagattttaaatcctgaagaaattgagaagtatgttgctgaaattgnnnnnnnnnnnnnnnnnnnnnnnnnnnnnnnaccgaagaaagcatcatgatgaataaaaagtctttgcttggaatttttaaattcatat

SEQ ID NO: 11782 - DNA, 1998 bp, Homo sapiens
  SIMILAR (351)..(7): 901254mologous to Homo sapiens p40,accession number U93569,Smith-Waterman Score=522.
  misc_feature (1)...(1998): n = a,t,c or g
atggaggaaacaggcatgtgtgaaggccacggggcatctccaggaatggaggccagctctggggagcgggaaaagaggggaacgggggaggccagccctggggaccgggaaaagaggggaacgggggaggccagctctggggagagggaaaagaggagaacgggggaggccagctctggggatcgggaaaagaggggaacggggaaggccagctctggggagcgggaaaagaggggaacgggggaggccagctatggggagcgggaaaagaggggaacgggggctgctgggggacaggagtcctgtgcccattgtgggggctggctgatgcccagggccaagcccagcacccacagggagacaaacccaaggggcacggaagccacggccatggcaatggaccatgtgggtcagcaagccgatactacagactccactgatggaagccagtgggacccctctgaacattcacccaactgtggaatccgtgaagtcggtgctggggatccagacacccagcagacaggcagacaccactgctattatccggccaaggaaaccaatgagaaaaccaatacaaacagaaacagtaacacatttattgagcaattactgcatgccaagcagcaaagaggcaactcaggggtccccttcaagcctggccacatggtccgagccctcaccacaaacgcactctcgtgggctaaactgtacccagacccctggtgcctgcgcatgggaggtactggaaatgaggtatttgaaaatgaaataaagacggggtcatgctggattaaggagcaagaggggcagccccggccacagtccccgcggtcgcaagtgcgcccggaggccgacccgggcccctcaccactaaccaaaatgagcgcagaaaacgagtaccgcccgccgtcgccaccgaagctggctgcggagcgcgacaagccctcgccgcggctccggccccgaggggtcccctggcgccgggagtcgcgggtgcgcgcgggccgtgagtgtgcgcttttgagagtcgcggcggaaggagcccggccgccgcccgccggcatgagctacgaccgcgccatcaccgtcttctcgcccgacggccacctcttccaagtggagtacgcgcaggaggccgtcaaagaggggctcgaccgcggttggtgttcgaggaagagacattgttgttcttggtgtggagaagaagtcagtggccaaactgcaggatcaccgcccagtgcggaagatctgcactttcacatgacaaccgtttgcatggcctttgcaggcctccnccggccgatgcaaggatagtcattcaaacagggcccggggtggagttccaaaagccaccgggcctgaacctgtggaaggaccccgggtcactgtggaggtacatcaccccgcttacattcgccagtctgaaagccagcgtttatacccagagcaaatggggcgcaaggccgtttggcaatctctggccctcatcgtgggttttcgacttttgatggcactcctttagctctatcagactgacccctcgggcacatacccatgcctggaaggccaaattccataggcccggggtgccaagtccagtgcgcggagttcctgggagaagaacttatactgacaaagccattgaaacagatgatcttgaccatttaagctggtgatcaaggcactcctggaagtggttcagtcaggtggcaaaaacattgaaccttgctgtcatgaggcgagatcaatccctcaagatttttaaatcctgaagaaattgagaagtatgttgcctgaaattgaaaaagaaaaagaagaaaactgaaaagaagaaacaaaagaaagcatcatgatgaataaaatgtctttgcttgtaatttttaaattcatatcaatcatggatgagtctcgatgtgtaggcctttccattccatttattcacactgagtgtcctactaataaacttaccgtatttttaaaaaaaaaaaaaaaaaa

SEQ ID NO: 11783 - DNA, 511 bp, Homo sapiens
  SIMILAR (45)..(392): 921254mologous to Homo sapiens bA508N22.1 (HSPC025),accession number AL117339,Smith-Waterman Score=556.
  misc_feature (1)...(511): n = a,t,c or g
nggggttnnnnggaaatatgatcgcctgtggaatatcgcacgacgatgaacttttcagttactcctgccccaagttcctgtcgcctgtagtgcccaactatgataatgtgcaccccaactaccacaaagagcccttcctgcagcagctgaaggtgttttctgatgaagtacagcagcaggcccagctttcaaccatccgcagcttcctgaagctctacaccaccatgcctgtggccaagctggctggcttcctggacctcacagagcaggagttccggatccagcttcttgtcttcaaacacaagatgaagaacctcgtgtggaccagcggtatctcagccctggatggtgaatttcagtcagcctcagaggttgacttctacattgataagcttaatcgaaccctgaagaagatgggacagagaccttgatgatattcacacacattcaggaacctgttttgatgtattataggcaggaagtgtttttgctaccgtgaaacctttaccta

SEQ ID NO: 11784 - DNA, 1933 bp, Homo sapiens
  SIMILAR (613)..(1266): 861254mologous to Homo sapiens putative p150,accession number U93574,Smith-Waterman Score=1018.
  misc_feature (1)...(1933): n = a,t,c or g
atgtcttatcccgctgatgattatgagtctgaggcggcttatgacccctacgcttatcccagcgactatgatatgcacacaggagatccaaagcaggaccttgcttatgaacgtcagtatgaacagcaaacctatcaggtgatccctgaggtgatcaaaaacttcatccagtatttccacaaaactgtctcagatttgattgaccagaaagtgtatgagctacaggccagtcgtgtctccagtgatgtcattgaccagaaggtgtatgagatccaggacatctatgagaacagctggaccaagctgactgaaagattcttcaagaatacaccttggcccgaggctgaagccattgctccacaggttggcaatgatgctgtcttcctgattttatacaaagaattatactacaggcacatatatgccaaagtcagtgggggaccttccttggagcagaggtttgaatcctattacaactactgcaatctcttcaactacattcttaatgccgatggtcctgctccccttgaactacccaaccagtggctctgggatattatcgatgagttcatctaccagtttcagtcattcagtcagtaccgctgtaagactgccaagaagtcagaggaggagattgactttcttcgttccaatcccaaaatctggaatgttcatagtgtcctcaatgtccttcattccctggtagacaaatccaacatcaaccgacagttggaggtatacacaagcggaggtgaccctgagagtgtggctggggagtatgggcggcactccctctacaaaatgcttggttacttcagcctggtcgggcttctccgcctgcactccctgttaggagattactaccaggccatcaaggtgctggagaacatcgaactgaacaagaagagtatgtattcccgtgtgcccagagtgcccaggtcacccacatactattatgttgggtttgcatatttgatgatgcgtcgttacccaggatgccatccgggtcttcgccaacatcctcctctacatccagaggaccaagagcatgtttccagaggaccacgtacaagtatgagatgattaacaagcagaatgagcagatgcatgcgctgctggccattgccctcgacgatgtaccccatgcggtattgatgagagcattcacctccagctgcgggagaaatatgggggacaagatgttgcgcatgcatgaaaggtgacccacaagtctatgaagaacttttcagttactcctgccccaagtttcttgtcgcctgtagtgcccaactatgataatgtngcaccccaacttaccacaaagaagcccttcctgcaagcagctgaaaggtgttttctgatgaagtacagccagcaggcccagctttcaaccatccgcagcttcctgaagcttctacacccaccatgcctggtggccaagcctggcttggcttccctggacctcacagagcaggagttcccggatccagcttcttgtcttcaaacacaagatgaagaacctccgtgtggactcagcggtatctcaagccctggatggtgaatttcagtcagcctcagaggttgacttctacatttgataaggacatgattccacatcgcggacaccaaggtcgccaggcgttatggggatttcttcatccgtcagattccacaaatttggaggagcttaatccgaacccctgaagaagaatggggacagagaccttggatgatattcaccacacattccgggaacctggttttgaatgtattataggcaggaagtgtttttgctaaccgtgaaacctttacctagatcagccatcagcctgtcaactcagttaacaagtttaagggaccgaagtgtttcaagtgggatcttcagttaaaggatctttggagccagaaaaaaaaaagtcgaagcggccgccaa

SEQ ID NO: 11785 - DNA, 537 bp, Homo sapiens
  SIMILAR (898)..(1674): 881254mologous to Homo sapiens putative p150,accession number U93567,Smith-Waterman Score=1146.
  misc_feature (1)...(537): n = a,t,c or g
atgatggagcacggtggatgggcgctggcnnaggcgttcaccactgccgcgctcgccctggccgacgcgggcgtggagatgtacgacctggtggtgggctgcggcctcagcctcgcgccggggcccgcgcccacctggctcctggaccccacgcggctcgaggaagagcgcgccgccgccggcctcaccgtggcgctcatgcctgtgctgaatcaggtggccgggctgctgggcagcggcgagggcggcctgacagagagctgggcggaggccgtacgcctgggcctcgagggctgccagcgcctctaccccgtgctgcagcagagcctggtgcgggccgcccgccgcaggggcgccgccgcccagccctcaaccagaagcctgagcaactacggacgcaagccgaggaccgtgctgccgccgtccacgaaaagacccgcgccatcggcctccggggatcctctagagtggactcccaggcacaagcccctgcctgcggaggtcatccaggcctcaccaggctacaccctctcgtaa

SEQ ID NO: 11786 - DNA, 552 bp, Homo sapiens
  SIMILAR (495)..(55): 931254mologous to Homo sapiens putative p150,accession number U93565,Smith-Waterman Score=735.
ctagttcagctgacggatgagctgattgatgcgttcaccccgatagccaggtgtgcccatctccttgaggaagcccactctatttttggtagcatgatgggccactgagaggtggaaagggcgcaagaaccatgagatctcctggaaatgcttccctgggaaggcaatttcatgaatgaggtcttccaagcaaatgaagccaaacttccccaggtgctcctcaatcactgtgttgtctgtcagagggatggtcttattcttgaccttggcttgtccacgtttcaaaatgagttctcggacagacttcagatttggaaatccccaggtcacataaggttccactatatgcagcatttttagattgccatcaatcctttcgatgcgtacaacaaaggccaaggaatgtttatctggcaattccaaggcatgaggtttcacttctagtcgtctgagacgcaccttgtcacgtttctgccgccaggaatcatgtaggaatgattccagtcgcttaaacctgagcccttttcctttcttctgtcttgctactgccat

SEQ ID NO: 11787 - DNA, 854 bp, Homo sapiens
  misc_feature (1)...(854): n = a,t,c or g
tagatattcacatcttcaagtccttttgaaaatcagttattaatattattcttccctcatttccatctgaatgactgcagcaatagttttttgttttttttttccgagatggagtctcgctctgtcgcccagctggagtgcactggtgcaatctcggctcactgcaatctctgcctcctgggctcaagcgattttcctgccttagcctctcgagtagctgggaccacaggcacgcgccaccacacccagctcatttttgtatttttagtagagacagggtttcaccatgttggccaggatggtctcaatctcctggacctcatggtctgcccgcctgggcctccccaaagtgctgggattacagccgtgagccaccgcgccccggccagcaatacagtttttcagttactcgaacatctttaagccctataactcttaggctatgcatagccccatgtcctaatcaggcattcactgatcccagcaggtctccatctatttgtaccagcctcctctattcctcccaatctcaaggttactcttaaatactagtaaatgcaaaaagaacttgtgaagtggcaaggcatggcctatcaaaagtcagcccaaggggcagttttcagccctgcctcacctgggtctagttcagctgacggatgagctgattgatgcgttcaccccgatagccaggtgtgcccatctccttgaggaagcccactctatttttggtagcatgacgggccactgagaggtggaaagggcacaagaaccatgagatctcctggaaatgcttcccgggaaggcaatttcatctcgtgccgaattcctgcagccgncgaaggcntcgactcttt

SEQ ID NO: 11788 - DNA, 2809 bp, Homo sapiens
  SIMILAR (883)..(1584): 881254mologous to Homo sapiens p40,accession number U93564,Smith-Waterman Score=1043.
atgtttggccgctcgcggagctgggtgggcgggggccatggcaagacttcccgcaacatccactccttggaccacctcaagtatctgtaccacgttttgaccaaaaacaccacagtcacagaacagaaccggaacctgctagtggagaccatccgttccatcactgagatcctgatctggggagatcaaaatgacagctctgtatttgacttcttcctggagaagaatatgtttgttttcttcttgaacatcttgcggcaaaagtcgggccgttacgtgtgcgttcagctgctgcagaccttgaacatcctctttgagaacatcagtcacgagacctcactttattatttgctctcaaataactacgtaaattctatcatcgttcataaatttgacttttctgatgaggagattatggcctattatatatcgttcctgaaaacactttcgttaaaactcaacaaccacactgtccatttcttttataatgagcacaccaatgactttgccctgtacacagaagccatcaagtttttcaaccaccctgaaagcatggttagaattgctgtaagaaccataactttgaatgtctataaagtggataaccaggccatgctgcactacatccgagataaaactgctgttccttacttctccaatttggtctggttcattgggagccatgtgatcgaactcgatgactgcgtgcagactgatgaggagcatcggaatcggggtaaactgagtgatctggtggcagagcacctagaccacctgcactatctcaatgacatcctgatcatcaactgtgagttcctcaacgatgtgctcactgaccacctgctcaacaggctcttcctgcccctctacgtgtactcactggagaaccaggacaaggtcttcttaattatacatcatgcaccgctggtgaactcgttagctgaagtcattctgaatggtgatctgtctgagatgtacgctaagactgaacaggatattcagagaagttctgtcttacccactctaagctccttatggcagggatctcacctgtcactgaatcagctgcagtctgggctgcacaaatgctcatctcacttatgcggagcccaggctgcagctgattcagtgacaggtgagatccctgccataaggagcttagagtggctaatcagtgctggttccaaggcgcgcacattcttcttcctgaaaatgctaataggcttctgggagaaggttgattgtgaatatcaaaggcgtcaagtgctgagcacgcggctgcaagaggccttgccgtcaaatcgcctcactgatgttgcagctgtgcattcttcatgcatgttgggctttggttccacagctccacgcggctcctggattggcgatccagcggctgtgcatctgcccctacctggggagctggccgagcaccttgggtccaagggtaccaccactgtcaccaagcaccagccccaggccaagcccagcattcggtgcttcattaaacccaccgagacactcgagcggtcccttgagatgaacaagcacaagggcaagaggcgggtgcaaaagagacccaactacaaaaacgttggggaagaagaagatgaggagaaagggcccaccgaggatgcccaagaagacgccgagaaggctaaaggtacagagggtggttcaaaaggcatcaagacgagtggggagagtgaagagatcgagatggtgatcatggagcgtagcaagctctcagagctggccgccagcacctccgtgcaggagcagaacaccacggacgaggagaaaagcgccgccgccacctgctctgagagcacgcaatggagcagacccttcctggatatggtgtaccacgcgctggacagcccggatgatgattaccatgccctgttcgtgctctgcctcctctatgccatgtctcataataaagaaaatctcctgaaaaagaggaaggcttatcaggcactcaaagccacccaggcaaagcaggaacttttggcaaagaaggagcagaagaaaggaaaagggctcaggtttaagctactggaatcattcctacatgattactggcagcagaaacctgacaaggtgcatctcagacgactagaagtgaaacctcatgccgtggaattgccagataaacattccttggcctttgttgtacgcatcgaaaggattgatggcgtgagtttactggtgcagagaaccattgcaagactttgcctaaagaaaatttttagtggtgtctttgtaaaagtcaccccccagaatctacaaatgctgcgtatagtggaaacttatgtgacctggggatttccaaatctgaagtctgtccgagaactcattttgaaaccgtggacaagccaaggtcaagaataagaccatccctctgacagacaatacagtgattgaggagcacctggggaagtttggcgtcatttgcttggaagacctcattcatgaaaattgccttcccagggaagcatttccaggagatctcatggttcttgtgccctttccactttctcagtggcctgtcacgctaccaaaaataagagtgggcttcctcaaggagatgggcacacctggctatcggggtgaacgcatcaaatcagctcatccgtcagctgaactagacccaggtgccaaacttgcggtaaattttttatccagtgaagtgggaagcatgtgttttgttgttttgggaatttttatcaagtgtcttcagagaagattatttccctgctttatcttccagaaactggaaaggaagggtcaaagaaaagacagtagctgg

SEQ ID NO: 11789 - DNA, 753 bp, Homo sapiens
  SIMILAR (38)..(259): 1001254mologous to synthetic construct lac repressor,accession number A14595,Smith-Waterman Score=354.
atggccatactgctcaagggattttgccgatttcggaaccaccatcaaacaggattttcgcctgctggggcaaaccagcgtggaccgcttgctgcaactctctcagggccaggcggtgaagggcaatcagctgttgcccgtctcactggtgaaaagaaaaaccaccctggcgcccaatacgcaaaccgcctctccccgcgcgttggccgattcattaatgcagctggcacgacaggtttcccgactggaaagcgggcaacaggaccctcagctgcaggtttgttggagtttgctagaggcccactccagaccctgtttgcctgggtaccagcagcggtggcggcagaacagcggatttttgtgaaccgcgaatgctgctgtctgatcgttcctcttgaagttttgtctcagaggagtacccggctgtgtgaggtgacacagaatgatatgataatggctgaaaggctctttggaatcctagcacatgtagcatcttctgagttaccccagtatcgtctgatttccattctgggtgatgccagctcttttgcctattttaaattggattcgagagattcttctagacgtccaaagtgcagagggtttgcaagccaaactaaatattcagaccgccaattaataatggggccgtggtcccagattaataatcagaccgacgatacgagtgggacccatggtccccagactaatattcagaccgacgatacgagtgggaccgtggtcccagtctga

SEQ ID NO: 11790 - DNA, 504 bp, Homo sapiens
  SIMILAR (61)..(501): 891254mologous to Homo sapiens ribosomal protein L7,accession number X57959,Smith-Waterman Score=683.
atgtttcaaacggctggctgccaggcccatgctggtcactgtgagggccatgggcagagaagcataagggtccgaaaggtgttgcggcttcttcaccttcgtcaaatcttcagtggaacttttgtgaagcttaacaaggcttcaattaacatgctgaggattgtagaaccatatattgtatgggggtacccaaatctgaagtcagtaaatgaactaatctacaagtgtggttatggcaaaatcaataagaaaataattgctttgacagacaacgctttgattgctccatctcttggtaaatatggcatcatctgcatggaggatatgattaatgagatctatactgttggaaaacacttcaaagaagcaaataacttcctgtggccctttgaattatcttctccacgaggcggaatgaagaaaaagaccacccattttgtagaaggtggagatgctggcaacagacaggaccagatcaacaggttttttagaagaatgaactaa

SEQ ID NO: 11791 - DNA, 405 bp, Homo sapiens
  SIMILAR (178)..(402): 1001254mologous to Homo sapiens putative selenocysteine lyase,accession number BC000586,Smith-Waterman Score=375.
atgagctgcatctgtaaacaagtttttgacttcttagaagatgaaagtgttgcttctttcttcttcctggatcacgcagagaaacccagcagtcgtgtttggcccatgaagaagaacacgtgggtaaccgtcatgatggctgcgttcatgagaacctgggctgacatgcgttcttgccacgtggtgcttgcgcagtgccgagtgctgatggccagtgtgggggccgcgtgccactcggaccacggggaccagccgtccccagtgctgctgagctacggtgtccccttcgacgtggccaggaacgcgctccggctcagcgtgggccgcagcaccaccagggccgaggtggacctcgtcgtgcaggacctgaagcaggccgtggcgcagctggaggaccaggcctag

SEQ ID NO: 11792 - DNA, 673 bp, Homo sapiens
  SIMILAR (1345)..(2343): 901254mologous to Homo sapiens putative p150,accession number U93563,Smith-Waterman Score=1562.
gtgatgatcttacgcttcctgacatcgacatgtctggcagtgagtatgatattcctggagtcattactcgccctatctatgcagagatagagaagctaaccacagaacaactaactactcaccaggcttattggaatgctgttactgctcaggtagctgcaattactgctcgtgctaatcttggtattatcaaagctaactttgttacagctaagattcaggctctggctactaaagctgaatatgcccttactaagctgaagctgtctaatgagtcagtaacttactgtactgctcaatacaatctatcctctatgcttcctcaacaattactgatgttgaagaaccagaccactcaggttgctgaacagactaagttaactactgaacaaatcaatatgacgaaagagcagaaggaagcacaacgtgctcagacttctgatactcgtactgatggtactcgtgtagctggttctgtaggtaaacagaaagaactctatgaccaacagattacgtcttataaacgtgatgctgaagttaaagctgccaaactgtttactgatgcatgggtcactcagaaaaccattgatgagggtctgtctcctcctaatggcttcactaacaccagtctggatagcattcttactgcattgaagaataacaacgcattggg

SEQ ID NO: 11793 - DNA, 1263 bp, Homo sapiens
  SIMILAR (471)..(67): 881254mologous to Homo sapiens NAG13,accession number AF194537,Smith-Waterman Score=609.
accaggcttattggaatgctgttactgctcaggtagctgcaattactgctcgtgctaatcttggtattatcaaagctaactttgttacagctaagattcaggctctggctactaaagctgaatatgcccttactaagctgaagctgtctaatgagtcagtaacttactgtactgctcaatacaatctatcctctatgcttcctcaacaattactgatgttgaagaaccagaccactcaggttgctgaacagactaagttaactactgaacaaatcaatatgacgaaagagcagaaggaagcacaacgtgctcagacttctgatactcgtactgatggtactcgtgtagctggttctgtaggtaaacagaaagaactctatgaccaacagattacgtcttataaacgtgatgctgaagttaaagctgccaaactgtttactgatgcatgggtcactcagaaaaccattgatgagggtctgtctcctcctaatggcttcactaacaccagtctggatagcattcttactgcattgaagaataacaacgcattgggattccctggttgggctgcaactaactatgacccttcaattggtattgcttatgggaacttgtcaatactgtctcagatagaccctgaagtagttaaatggcaagttcctcaaaaagcaggttatgaggtacaggttcagagcagtaggattggatttggtgattttgaggaatgggctgataaattcctctatgagaattatccagaccgtattactgaagagtttgaaatagacatcatggatgatgacaggattgtactcactgctactgatggtagtgagttatccttttatccagagaattacagtcaggatgcaatgtatctgtatgtgaactattactacatacagcctactagtgttgcagacccagtggttcatcctgctgtatctgtaccatctgctgatgacttaccttctacttctgaatggactcaggtatctcagaaccatactcctaagtcagctaccctgaagacagttactcatattaagagtgtattctctgatggcagacctgatgaggaaagtaccaatactgaagaagaacaggttagttggactaacttctcagatgtttacgagaaagaatttcgtgaaccaagtgaagtaggcttaatcattattcgtaagactacaatgacccaggtacagactggtactgtatctactggttccactacaaacactgaagttattgatttaggtg

SEQ ID NO: 11794 - DNA, 648 bp, Homo sapiens
  SIMILAR (212)..(325): 391254mologous to Sus scrofa metallothionein isoform,accession number AB000790,Smith-Waterman Score=56.
acagcgtaaccaatgcaaagcaagttgacgtctctactgcaaccgcccagaagaaagctgaacaaggtgtcactactcctcttgtttctcctgatgctgcttatcaaatgcaagctgcccgtactgggaaccaggtattcaatgattcagttactacaagaactcctggggaagaactgggggatattgctactggtgttggtcttggttttgttaatacccttgggggcattggtgctcttggggcaggcttactcaacgatgatgcaggtgctgttgttgctcaacaattgagtaagtttaatgatgctgtccatgctacccaaagccaagcattacaagataaacgtaagctctttgctgctcgtaacttaatgagtgaagtagagagtgaacgtcagtatcaaacagataagaaagaaggcactaatgacatagtagcttccttatctaaatttggacgtgattttgtaggttcaattgagaacgctgcccaaactgactccattatttctgatgggttagcagaaggggtaggttctctattaggtgctggtcctgtattaaggggtgcatctttactgggtaaagcagttgttccagcaaatactcttcgtagtgctgcattggctggtgctattgatgcag

SEQ ID NO: 11795 - DNA, 1584 bp, Homo sapiens
  SIMILAR (1090)..(1584): 901254mologous to Homo sapiens putative p150,accession number U93570,Smith-Waterman Score=795.
ttaacgagttaagcgattagctgcaatgtaagcatcagccgtagattggtcacgattttctgcaacagcacgactacgagcacggtcttccagagcagtgttataggacttaatctggttattcagattagtgttagtaacatctttagcaaaagagaactgattcttagctaacttgttagcctgtaatgcaccatagatattacccagtgcattaagaccacctaaccccaactggaatgtaggaatgttcagacccagttggtcagtaagcccttgagtctgcccaccggtattccctgtagcaccaccagtaatattctgaagccagtcattactaaggatgccagattgcatagggttatagttcatggttggggtattaaaggaaccatacccatagccaaaattgctattagttaggttcattgcgtcaatgtaacccatgccctcagtgccaaacatttcctcgtacttttcctgaatggtttttatctggtcacggtactctgccataagtttctctgtctttttgacagtttccatagcagaagcattgatgtaatcacttatgccatttcctacagatgaagtgagtttaatgatgttgtctgctttcatcatttcacccagcatcgtagacatggatgaaccagtggataaagctgtgccgacattcatggctaccatagaggcaatagtagcaacaatgattccaatcttatccccaagcagactaacagagactgtttgaataatggacatcagaatcatagctgcaatggcattagccacagccccaacgataatagcagctaaccctgcaaaacctaatgcagcaccaatagaagcagcagtacccattaccccagcaccagcagcaggagtaaagaacacagacactactactgcaacaacaaccactactactttaaaaatgccagactgataccatttcttcttaactttcttatatgagttaagaaccagataacaacatgcagtagataactgagtaccatttaccaaagacatactacgataaatgttgttatgaagagggatgataaatccggactcttcatcatcatttagtgcatctacaccagaaatgcttacagatttattcttgtaaacattattgttatggttcaggccatagacagaaatcttcccctctctcccctgcaaagcctggtgataaagaataaacaataaatattcttcaacatactcaggaggtcgagtgtctggtccaagatctcggtgcaaagaaatcctgtcacttgcgaaagcattaaagcagtgtttagcttccccacgttccttttccttttgctcttcaacacttaaattggttgtcttgaatgctttaccagaagcaccaggtgcatttgaatcctgaggtggacggtcaaggacaggcttcaattctgctgctgtataatatccttgcaaacaaggtctctcaccagcatcaatgttttgcctgacaggtgctcctatttgcatttttggcatggcatccttaatattgtttacagcttctagcattaaatccaacatcttgtttttgtttttcat

SEQ ID NO: 11796 - DNA, 1671 bp, Homo sapiens
  SIMILAR (747)..(16): 891254mologous to Homo sapiens putative p150,accession number U93574,Smith-Waterman Score=1190.
atgcagcttcccggacgcggtcacagctttgtgtgtaaagcgaatgccgggagcacacaagcccgtcagggcgcgtcagcgggtgttgccgggtgtcggggctggcttaactatgcggcatcagagcagattgttctgagagtgccccatatgcggtgtgaaatcccgcacaaatgcgtaaggagaaaatcccgcatcaggccccattccccattcaggctgcgcaactgttggaaagggcgatcggtgcgggccttttcgctattacgccagctggcgaaagggggatgtgctgcaaggcgattaagttgggtaacgccagggttttcccagtcacgacgttgtaaaacgacggccagtgccaagcttgcatgcctgcaggtaagagcacagagtgaagacatctctactgtgcctattcactatgcatacaatatgacccgtgttggtcgtatgcagatgttaggtaaatacaatcctcaatcagccaaactggttcgtgaggctatcctacctactaaagctactttggatttatcgaaccagaacaatgaagacttctctgcattccagttaggtctggctcaggcattgcacattaaagtccatactatgactcgtgaggttatgtctgacgagttgactaaattactggaaggtaatctgaaaccagccattgatatgatggttgagtttaataccactggttccttaccagaaaatgcagttgatgttctgaatacagcattaggagataggaagtcattcgtagcattgatggctcttatggagtattcccgttacttagtagcagaggataaatctgcatttgtaaccccactgtatgtagaagcagatggtgttactaatggtccaatcaatgccatgatgctaatgacaggtggcctgtttactcctgactggattcgtaatattgccaaagggggcttgttcattggttctccaaataagaccatgaatgagcatcgttctattgctgacaataatgatttatatcaagcatccactaatgctttgatggaatcgttgggtaagttacgtagtaactatgcttctaatatgcctattcagtcccagatagacagtcttctttctctgatggatttgttcctaccggatattaatcttggtgagaatggtgctttagaacttaaacgtggtattgctaagaacccgctgactattaccatctatggttctggtgctcgtggtattgcaggtaagctggttagttctgttactgatgccatctatgagcgtatgtctgatgtgctgaaagctcgtgctaaagacccaaacatctctgctgctatggcaatgtttggtaagcaagctgcttcagaagcacatgctgaagaacttcttgctcgtttcctgaaagatatggaaacactgacttctactgttcctgttaaacgtaaaggtgtactggaactacaatccacaggtgcaggagccaaagggaaaatcaatcctaagacctataccattaaggatcccgtcaattctccatataaattggcgtatctgggatcgaattcttctcactcatgcagctggttttgtgtggatgttcggtataatgcggctgcactaggagttcacatagcgatcggagggcgagagcgagcatgtgtctcagatctataa

SEQ ID NO: 11797 - DNA, 3831 bp, Homo sapiens
  SIMILAR (445)..(1443): 971254mologous to Homo sapiens bG120K12.3.1 (novel protein similar to archaeal, yeast and worm N2,N2-dimethylguanosine tRNA methyltransferase (isoform 1)),accession number AL109865,Smith- Waterman Score=1674.
atgtacagcaaagaaaaagaaattgaaggactggaacaccaactgaagggtattaaagctgctcgtgcttatgcagaagatgttcgtaagctgatgggtaattcccttttccgtaaagtaattcttgagcaattctgtactgtagactgtgctcgttatgtacaagaatcctgtgacccattgcttgaagaccgtcaacgtgctgatgctcttgctatggctcaagctgctggttgtttaaaacgttatctggaaattactcttcagaaagcagaaacactggtaggtgtccaatcagatattgagaatgcattggatgttgctcgtgatacccccatgactacggaagctgcaaaaacagcttccgacatttttaaaatgtcggatgaagagattctgaacatgcctggtccatcaagcattcagaacaacccggaaccggtagaaaataatactcctgcacaaccagacccaattgttgaagttgaacaaactgatgaaccagaagtaactactgaaccaactgaagtagaaaatacttctgaatcagaaagcaattcagatgcattcacaactggtaatgatagtgctacagttgacccaaataaggttgacagcaacagtaagcctgctactgataatgcaccttctactactgagcaaggccaagcaaaagtagtagaagacaagcaggtatcagaccagaaaactgacttcgactataaggctggttatgaacggataatggctccgtttaaagctaacggcaaaatgattactcctcagagtcctgaagagcaggaggagtctctccttgtggtcaccacaggtgtctctgccaacagactcatgggtggtgccatgcagcttaccttccgcaagatggcgtttgactattaccctttccattgggcaggtgatagctgcaaacattgggtacgccactgtgaggccatggagacccgaggccagtgggcccagaagctggtgatggaatttcagagcaaaatggagaagtggcatgaagagacgggtctgaaaccaccctggcaccttggagtagactctctctttcggagaaaagcagattctctttccagtcctcgaaagaaccctcttgagagaagcccctctcagggcagacagcctgcctttcagcctccagcatggaaccgcttacgctctagctgcatggtggtacgggtggatgacctggacatccaccaggtttccaccgctggacagccaagtaaaaagccatctacactcctttcctgcagtcggaaacttcacaacctccctacccaggtctctgccattcatattgagttcacagagtattacttcccagataatcaggagcttccagttccttgtcctaatctctacattcagttaaatggtctgacatttactatggatcctgtcagtttgctctggggaaacctcttttgcctggatttataccgcagcttggagcagttcaaagctatctacaagctggaagattcaagtcagaaagatgaacacttggacatccgactagatgcattctggttgaagagacctaaggcttcctgggatctctggtctgtccactttacccagatctccttggactttgagggaacagaaaacttcaaaggccataccttgaattttgtagcccccttccccctgtccatttgggcctgcctacccctccgctggcagcaagcccaggcacggaagcttcttttggcctcagaggggaggctgaaaccatcagccagttttggaagtcctgtccagtctgaggctcttgcccctgactctatgtcccatccgcggtcaaagactgaacatgacttgaaaagcttatcaggacttacagaagtcatggaaattctgaaagaaggcagtagtggtatggacaacaaagggcctctgacagagctggaggatgtagcagatgttcatatgcttgtacattccccggcccatgtccgcgtgaggcttgaccactaccagtacttggctctgcttcgcctgaaggaggtgctgcagaggcttcaggagcagctgactaaggatacagagtcaatgactgggtctcccctgcagaatcagacagcttgcattggagttctctttcccagtgctgaagtggctctgcttatgcatcctgcacccggtgctgtcgatgctgactctgcaggctcagatagcactagcctcgtagattcagagctatctccttcagaggatcgggaactgaagtctgatgcctcatcagaccagggcccagcaagccctgagaaggtcttggaggaaagtagcattgaaaatcaggatgtatcccaggagaggccacatagcaatggagaactgcaggactcaggtccacttgcccagcagctggcagggaagggccatgaggcagtagagtccctacaggccaagaaactgagcagaacccaagcctccagctcaccagctgcattgaagcccccagctggcagggagactgctgtgaatggacagggtgagctcatccccttgaagaacattgagggagaattgtcaagtgctattcacatgaccaaggatgccaccaaggaggctctacatgccaccatggacctcaccaaggaagctgtgtccctgactaaggatgccttcagtttgggcagagatcgaatgacctccaccatgcacaagatgttgtccctgcccccagccaaggagcccatggccaagacagatgagggggtggcagccccagtgagtggaggtgctgcacgactccgatttttctccatgaagaggacggtatctcaacagtcatttgatggtgtctcattggatagcagtggccctgaagaccggatttcagtggacagtgatggcagtgatagctttgtgatgctcttggagtctgagtctggtccagaatctgttccaccaggatctctttcaaatgtctcagataatgctggtgttcaagggagccctcttgtgaataattatggccaggggtcaccagcagccaacagttcagtttcacccagtggagaagacctcatctttcacccggtctcagttctggtcctgaaggtgaatgaggtgtcttttgggattgaggtacgtggtgaggacctgactgtggccctgcaagcagaggaactgaccctccagcagctgggcaccgtgggactctggcagttcctgcatggacagtgcccaggtacatgctttcaggaatcctcaactttgaagactggccacatcaggccagctgtgggccttcgctttgaggtggggcctggagcagctgttcattcccccctggcctcacaaaatggcttcctacatttattgcttcatggctgtgacctcgagctgctcacttcagtgctcagtggcctggggcccttcttggaggatgaggagatcccggtggtagtccccatgcagattgagcttctgaactccagcatcaccctaaaggatgatatcccccccatctatccaacatctccaggccccatccccatcactctggccatggaacatgttgtgctgaagaggagtgatgatggtgtgttccacataggcgctgctgctcaggacaaaccatcagctgaagtacttaaaagtgagaagagacagcccccaaaagaacaggtgtttttggtgcccacaggagaggtttttgaacagcaggtgaaagaactgcctatcctacaaaaagaacttatagaaactaaacaagccttggccaatgccaaccaggataaagaaaaacttcttcaggagattaggaaatataaccccttctttgagctctga

SEQ ID NO: 11798 - DNA, 5373 bp, Homo sapiens
  SIMILAR (1)..(420): 931254mologous to Homo sapiens putative p150,accession number U93564,Smith-Waterman Score=692.
atggctatcactacttttgctaaaacttttggtcaggcttctactaaaactgaatccaacaatggttctcgcccgaaagctcaattctggattaacgttggctatgtagctaatgaaggcactgaagatgaacgtttcatctctctgcctactggtattccactggatactcaggaacatctgccaaccaattcctctaacgaagacttccgtgcaatgcgttgtgcacagaacgatttgttagatcaactgatggaatttgctaagactctggaaccaggtcaggaaggagttatctcactgcaagttcaacttcgtcgagttaaagaagaagctcctgctatctcagcaagcaagtatcttagaagacagccaatcagtgaagaaacagtagatgctctgtgtaagagctttactcatttacttcctgataatgataccaatctaccattcaatgtagatgttctcgactacatgatggaatgttctgatggaagatgtcatctgaaccaaagtcgaattaattggattaagagtcagttggagaaagcattactggataaaaacttctatgactatatctgtgatgatggagaaacacttcatattgcagtacatggtggagttacctatcaaggtgtccctcagtggactgatgggattaaagtcataggttatgactgtgctcatgcaggggataaactgaaatgtcctaaacaattcattggctccattagggagaaactctatgaggattcttatggagtatggcgagatgaagaatactgcatcaatgaatgtgaaagcatggataaggcaatgcgtaaatcactaatcatgggaaccaaagaagacgttgctaagatgaaagctaaacgtcagatgaataaagcagtaacgtttgcagaacgttatagtacgtctgaaccagtacgtcgtattgttactttcaaccatccagctattaaggcaactatcttagaggaaggaataatggaacagttaaactacggttataagattaaacgcaatcaagtaagaggttcttggttatttctcgtttatggcaagccaatctatgaattgcatcgtggagagaaattcaagacctattaccataaagctcgtattgctgacaggaatattcgtattcattatccaatgcctttgagcaatccatttcagaaaaatgagagaaccacggatgaagatatagcagcagcttatgaggcatatcttcgtaaccgtttggtaagtggcgacaagctcattacggctgaaatggaacgaattgctaaattcgttatggatgctactgacaaaccagttggcctcatcggtaatgaactggaagtgaatgtaatccatggaaccagagaagaagtaattgccaaatataaggtatggctacaagaacagattgataaaggtaatccagttgtactggatgaattaaatcgtcttggtaataaagccattgatgaaaaaggattagctttacagtgcttctgttatccaaaaccttgtcatggcgaggttattaaagagaactatgccattcccactaaagataccaatatcaaaacgatggctattgaagacattcgtacatttgtaaatgccttcattgtctatgctgctaatcatccagaacttaactttaaagttactcgtgtagggtgtggattagctggtattgatgattctgttatggcctctatgtttaaaaatgccactgaatatgcgatgtctactatcgaacatcagatgcacctcgaaaagctgtacaacaagaaccaactgttaccaagaatgcgtcaggagtttgaagaaaactctggtattgatttcaaagccttctttgcacatataggcattgattacaaatttggcattgatgcaatggttcaaatggctctgcataagagagctgacctaccaacattagttggcacattgcgtcatcactgcaaatctgcacaggaagtagcagacaacctttttaagatggcaagtgaggattgctttaactttgacccgaccatcgacaagttcattgtcatttatacaatcagcgatgacgtacagcatgaactggattcatttcaatatccactacctatggtagtacgccctaagctgttaactaagaattatggtactgggtacttcacatgtaataagagtgtgattcttaagaagaaccatactgacgatgacatctgcttagaccatctgaaccgtatgaataagattccattgtctatcaattgggatgtagctcatatggttaaaaatgaatgggctaatctggataaaccgaaagaaggtgaaactcgtcaggagtttgaaaaacgtgtgcgtgcattccagaaatacgaccgtactgcacatgaagtaatgggtttattgacccaggaaggcaataagttctatctgactcatcgtccggataaacgtggtcccaataggctaagacgcgaggaatatacaatgcaaacttttactgcccgtgaatatctgaaaattgacattgctaataactatggtctggataaagaagactgggatgaccgtattgcatggttcgataagaatgagaacaacctactgaaccttgtaagagaagctgaagaaccagccctgttctatgctggtgttaaagcatggatggacgttaaggaaggtaagccaattggttatcctgttgcactggatgctacatcatctggtctacagattctggcttgtctgactggtgaccgtagagctgctgaactatgtaacgttgttaactatcgtgatgaaagtggcaaagttaaacgtcgtgatgcttatacagttatctacaacaagatgctgaacactcttggtaaaggtgctcgtatcaaacgtaatgactgtaaacaagcaatcatgactgctctgtatggttcagaagctaaaccaaaggaagtatttggtgaaggcattatgctcaacgtatttgaaagcacaatgaatgtggaagcacctgctgtatgggaactgaataaattctggttacagtgtggtaatccagaggctttcgtatatcactgggtaatgccagatggctttaacgtatatatcaaagtaatggtaaatgaagtggagactgtccacttcttagataagccatatgactgtgttcgtaaagtacaaggtactgaagagaagactcgtatgctatctgccaataccactcactctattgatggcctggtagtacgtgagctggttcgtcgttgtgactatgacaagaaccagattgaatacatcaaggctctttgcaatggtgaagctgaatataagacttctgaaaagaactatggcaaagcaatggaactgtggggctactatgagaagacaggattcctgactgctcgtatctttgattatctggattctgaaactattaaattagtaaatactcaggacattctagacctgattgaatccatgcctaagaagccattccatgtactcactgtacatgactgcttccgttgcctgcctaactatggcaatgacattcgtcgtcagtacaacaacctgttagctactattgctaaagtgatgtttcataaagacaccaacgtagctactgtactggatgccagtggtagccttagtgatggttccgttgaggtgggtactttccatcatcctgatgaaacctatcccgatagtgtaactatctatcatggtgtacgtgacctgctgtataaacgcagtgctaaagacccatctcaaactgcttcttacccaaataacattatcaatatgcaagttatcagtattgatatgaaggcaactcctcgcctgattttgggtactgcattgcctcgtgtaatctctactattgaaggtaaagatgtaacctggcatgtagatgttgctggtggtaaagcaccattgacttacaagtggcagtttaaagctaatactgtaggtgctgctttcgctgatattgattccggagagaatcctacagctaaaactgcaactcttattaaccatgcagtaactgctgaatctgctggtacttataaagtcatcgttactgatgctaacggtactactatcgagagttcttctctgctggttgtaggagttcaggaaccacctgaagtagcttctattgttgcttatccaagtccactggctctatcagtagctgatgatattaccgatggtaaaacagttaagttttcttccctgcctgctggctctttgattggtactctgtccattaagacccagcctgacagtggtaaagctactgctgagattagtggtaatgtactgacagttaaacctgtagccgcagtacccggcaaagccttctatgttgaagtagattcagtagaagaaggtgtacgtatcattgatatactagccaactatgacctattccagtatgagaacaatatcaaaggtgattactgcaatgtctctggtttacagatgtatgatgaacatatcactgatgatgaaatggaagagatgggtctgactgaccgttgggtagactggtactatgaagatgaccagagcttttttgataacccgaaagagtatttgaataatctcaagaatttaacgagctgctatgaccgagttgaaccaggtaatgtaggtattatcgttaatcgtctcggtgaagataaaggtgtggaaaatgaggttaaaggcgtaggccgttactggctcacttggaatgaagaactttatacattcccgacctttaagcagatgaagacctatgacggtctgttctacttccaactgtctgatggtactcagataggccaccagatggctatcagctataaagtgaaccctactaaggtaactaatatcttccagacgtatcgtaagggagttaatgaaattaccgagcaggatttacgacaacgtattgctgatgtacttaacagacagggtaacctgattaacactgatacctttattgatggtggtaaatctaagctactggatagtgtcactgacacaatccgtaaagagatggaaccagtggggattgatattattgctatctcctggattggtgctcctgaataccctgataacgttaaacgtgccattaatgccaaagtagaagctactcagaaaactctgcaacgtgagcaagagattcagcaacgtgtggctgaagctaatatggaacgtgaacaagctaagggtgtagcagatgctattcgtttacgtggtgaagcactcaccgagaacccaaatgtaatgcaactggaagccattaataagtggaatggtacattacctaccacaatgattcctggggctactacacctttcgttaatgtgaaataa

SEQ ID NO: 11799 - DNA, 4002 bp, Homo sapiens
  SIMILAR (2)..(370): 981254mologous to Cricetulus griseus alpha-tubulin III,accession number M12329,Smith-Waterman Score=644.
atgttgaactataacgctcctattgacggtcagaaatctagtattgatggtgctaactctgcccagatgcaaaccttcttctggctgaagaaagcaatcatcactgcccgtaaagagcagtacttcatgccactggcctctgtaactaacatgccgaagcattacggtaagaccatcaaggtatatgaatatgttcctctgctggatgaccgtaacatcaatgaccagggtattgatgcaagtggtgctactattgttaacggtaacctgtatggttccagcaaagacatcggtaacattacttccaaactgcctctactgactgaaaacggtggtcgagttaaccgtgttggttttactcgtattgctcgtgaaggttctattcacaagtttggcttcttctatgagttcactcaggaatctattgacttcgattctgatgatggcctgatggaacacctgtcccgtgaactgatgaatggtgctactcagattactgaagctgtactgcaaaaagacctgctggctgctgctggtactgttctgtatgctggtgctgctacttctgatgccaccatcactggtgaaggttctactccgtctatcgtttcttataagaacctgatgcgtcttgaccagattctgacagagaaccgtactcctactcagactaccattatcactggttcccgtatgattgatactaaagtcatcggtgctactcgtgttatgtatgtaccttctgacctggttccagaagtcaaagcaatgaaagacctgttcggtaataaagcctttatcgaaactcagcactatgctgatgcagacattgtgagtaaacagattaaaacggatgagagcagaactcaggaaggacaatactctgcgttgcaacatgcgaataggattcggtctgcgtataactctggtaatttcgagttggcctccgcttacctgaacgactttatgcagttcgcccagcacatgcagaataaggttggagcgttgaatgagcatcttgttacggggaatgcggataagaataagtctgtccactaccaagctcttactgctgacagagaatgggttcgtagccgtaccggattgggggtcaatccctatgacactaagtcggttaaatttgcccagcaagttgctcttgaagcgaaaacggtagcggatattgctaatgccctcgcttcggcttacccggaactgaaggtcagtcatataaaagttactccattggattcacgtcttaacgcccctgctgctgaggtggtcaaggcattccgtcaaggcaatcgagacgttgctttttctcaacagaaagctgactccgtgaatcaggttaaagaaactcctgttacaaaacaggaaccagttacatctactgtacagactaagactcctgttagtgaacctgttaaaacagaacctactactaaagagtctagaccacaggctataaaagaacctgtgagccagtctgaaaaacgggatgttaaccttactaatgaggacaccatcaagcaacctactgaatctgttaaagaaactgaaacttctgcaaaagaaagcacagttacagaagaattaagagaaggtatcgatgctgtttacccctcattggtaggtactgctgattctaaagcagagggtattaagaactatttcaaattgtcctttaccttaccggaagaacagaaatcccgtactgttggttcagaagcacctctaaaagaggtagctcaagctctgtcttctcgtgctcgttatgaactctttactgagaaagaagttgctaatcctgcttttaatggggaagttattaagcgatataaagaactcatggaacatggggaaggtattgctgatattcttcgttcccgtctggctaagttccttaacactaaggatgttggtaaacgttttgctcagggtacagaagccaaccgttgggtaggcggtaagttacttaacatcgttgaacaggatggggatacctttaagtacaatgagcaattgctacagactgctgtattagtgggtcttcagtggagacttactgctaccagcaatactgctatcaaagatgcaaaagatgttgctgctattactggtattgaccaagccctgctgccagaaggtttagtagagcaatttgatactggtatgacactcactgaagcagttagttccctggctcagaaaattgagtcttactggggattatctcgtaatccaaatgctccattgggttataccaaaggtatccctacagcaatggctgctgaaattctggctgcatttgtagagtctactgatgttgtagagaacatcgtggatatgtcagaaattgacccagataataagaagacgattggtctgtacaccattactgaactggattccttcgacccaattaatagcttccctactgctattgaagaagctgttttagtaaatcctacagagaagatgttctttggtgatgacattcctcctgtagctaatactcagcttcgtaaccctgctgttcgtaatactccagaacagaaggctgcattgaaagcagaacaggctacagagttctatgtacacactccaatggttcaattctatgagacgttaggtaaagaccgtattctcgaactgatgggtgctggtactctgaataaagagttacttaatgataatcatgctaaatctctggaaggtaagaaccgttcagtagaggactcttacaaccaactgttctccgtcattgagcaggtaagagcacagagtgaagacatctctactgtgcctattcactatgcatacaatatgacccgtgttggtcgtatgcagatgttaggtaaatacaatcctcaatcagccaaactggttcgtgaggctatcctacctactaaagctactttggatttatcgaaccagaacaatgaagacttctctgcattccagttaggtctggctcaggcattggacattaaagtccatactatgactcgtgaggttatgtctgacgagttgactaaattactggaagacagtcttctttctctgatggatttgttcctaccggatattaatcttggtgagaatggtgctttagaacttaaacgtggtattgctaagaacccgctgactattaccatctatggttctggtgctcgtggtattgcaggtaagctggttagttctgttactgatgccatctatgagcgtatgtctgatgtgctgaaagctcgtgctaaagacccaaacatctctgctgctatggcaatgtttggtaagcaagctgcttcagaagcacatgctgaagaacttcttgctcgtttcctgaaagatatggaaacactgacttctactgttcctgttaaacgtaaaggtgtactggaactacaatccacaggtgcaggagccaaagggaaaatcaatcctaagacctataccattaagggtgagcaactgaaggcacttcaggaaaatatgctgcacttctttgtagaaccactacgtaatgctattactcagactaggtatcaatggtgtgagcccaaaggtctgaaaggtgttgcagcttcttcccttcgtcaaatcttcaacagaacctttgtgaagctcaacaaggcttcagttaacatgctgaggattgtagagccatacactgcatgggggtacccaattctgaagtcagtaaatgaactaatccataagtgtggttatggcaaaatcagtaagaagcgaattgctttgacagatgaggctttgatggctcaatctctcggtaaatatggcatcatctgcagggaggatctgattcatgagatctataccattggaaaacacttcaaagaagcaaataacttcctgtggcccttcaaattatcttctccacgaggcagaatgaagaaaaagaccacccattttgtagaaggtggagatgctggcaacagggaggaccagatcaacaggcttattagaagaatgaactaa

SEQ ID NO: 11800 - DNA, 12036 bp, Homo sapiens
  SIMILAR (1544)..(714): 831254mologous to Xenopus laevis alpha-tubulin,accession number X07045,Smith-Waterman Score=1139.
atgctgggtaatgccactgccggattgagtaatgcattaggtgattttcgaaactctgcaagacagcaagctggtgatgcaattatggctgaagccatgcgttaccaagaccctaatgagtatcgtaatgccttagcttctggagcattatttgctggctatgacccttctctaatttcttctcgtactatggagaacttagataatcgtgctggcaatctgttagaccaagcatctaaacaacaaaatctggatttcactcgatacagtaatgacagaaccatgaaggtaaatgcagctactgatgctgctgcccctgcattacaggaattagctctggcttatcaatctggtgacccaagaaaggttcaggcagcacaggctcagtatggggatgtattaaaaacccttcctgctggtgttgttatggactacatgaacaaccttcaaggacagggtactgctggtattggtcaacgtcgcagcttattcaacttaggtgttgatatacgtaacgatgcggatactcaggctgctatgcagttactgaataatattcgtcgtggtgcatacagtgctgacgatgctcgtatgcttgcagagggtacgttcgaccaaatgtcaccaggagcagtaagtcgtgcactatctcagttagatagagcatatccaggtgcatatactccgggaactggttctgcatccctatctcctcctggtactcagggtactcggaatggttctgcatatgacactacctataagttcacaccaactgatgtacctattactcagatgaacttaggtgaggtggttcagcatcaagacactatgaagaagacactaggtgcttctcctgttggtgcataccagattaaccaagatactcttaaagactttgctccaaaggtatttggtgaagattggcagaacattcctatgtctccggagaaccaagacaaactgggtgaagctatttttaatgcccgtaagaatggcaatctgaagagtacatgggctgctttaccggatgatactcctggtgcttataagaacttgtcatgggatgaaatgaaggattacattgctcaagcagaaacaggtaattctattaatccattacaggaacaagcattcacttctgttgctggtaatactgttggtactcgtaatatgcagaatattggtaatactctgctgccagaataccaagctgctactgttgacccttctacgactggtcaggtggctaaacgtattattgatagcaatgaactgaaaggcattaaccaaggtgcactggttcgacaaatcaatgaggtagcaaaacagaatgctatttctcccgctatggcaggagcaatcattcaacgtagtatcaccgccgtagaagcaaatgcaaaacttgcaactactggtactgctattgaacagaatgctcgtaatcagcttactgcacaaattcaatcaaacatctatgcagcacagaatacgttagatactgcacttgctgatttacgtgaagtacagcgtcgtattcagaccggtcaggaaaaccttagaagtgtactacctcgctatcaggagcgagttaacactgctaaacgtcttcttgatggtgctcgtagtgctgtagctgctgaccctcagaatttggatattaagagcctacaaaatattaaacaggaagagagcgaggcaaaccggagaagtttaggcagagatgccggacgtcgattggacagcgtaaccaatgcaaagcaagttgacgtctctactgcaaccgcccagaagaaagctgaacaaggtgtcactactcctcttgtttctcctgatgctgcttatcaaatgcaagctgcccgtactggtaatgttggggctaatgcatttgaaccagggacagtgcaatcagatttcatgaatctgactccaatgcaaatcatgaataagtatggggttgagcaaggcttacaacttatcaacgctcgtgctgatgcagggaaccaggtattcaatgattcagttactacaagaactcctggggaagaactgggggatattgctactggtgttggtcttggttttgttaatacccttgggggcattggtgctcttggggcaggcttactcaacgatgatgcaggtgctgttgttgctcaacaattgagtaagtttaatgatgctgtccatgctacccaaagccaagcattacaagataaacgtaagctctttgctgctcgtaacttaatgagtgaagtagagagtgaacgtcagtatcaaacagataagaaagaaggcactaatgacatagtagcttccttatctaaatttggacgtgattttgtaggttcaattgagaacgctgcccaaactgactccattatttctgatgggttagcagaaggggtaggttctctattaggtgctggtcctgtattaaggggtgcatctttactgggtaaagcagttgttccagcaaatactcttcgtagtgctgcattggctggtgctattgatgcaggtactggtactcagtccctggctcgtattgcttctactgtaggcagagctgcaccaggtatagttggtgttggtgcaatggaagctggtggtgcataccaacaaactgctgatgaaattatgaagatgagtcttaaagacttagagaagtctcctgtttatcaacaacatattaaagatggtatgtctccagaacaggctcgtcgtcagactgcatctgaaactggtcttactgctgctgctattcaattacctattgctgctgcaactggtcctctggtatctcgttttgagatggctcctttccgtgctggttctttaggtgctgtaggtatgaaccttgcccgtgaaacagtggaagaaggtgttcagggtgctacaggccaactggctcagaatattgcacagcaacaaaacattgataagaaccaagacctgcttaaaggtgtcggtacacaagctggtttaggtgctctttatggctttggttctgctggtgttgtacaggctccggctggtgctgctcgtttagcaggtgctgcaactgctcctgtattgcgtaccacaatggctggtgttaaagctgctggtagtgtagcaggtaaggttgtttcccctattaagaacactttggtagctcgtggtgagcgggttatgaagcagaatgaagaagcatctcctgttgctgatgactatgttgcacaggcagcacaagaagctatggctcaagcaccagaagcagaagttactattcgtgatgctgttgaagcaactgatgctactccggaacagaaagttgcagcacaccagtatgtttctgacttaatgaatgctactcgttttaatcctgaaaattatcaggaagcaccagagcatattcgtaatgctgtagctggttctactgaccaagtacaggttattcaaaagttagcagacctagttaacacattagatgaatctaatcctcaagcactgatggaagctgcatcttatatgtatgatgctgtttcagagtttgagcaattcattaaccgtgaccctgctgcactggatagtattcctaaagattctccggctattgagttactcaatcgttatacaaatctgacagctaatattcagaacacaccaaaagtaattggtgcactgaatgttattaatcgaatgattaatgaatctgcccagaatggttctttggatgtgactgaagaatccagtccacaggaaatgcagaacgtagcattagctgctgaagtagctcctgaaaagctcaatccagaatctgtaaatgttgttcttaaacatgctgctgatggtcgtattaaactgaataatcgccaaattgctgcccttcagaatgctgctgcaatcctgaagggggcacgggaatatgatgcagaagctgcccgtcttggattacgtcctcaagacattgtgagtaaacagattaaaacggatgagagcagaactcaggaaggacaatactctgcgttgcaacatgcgaataggattcggtctgcgtataactctggtaatttcgagttggcctccgcttacctgaacgactttatgcagttcgcccagcacatgcagaataaggttggagcgttgaatgagcatcttgttacggggaatgcggataagaataagtctgtccactaccaagctcttactgctgacagagaatgggttcgtagccgtaccggattgggggtcaatccctatgacactaagtcggttaaatttgcccagcaagttgctcttgaagcgaaaacggtagcggatattgctaatgccctcgcttcggcttacccggaactgaaggtcagtcatataaaagttactccattggattcacgtcttaacgcccctgctgctgaggtggtcaaggcattccgtcaaggcaatcgagacgttgctttttctcaacagaaagctgactccgtgaatcaggttaaagaaactcctgttacaaaacaggaaccagttacatctactgtacagactaagactcctgttagtgaacctgttaaaacagaacctactactaaagagtctagaccacaggctataaaagaacctgtgagccagtctgaaaaacgggatgttaaccttactaatgaggacaccatcaagcaacctactgaatctgttaaagaaactgaaacttctgcaaaagaaagcacagttacagaagaattaagagaaggtatcgatgctgtttacccctcattggtaggtactgctgattctaaagcagagggtattaagaactatttcaaattgtcctttaccttaccggaagaacagaaatcccgtactgttggttcagaagcacctctaaaagaggtagctcaagctctgtcttctcgtgctcgttatgaactctttactgagaaagaagttgctaatcctgcttttaatggggaagttattaagcgatataaagaactcatggaacatggggaaggtattgctgatattcttcgttcccgtctggctaagttccttaacactaaggatgttggtaaacgttttgctcagggtacagaagccaaccgttgggtaggcggtaagttacttaacatcgttgaacaggatggggatacctttaagtacaatgagcaattgctacagactgctgtattagcgggtcttcagtggagacttactgctaccagcaatactgctatcaaagatgcaaaagatgttgctgctattactggtattgaccaagccctgctgccagaagcaatggctgctgaaattctggctgcatttgtagagtctactgatgttgtagagaacatcgtggatatgtcagaaattgacccagataataagaagacgattggtctgtacaccattactgaactggattccttcgacccaattaatagcttccctactgctattgaagaagctgttttagtaaatcctacagagaagatgttctttggtgatgacattcctcctgtagctaatactcagcttcgtaaccctgctgttcgtaatactccagaacagaaggctgcattgaaagcagaacaggctacagagttctatgtacacactccaatggttcaattctatgagacgttaggtaaagaccgtattctcgaactgatgggtgctggtactctgaataaagagttacttaatgataatcatgctaaatctctggaaggtaagaaccgttcagtagaggactcttacaaccaactgttctccgtcattgagcaggtaagagcacagagtgaagacatctctactgtgcctattcactatgcatacaatatgacccgtgttggtcgtatgcagatgttaggtaaatacaatcctcaatcagccaaactggttcgtgaggctatcctacctactaaagctactttggatttatcgaaccagaacaatgaagacttctctgcattccagttaggtctggctcaggcattggacattaaagtccatactatgactcgtgaggttatgtctgacgagttgactaaattactggaaggtaatctgaaaccagccattgatatgatggttgagtttaataccactggttccttaccagaaaatgcagttgatgttctgaatacagcattaggagataggaagtcattcgtagcattgatggctcttatggagtattcccgttacttagtagcagaggataaatctgcatttgtaaccccactgtatgtagaagcagatggtgttactaatggtccaatcaatgccatgatgctaatgacaggtggcctgtttactcctgactggattcgtaatattgccaaagggggcttgttcattggttctccaaataagaccatgaatgagcatcgttctactgctgacaataatgatttatatcaagcatccactaatgctttgatggaatcgttgggtaagttacgtagtaactatgcttctaatatgcctattcagtcccagatagacagtcttctttctctgatggatttgttcctaccggatattaatcttggtgagaatggtgctttagaacttaaacgtggtattgctaagaacccgctgactattaccatctatggttctggtgctcgtggtattgcaggtaagctggttagttctgttactgatgccatctatgagcgtatgtctgatgtgctgaaagctcgtgctaaagacccaaacatctctgctgctatggcaatgtttggtaagcaagctgcttcagaagcacatgctgaagaacttcttgctcgtttcctgaaagatatggaaacactgacttctactgttcctgttaaacgtaaaggtgtactggaactacaatccacaggtgcaggagccaaagggaaaatcaatcctaagacctataccattaagggtgagcaactgaaggcacttcaggaaaatatgctgcacttctttgtagaaccactacgtaatggtattactcagactgtaggtgaaagtctggtgtactccactgaacaattacagaaagctactcagattcaatctgtagtgctggaagatatgttcaaacagcgagtacaggagaagctgacagagaaggctaaagacccgacatggaagaaaggcgatttccttactcagaaagaactgaatgatattcaggcttctctgaataacttagctcctatgattgagacaggttctcagactttctacattgctggctcagaaaatgcagaagtagcaaatcaggtattagctactaaccttgatgaccgtatgcgtgtaccaatgagtatctatgccccagcacaggctggtgtagcaggtattccatttatgactattggtactggtgatggcatgatgatgcaaactctttccactatgaaaggtgcaccaaagaataccctcaaaatctttgatggtatgaacattggtttgaatgacatcactgatgctagtcgtaaggctaatgaagctgtttacacttcttggcagggtaaccctattaagaatgtttacgaatcatatgctaagttcatgaagaatgtagatttcagcaagttgtcccctgaagcattggaagcaattggtaaatctgctctggaatatgaccaacgtgagaatgctactgtagatgatattgctaatgctgcatctttgattgaacgtaacttacgtaatattgcactgggtgtagatattcgccataaggtactggataaggtaaatctgtccattgaccagatggctgctgtaggtgctccttatcagaacaacggtaagattgaccttagcaatatgactcctgaacaacaggctgatgaactgaatatacttttccgtgaagagttagaagcccgtaaacaaaaagtcgctaaggctaaggctgaagtcaaagaagaaattgtttctgaaaaagaaccagtgaatccagactttggtatggtaggccgtgagcataaggcatccggtgttcgtatcctgtctgctactgctattcgtaacctggctaagattagtaatctgccatctactcaggcagctactcttgcagagattcagaaatcactggcagctaaagactataagattatctacggtacacctactcaggttgcagaatatgctcgtcagaagaatgttactgaattgacttctcaggaaatggaagaagctcaggcaggtaatatttatggctggactaacttcgacgataagaccatttatctggttagcccatctatggaaaccctcattcatgaactggttcatgcttctaccttcgaggaagtttattccttctatcagggtaatgaagtaagccctacttctaagcaggctattgagaaccttgaaggtctgatggaacagttccgttctctggatatttccaaagattctccagaaatgagagaagcatatgctgatgctattgcaactattgaaggtcatttgagtaatggctttgttgacccagctatttctaaagctgctgctcttaatgagtttatggcttgggggttagctaaccgtgctctggctgctaaacagaagagaacatcttcactggttcaaatggtgaaagatgtttatcaggccattaagaaattgatttggggacgtaaacaagctcctgcattgggagaagatatgttctctaatctgctgtttaattctgcaattctgatgcgtagccaacctacaactcaggcagtagctaaagatggcacactgttccatagcaaagcatatggtaacaatgaacgtctgtctcagttgaatcagaccttcgataaactggtaactgattaccttcgtactgacccagttacagaagtagaacgtcgtggcaatgtggctaatgcattaatgagtgctactcgactagttcgtgatgttcagtctcgtggcttcaatatgactgctcaggaacaatctgtattccagatggttactgctgcattagcaactgaagctgcaattgacccacacgctatggctcgtgctcaggaactttatacccatgtaatgaaacaccttacggtagaacatttcatggctgaccctgatagtactaaccctgctgaccgttactacgctcaacagaaatatgacactatctctggtgctaatctggttgaagtagatgccaaaggcagaaccagtctgttacctacattcctgggtctggctatggttaatgaagaactacgttcaatcattaaagaaatgcctgtacctaaagcagataagaaattagggaatgatgtagatactctgcttaccaatgcaggcactcagaaagctactaatgttcaggacagtattgatgctctgtcagaaacaatcatggctgctgctctgaaacgagagtccttctatgatgctgtagcaacccctaccggtaatttcattgaccgtgctaatcagtacgtaacagatagcattgaacggttatctgaaactgttattgagaaggcagataaggtaattgctaatccttctaatgtagctgctaaaggtgttgctcatctggctagactgactgctgctattgcatctgacaaacaaggtgagatagtggctcagggtgttatgactgctatgaaccagggtaaagtatggcatcctttccatgacttagttaatgacattgttggccgtactaagactaatgccaatgtctatgacttaatcaaattggttaagagccagatttctcaagaccgtcaacaattccgtgagcatttacctacagtcattgctggtaagttttcccgtaaactgactgataccgagtggtctgcaatgcatactggtttaggtaaaacagatttagctgttctacgtgaaactatgagcatggctgaaattagagatttactctcttcacctaagaaagtgaaagatgaaatctctactctggaaaaagagattcagaaccaagcaggtagaaactggaatctggttcagaagaaatctaagcaactggctcaatacatgattacaggggaggtaggtaataacctccttcgtaatgcccatgctattagtcgtttattaggtgaacgtattactaatggtcctgtggcagatgtagctgctattgataagctcattactttgtactctctggaattgatgaataagtctgaccgtggccttttgtcagaattggctcaatcagaagtggagggtatggagttctccattgcttatatggtgggtcaacgtactgaagagatgcgtaaagctaaaggtgataaccgtactttgctgaatcactttaagggctatatccctgtagagaaccagcaaggtgtgaatttgattattgctgacgataaagagtttgctaagttaaatagccaatcttttactcgtattggtacttatcagggaagcactggtttacgtactggttctaaaggttattacttcagcccagtagctgcccgtgccccatactctcaaggtattcttcagaacgttcgtaatactgctggtggtgtggatattggtacaggctttacgttaggtactatggttgctggtcgtattactgacaaaccaaccgtagagcgtattaccaaagctctggctaaaggtgaacgtggacgtgaaccgctgatgccaatttataacagcaaaggtcaggtagttgcttatgagcaatccgtcgaccctaatatgttgaagcatctaaaccaagacaatcactttgctaagatggtgggtgtatggcgtggtcgtcaggtggaagaggctaaagcacaacgttttaatgacattctcattgagcaattacatgctatgtatgagaaagacattaaagactccagtgctaataaatctcaatatgtaaacctgttaggtaaaattgatgacccagtactggctgatgcaattaacctgatgaacattgagactcgccataaggccgaagaactctttggtaaagatgagttatgggttcgtagggatatgctgaatgatgcacttggctatcgtgctgcatctattggtgatgtatggactggtaactctcgttggtcacctagcacccttgatactgttaagaagatgttcctcggtgcatttggtaataaggcatatcatgtagtaatgaatgctgaaaataccattcagaacttggtgaaggatgctaagacagtaattgttgttaaatctgttgtagtaccggcagttaacttccttgctaacatctaccagatgattggacgtggtgttcctgttaaggatattgctgtgaatattcctcgtaagacgtcagagattaatcagtacattaaatctcgcttacgtcagattgatgcagaagcagaattacgtgctgctgaaggcaatcctaatctggttcgtaaacttaaaaccgagattcaatctattactgatagccatcgtcgtatgagcatctggcctttgattgaagcaggtgagttctcttctattgctgatgctggtattagtcgtgatgacctgttagtagctgaaggtaagattcatgagtacatggaaaaacttgctaataaacttccagaaaaagtacgtaatgctggccgttatgctcttattgctaaggacactgctctgttccagggtatccagaaaacagtagagtattcggacttcattgctaaagccatcatctatgatgatttagtgaaacgtaagaagaaatcctcttctgaagcattaggtcaagtaactgaagagtttgttaactatgacagattgcctggtcgtttccgtggttatatggaaagcatgggtctgatgtggttctacaactttaagattcgttccattaaagttgctatgagcatgattagaaacaacccagtacattctctgattgctacagtagtacctgctcctgccatgtttggtaatgtaggtctgccaattcaggacaacatgttaaccatgctggctgaaggaagactggattattcattaggcttcggacaaggactaagagcaccaaccctcaatccttggttcaaccttacccactaa

SEQ ID NO: 11801 - DNA, 16395 bp, Homo sapiens
  SIMILAR (597)..(4277): 1001254mologous to Homo sapiens bcr polypeptide,accession number Y00661,Smith-Waterman Score=6357.
atggataagaactttgatgacttattccgtctggttcaggaataccaaccacaacaagttggtgtagaaactactggacagcaaggtggttttatttctcttcttcagaaggaaatgcttaaccgtaatgtgttctttaactttgcatccagtcgtggaggccaaccgggtattcatcctgtaaccagtaagctatcaaggtttaacctcgtggttccctggttcaaagctggtaagatgtattttcctgctgaaatgaaagatagcccaatcatgacactctttatggggcaaattcgtttagccactatcaatggtcttaaaggtaaggatgactgtattgataccatttcaatgcttggctacctgaacccgtggaaaccacaagcaggtatcgttacagatgacaaaggtgacattgaagatgatagtaagcctttcattatcgtagctgctaatgaggcactgactcgtctgcatggtcgcttcaacatgcgtaacaacaacgtggttgttgagatgcaagaaggtagaaccaactacccattactagctaagtatgctgttcagtcttatgacccaaatgaagtgaagtgtcccttcattatggacttagcaggtgagaagtttgctgaggatgttattcgtattctggaagtgtatgacgataagggtcgtagacgtccgttgaatgaccgaaataatcctcacagtttgttcaccccaaggccaaacgttctacagaacaatgctccaaaagcatgggaagtattgaacgtaatgtatcaggctaaacatcctaaactgtctacagcagaggatggctataatgagatagacattcctgatacccttgacccagctttggatgcctacattgcttaccgttattacacttctctgaataccccagagagttcagcaaaggcagcagagtatctgtccttttatgacagcatctgttattgctgcgaaacacttaatgacccaatcgttgataagatgattggtaatgcttactacgttgttaagttcgtagcattacgaatgacctttattaaaaatgtcagtgataatatgactcagctacttgctatccataacaagttaactgagctatctgctatctacactaagctagatgaactacaacttattcataataatctggataagttacaggaactctacaatcaattatctaaactgactggtctatatgacaatcttcaggcattgctgagggtctatgacaacctgactccaatcaatactgtagcttctaacattgacgcagttaatacagtagcaactgatattgctaaagtaattattgtttctgctcaaattgataaagtaattactgttgctaatagcattaccaacgtgaataccgttgctggttccattgatgctgttaatacagtaagtactaatatcaatgcgattaagaatgtgaataccaatatggcagcactgcttgatttggataatcacatgactgaactattagctgtacatgccagattaggtgacttagttaccattgcagagcagctagacacaatcattgctgaccatgaaaagtatgctactgctgaaggtgcaggtctgattggctttaatcaggcacagacttatgcagctaatacagtaggtgcaatgctccgtcaggttattactatggataatgacaaaggtggttatgctgtagcaggtaaactgacctctactggtggagtatggtcgttagctactggttccatcaacatgaatgcccctactgctggtgcagtagctaacctggttcttaattataaagccggtaaagttagtggtttgttggtagcacctagtcaacaaatggcattggatggcctgattatgggtgcatctactactgacaatacagctactgtatctgttactgccccactccgttttaaagcagacctaactgctaaagcaatctccggtgtgaatacccgtatcatgccttccagtgcagtgactctgaatgtagatgcatatggtggcatcactcttggatatccacctagccttcagactgtagaaccagtgatgactttcattacccctacaggcaaggctccactgaccccacgattctccagtgttacggcaggggctgctgtactggttatggttggtgaagcagaagcacaactgaaatattcaggtggtggttgggctgctgtatctgattgggattcgggtacttattgtgcattcgatacagtatctggtgagttaacggtatatcacagtactcttatcaaagattctactgttacatttagcttactgttacctaccgatggtactcagcttacggcacaactgaagagtcatactgatagttccttcgtattgaagattgctaaaccagatggttctttacttgatgccccattggaaggtatgggtatcatgtactctcgtggtatgcacggaatctataaagtaccttatggttctctaatcgtagatgtcggtcgtgttcaggttaaattcagtgaatttaacaccacggaaggccgggaaaccggccttattactggagcagttatgtccattgaagattacctcaaaggcaagaattgcctagcttctcctaattatgacccggatgaccagcactcttcttggagagaagacctccctcaatttaagaaagacagggaacatctgacgttggtcaacactcgtcgtaatcggacttataacactaaactaaatcgtttcgaccctgagtattgggtagttgattacaatgccttaatggtagccaccatcattccgtatggttctaagtcttttaaagttccttgtcagtggcgtactaacaaagacttcttaggtgtccgttggatgacggaggatacctttgaccatcatctgtatcgttatgaaacagaccctaattacttaggtctgattctggcttttcgtcataaccctgatgaaccagataaattcacagttactattcagactcctgaaaaagcatatacgtatcgtctggctccatatggattcaataataaaacccgtcgatgggagtgtttggatacaaagtatggaaccaagagaacgtatcaggctgacatctttgtagctactgatgaagatattcctgaatctgaaatgacagaagtctatggcactaaggactatatcttcattctggactttgctgatttacgtacaggtgtggcatttaatggggtaactattaaccctcgtaatatcacaatgatttctttcgactgtactgaagcacatcatggtctagggaaagatgcttacattgccgccatgtataacaatgacgatggtgctactttccagatggaaattgggggtattcatactaatgctgctttagctgctggggataaactccaatgcatctggagatacttggatgttaatggtaatgctccagcagcagagaatgagttcgaagtaacagatggtcctattaaacaagtagactctgttaaatggtttactaaccttactgtatctggttccggtcgtaagcaactgggtcaacgtaaatatccacaagtagtgatgggtatgggcatgacttcaggctttgatgatggctataaccttactcctgagcgtcaggataaagaaacgggtgagttaatcacagaacagactgtattagattacccaattctatttgctggtgaatctcaggttgctattcacttcatgtctggtgcataccctgaccgtggctatgatgtattccagaagtacatgactgaaacttggggcattaactatgcaggtgtacgccctattaatgggacaactggttctactgctgtagaccgtgcatgtgcagttaatcctgattctgaagtatttgaccctacccaatcatccgatgcaggtggtctttggtggtgggatttagaagcagataaacccggtcctgcattactatattgtgtagagcaagtaggtaagctcaagcctaaagctattatttgggggcaaggtgaccaagatgccactgctttggcatatccaggtgaccgtgacccagcaccatcattaaccagaaccaagcaagctactaagaaggtatttgagtatcttcgtagtttgtatggacagattcctatcttcattcaggaactgagctatgcatggggcatcactaacactgatgaacctaatgtacctattcgtacaggattaccttctttcctggcagcccgtcgtaatacatggggagatattgagttccgttggaagtcttacggattagaccctgcattagctcaatatcgtattgaaatctataacccttctaatttgaaccagatacttcactcatttgtagtatcaggtactcaagaagcaaatggttatgtatatgctgacttcactgtagaagactggattcctgtaatgatggaagcggttggttctcctaatccgtgggagttcatgaagtggcgagtagtttgtctgtatcaggaaagagaaattccttcagcaccttggtcagataacattcctttggataatgcagggcttgttaagaagaccattctggtaggtattaaccagtttggtggtggacactttactgatatgtctgacccaactgctaccacagctaatggtgcaattggtcgtaaagacaaggtatctgcttctacgttacgtctgacttttgcagagaaagctggattacgtcctattcaggtaatgcctattaacgtagctgctgatagtgcaggtatgacggtaggtactcacaaatggtggaatacttccagtaattccccaggtgatgcactactggctattaacgatatggttaaaggtttgggtgttaaacctgattacttcattgaagctaatccgtgggaaaccatgtatatgaaggatgttaattcttctacatggcctgctttaatgactgcttttgaatcgtctaacaaagcaatgcttgcatggatgagaaccaactggggcaaccctaatctggagatttggttccagggggctactactgtttggtttggtgttgctccacctaatgaccttaactctgaagctactgttactgtacgtgataaacagattcagatggctacagctaatataggctttaaactgggttcctttgttcctggttctaacctgtacactgcgtaccgtaatgtggaatccagttggatttactacacggtagaagcattccatgccacagccattgagctaggtgaagcactggctcttaatgttaaccgtgctactaatccacctgattggtcttacttgcgcccaccagcaaatctgcaaggtcgtaagttagctactcgtgatattaagatgacatgggataaccgtgctgggattacccactggaagtatgctaaccgtcatgtcaccacaggggcagaaatctcttctggtatcctcaccagtcccgagtatgtgtttaccctgaatgaccagcaaaatgcttataacggggacactcttaatatgagtttctctgtttctgagtatgctgctgattctggtgcagtaggtgcatcttcttcctttgtaggggtagtccagaatggttcctatatgcagactcctactcaactgaaagctgctaaacagcttaatggtgacattatcttcacttgggtaggacgtccttcatggcaacacttctgggtagtgaataccagtgttaatgattctaagactgttatcttctctaaagaatggtctagtgaatctctaacatggactgttgcagaacagaacgagttctacggcctggaagaaggtggtgctactcatgtcatcttcatggtatctgagtatgacccaagtaacggattagtatctattggtgctcaagttactggtcaaacagagcagccatctaatccaatgaatcctgttgctggattgtatgcagtgttcaccggtgacccaggtaactctaatattaagattatgtgggataaaccttctgttggtggacgtgatgttcgtattcgaaatatgcatgtaacgtccagtgcaactattagtgaccagtttgtatctgataacaatcttgtgttcacacgagaagaacaggtagctgcttatggctttactgcttcaagcgtatctgttcgtgctcaagaacatgatattgaatcaggtgcattgggtcttactactgagtatgttgctgtaccggaaacagcaggaacagttggacagggctttgctaagaaagactctgtaggtaactgtactatgtcatgggaagtaggtgatgctgtccaatggcaggttgagattatcaatgctgagaactctactgttgttaaaacagagattgttgtagcacctacaatcacttggacggctgaagaaattacagccgagtatggttacctgactgaccatatggtttggcgagtaagaccttatcgtgcagatggggcatctaacattagggagattcaattacagcttattaatgagatgactgatgttcatatgggggcattgacggcacagtacatgccggatgactttaccttcgaaccaggaataggacagattcatttcaatgttgagacttccagaaaggtttgtttagaccttgctaagtctgttcttagactggttcctgtttatccattacctactaacaaagatgctctggattttgtaagtaaagcccaatgtcagattttgaaagaatgccagaacttgggaatggagctgtacttccagattggtgagccttggtggtgggatggttcatacaatacaggtgagggtaagaatgccccttgtatttatgaccctaagactatggctttatacaaagaagagacaggtaatgatgtacctactccatggattaaagacatctttgctccagtagaagaacatcagtggccttatgtagattggctatgcaccaaactgggtcaatccactaactacatacgtgactatgtaaaaggtaagttccctgatgcacaggcaacccttctgttctttacaccacagattatgtcccctgcatctgaactaacaggtcgattaaacttccctgagtcagagtgggtattccctaactatgactttgttcagattgaagactatgattggattattgatggaagacttgacctggttccactgacatttgatgctgccgtgaatagactagggtatccattgaatgtagttcactacttcataggattcgtactgttacctgaagatgctaagaaaatctgggctgatgttgataaggcgtggggattggcactagaggcaggatttagcatgagtcatgaatccgtagaggtgctcctagctcgaatggaggaacgtatgaagacactcttcgaaaataatgcccgtgatgctaaatctcggcaagatttagatgatgctgtacgtaaccttcaactgtctattaataagatggacactcgactggagaatgtagaaaagtctctggctgagtctgtccctactattgaagagttcattaccatcaaacacaaagttgttggtgctggattgtttggtaaatgggtatgggctggatcaggtatcattattggtatactggctgctgccagacgggagatttttgcatggaggattggtgtggcaataagtaagaagaaggttggcggtgttggaggggttattgcagcaatcattgctgctgtatttgctgttgagggtggatacgttaatgaccccaaagacccaggaggtgaaactaatcatggtgtaactattcaggttgctcaaaagcataagcaagaactagagtcgatgtataactgggatggttcaatgaagaacttaactcaggaaatggcatcaagtatttattacaacgattacatcttgaagcctggctttgttaagtttgcagatgtatcaccagcggtaacagaaaaactagtagatgctggtgttaatactggacctgcaagaccatctcgttggttacaagaatctcttaatgctttctccagaaatggcaaagactaccctaaaatacaagttgatggtaaagtcggttctggaactctaagtgcatataaaagccttcagaataaacgaggcaaagtagaagcctgtaagctcattttgaagtctctagatggtaaacagttaaactactatttatctcttaatatgcctgagtacactacaggatggattgctaatcgtattggtaatgtccctctggagaggggtagctctgggagctacctttttcttcttggttcacaacatggtgaaaagaaagttcaagcactatgggatgaagataagaaggagtactcaaaagaacttgatagagtaaaactggcttatgaccaaaagaatcgggaacacagttatgaagtcgggcaacttacccttcgacttgataaagccaaagagtcttatgaagtcgttattgattctattactaaccagtacaatagtcggttgctccagtcagaaaaacgagccgagagttataaacgtcaagcctcaaccggaaccactcaatgcctcaatcttgcaagccatgcagccagactcgactcaagtcttgaagaaggcagacgtttggttgaagaactcagggcaactgttagactccgtgataaccaactgattgaactggggaaccagattcgttctgaccgaattactatggaacaaaacactgattctatggttccattgccagacccaagccaagctactaagttaactagctggaagaatgaaccttccttgcaagcacttaaagcagacttggatgcagcaaagccatctcatactgccatgatgattaaggtcaaagaatggaatgaccttatgcgtattgaaggcaaagccaagccacctaaagtcaaaggacgttcacaggtacagcctaaacttgtacgtcgtcaagctgaatggcgttattctgctttaactgaacctttccttggttctaataagttattcaaagttactcctgtaacttgggaagatgtacaaggtgcacgccagaatgaactggttcttaactaccaattccgtaccaaactaaatcgtgtaagtttcattgataactatgttcgttcagttgttgatgatggtactggtattgttcgtgttggttggaacagggaaattcgtaaagagaagcaagaagttcctgtatttagtttgttccctattcaaacacaagaacaagctgatgctttacaacaggctctacaacttcgtacagataaccctcgcggttatgaagagaatgtagatgaagctattaaggaatcagtacgtttctttgatgaaacgggacaagcaacgtatgcagtacaaactgggacaactacaactgaagttgaagttcctttagcaaaccatcctacggtggaaatgctaaacccagagaacattattatcgacccttcatgtcagggtgatattaataaggcaatgtttgccattgtctcttttgaaacttgtaaggcagacctgcttaaagagaaagaccgttatcacaatctaaataagattgattggcaaagctctgctcccgttaatgaaccagaccatgcaaccactactcctcaagaatttcagattagtgaccctatgcgtaagcgtgtagttgcttatgaatattggggattctgggatattgaagggaatggtgtattagagcctatcgttgctacttggattggttctacccttattcgtttagagaagaatccttatcctgacggcaaactcccatttgtattaattccgtatatgcctgttaaacgggatatgtatggcgaaccagatgcagagttattaggtgataaccaagcagtacttggtgctgtaatgcgtgggatgattgacttacttggacgtagtgccaatggtcaacgtggtatgcctaaaggtatgcttgatgccctgaatagtcgtcgttacagggaaggtgaggattatgaatacaatcctacacaaaaccctgctcaaatgattattgagcataagttccctgaattgccacaatcagcactgactatggctactcttcagaaccaggaagcagaatctcttactggtgttaaagcatttgctggtggggtaactggtgagtcttatggtgatgtagctgctggtattcgtggtgtattagatgctgcttctaaacgtgagatggctatccttcgtcgtttagctaaaggcatgtctgaaattggtaataagattattgctatgaatgctgtgttcttggcagagcatgaagtagtacgtattaccaatgaagaatttgtcactattaaacgtgaagacctgaaaggtaactttgaccttgaagtagatatttctactgctgaagtagacaaccaaaagtcccaagacttaggctttatgcttcagactattggtccaaacgtagaccagcaaatcactttgaatattcttgcagagattgctgacttgaaacgtatgcctaaactggctcatgatttacgtacatggcaacctcaaccagacccagtacaggaacaactcaaacaattggctgttgagaaagcacagcttgagaatgaagagttacgttctaaaattcgtcttaatgatgcacaagctcaaaaagctatggcagaacgagacaataagaatctggattatctggaacaagaatctggcactaaacatgctcgtgaccttgagaagatgaaagctcaatcacaaggtaatcagcaattagaaattactaaagcattaaccaagccacgtaaggaaggagaacttccccctaacttatctgctgcaattgggtataatgcattgactaatggggaggatacaggtattcaatctgtatctgaacgggatatagctgctgaagccaaccctgcttattcacttggttccagtcagtttgacccaacccgtgacccagctcttaacccaggaattagattagactgtgctcgttatgtacaagaatcctgtgacccattgcttgaagaccgtcaacgtgctgatgctcttgctatggctcaagctgctggttgtttaaaacgttatctggaaattactcttcagaaagcagaaacactggtaggtgtccaatcagatattgagaatgcattggatgttgctcgtgatacccccatgactacggaagctgcaaaaacagcttccgacatttttaaaatgtcggatgaagagattctgaacatgcctggtccatcaagcattcagaacaacccggaaccggtagaaaataatactcctgcacaaccagacccaattgttgaagttgaacaaactgatgaaccagaagtaactactgaaccaactgaagtagaaaatacttctgaatcagaaagcaattcagatgcattcacaactggtaatgatagtgctacagttgacccaaataaggttgacagcaacagtaagcctgctactgataatgcaccttctactactgagcaaggccaagcaaaagtagtagaagacaagcaggtatcagaccagaaaactgacttcgactataaggctggttatgaacggataatggctccgtttaaagctaacggcaaaatgattactcctcagagtcctgaagaggtcattagcttgatgcaaatgggagctaactatacccgtaaaatgcaggagattcagccgtatcgtaagtatctcctgatgttagaaaacaacggattattagatgaagggcaactctcttatgctatcgatttagttaaagggaatcctgatgctattaagaagttggttaaagaatctggtattgatgttctggatattaatccagaagaggaagttaaataccaagctggtaatcaccgtgtgtcagatgctgaagcagcatttgcaaccgaactggaagatgctaaatccactccagaaggacaagctactcttcagttaatttcgactacgtgggatgaccacagcaaacaggcattgctggaaaatcgtggtctggttaataccatcgttgaacagaaagctaacggtatttacgaccgtattgtttctgaaattgaacgactcaaaatcttaggccaaatcccaatcggtacagcattcctggatgcttataatcaagtcggtaactaccttgctgctaatggtggttttaatgatttgattaagcagaaacctgttgaacaacctgaaccagtggttcagccagtagcaactcgtgttgcaacacctaagtctgaaatcactaatactcaacaggcagcagcggcatccccatcacgggttacaccgcgtaagacagaaaaatctagtattgatggtgctaactctgaccagatgcaaaccttcttctggctgaagaaagcaatcatcactgcccgtaaagagcagtacttcatgccactggcctctgtaactaacatgccgaagcattacggtaagaccatcaaggtatatgaatatgttcctctgctggatgaccgtaacatcaatgaccagggtattgatgcaagtggtgctactattgttaacggtaacctgtatggttccagcaaagacatcggtaacattacttccaaactgcctctactgactgaaaacggtggtcgagttaaccgtgttggttttactcgtattgctcgtgaaggttctattcacaagtttggcttcttctatgagttcactcaggaatctattgacttcgattctgatgatggcctgatggaacacctgtcccgtgaactgatgaatggtgctactcagattactgaagctgtactgcaaaaagacctgctggctgctgctggtactgttctgtatgctggtgctgctacttctgatgccaccatcactggtgaaggttctactccgtctatcgtttcttataagaacctgatgcgtcttgaccagattctgacagagaaccgtactcctactcagactaccattatcactggttcccgtatgattgatactaaagtcatcggtgctactcgtgttatgtatgtaggttctgaactggttccagaactgaaagcaatgaaagacctgttcggtaataaagcctttatcgaaactcagcactatgctgatgcaggtactatcatgaatggtgaagtcggttctattgataagttccgtatcattcagaaatgctgcactggggcaggtgctggtgcacaggctactgtagctaaccctggttaccgtacctctatggtatctggccaagagcactatgacgtttacccaatgctggtagtaggtgatgattcctttacctccattggcttccagactgacggatatatacacatgagcattaacgataaaccgaccgctgatttaactcagggcaacgatgacaccgttgatgaagttaaggttgatgaactttctctgctgaaacaacgagctaatatgatgggtatttcatactcaaataatattagtgctgaaactcttcgtaagaagattgaagcagctcaggaaccagtagaacctcagcctaatcctctggctctgtctacaggtacagtaactacggcaacttctttacgtcaccagcaacgcttagaacaattaaagctggttcgagtacgtattcagaaccttgaccctaagaagaaagacctgcctggtgagattattacagtagctaacgaatatattggtactgttcgtaaattcgttccatttggtgaagctactgatgagggctatcacatcccttactgtatttataacttcctcaaagaacgtaagttcctgaacattcgagttaccaaaggtaagaatggtcagcctaatattacgtctgcatgggtacgtgagtttgccattgaagttctgtctccactgactaaggaagaattacaaactctggctgctgctcagattgctgctggtgaggattttacgcttcctgacatcgacatgtctggcagtgagtatgatattcctggtggcattaatagccctatctatgcagagatagagaagataaccacagaacaactaactactcgtgaggttgggggttctggtgtatttgacgctttaatgcaatcagcaagcaatcatctactggcagaatttaagaataaccgaattactggtggtgattacgttaaggcatacattgctactatggaagcatgtatggctaatgctgtgcaattcctcaccactaaagaccaggcttattggaatgctgttactgctcaggtagctgcaattactgctcgtgctaatcttggtattatcaaagctaactttgttacagctaagattcaggctctggctactaaagctgaatatgcccttactaagctgaagctgtctaatgagtcagtaacttactgtactgctcaatacaatctatcctctatgcttcctcaacaattactgatgttgaagaaccagaccactcaggttgctgaacagactaagttaactactgaacaaatcaatatgacgaaagagcagaaggaagcacaacgtgctcagacttctgatactcgtactgatggtactcgtgtagctggttctgtaggtaaacagaaagaactctatgaccaacagattacgtcttataaacgtgatgctgaagttaaagctgccaaactgtttactgatgcatgggtcactcagaaaaccattgatgagggtctgtctcctcctaatggcttcactaacaccagtctggatagcattcttactgcattgaagaataacaacgcattgggtaagactaaaatctacgtagcatcctctgtctacaatttggcaggggatatacataaacgtccaaattatttaaagactacggtgattggtaacatcgtcagtaaatctgactttagtatgggtgataccatcactaactcttatttaaatggacctggtattcgtttacgtagattccctggttgggctgcaactaactatgacccttcaattggtattgcttatgggaacttgtcaatactgtctcagatagaccctgaagtagttaaatggcaagttcctcaaaaagcaggttatgaggtacaggttcagagcagtaggattggatttggtgattttgaggaatgggctgataaattcctctatgagaattatccagaccgtattactgaagagtttgaaatagacatcatggatgatgacaggattgtactcactgctactgatggtagtgagttatccttttatccagagaattacagtcaggatgcaatgtatctgtatgtgaactattactacatacagcctactagtgttgcagacccagtggttcatcctgctgtatctgtaccatctgctgatgacttaccttctacttctgaatggactcaggtatctcagaaccatactcctaagtcagctaccctgaagacagttactcatattaagagtgtattctctgatggcagacctgatgaggaaagtaccaatactgaagaagaacaggttagttggactaacttctcagatgtttacgagaaagaatttcgtgaaccaagtgaagtaggcttaatcattattcgtaagactacaatgacccaggtacagactggtactgtatctactggttccactacaaacactgaagttattgatttaggtggtggggttactgaaaccagaactactacagtaactacagatactttaggttatacatggtcttatcagaatacagatgtagttactactatgtctgctggtggtatgcctcaattgtttatttataaacagaacagtggtaatgccatccttgatgctctgtttattaataagacgaccaataacagattctattcattcatccctatccgtagtgataagaactggatttctggttctacatatactctttgtaagaaagcctttaagaaggctacagggggtaagatttctgacattatggatgacctgaagaagaacaaagatattggtgatattcagtatatctatgctgtatttggttgttctcttaatagtcctgaaaatacagctaaagagtacatatacagattcttccagttagtgaatcagtcaatgcctgctgacccaaactacccaactatggatgctttggtagaaggctttgctcaggctaacagagactttgatgcttatcaggaatggtgggaatctcgcagtgaagaagtagttgaagtagaaactactactgaaactgttgatgaaactgttgaagtagctgaagaagctgctgctcaggaagaagaaaaagaagtacaggaagaagaggctaaagaaccagtacaagccaaaccttctctgtttgcaggtctgaaacgttaa

SEQ ID NO: 11802 - DNA, 23157 bp, Homo sapiens
  SIMILAR (489)..(3767): 1001254mologous to Homo sapiens bcr,accession number X02596,Smith-Waterman Score=5702.
atggctatcactacttttgctaaaacttttggtcaggcttctactaaaactgaatccaacaatggttctcgcccgaaagctcaattctggattaacgttggctatgtagctaatgaaggcactgaagatgaacgtttcatctctctgcctactggtattccactggatactcaggaacatctgccaaccaattcctctaacgaagacttccgtgcaatgcgttgtgcacagaacgatttgttagatcaactgatggaatttgctaagactctggaaccaggtcaggaaggagttatctcactgcaagttcaacttcgtcgagttaaagaagaagctcctgctatctcagcaagcaagtatcttagaagacagccaatcagtgaagaaacagtagatgctctgtgtaagagctttactcatttacttcctgataatgataccaatctaccattcaatgtagatgttctcgactacatgatggaatgttctgatggaagatgtcatctgaaccaaagtcgaattaattggattaagagtcagttggagaaagcattactggataaaaacttctatgactatatctgtgatgatggagaaacacttcatattgcagtacatggtggagttacctatcaaggtgtccctcagtggactgatgggattaaagtcataggttatgactgtgctcatgcaggggataaactgaaatgtcctaaacaattcattggctccattagggagaaactctatgaggattcttatggagtatggcgagatgaagaatactgcatcaatgaatgtgaaagcatggaatttgactgtatagtgagcgatcttaattccatcgcgcgtgagtatagcgatggggctatctatgtgaaccgtgaaaagtttgcgtcctggaccgggaccgccgataaggacgatgttgactttcttaatgagtacgccgtgtgccccgtgagcctcttaggtcttgtctttgaaggtgccgaggccgtgatcgcaaggagtggaagggccgtctttgtcggtaattgcgtaagtgaaggtgtctattttgttcccctcggtgtagacgtcccgactgttacgcggtatctcgcatgccgttaccgatttctagttgaggccacggtgtgtggtgttcccttccctgcgtccaagagttatcattttgcaacccccaagtatgagtggaacaatgcaaaggacacccacatgactaggaggaggcagaaagtgaatagggagctcttattactttttgagtgtcagcaaggaagtccatcagagaaaagccatctcttttggctcagtgctctcatacgaggtgggggaggtaccctttttcttcttggttcacaacatggtgaaaagaaaggtcaagcactatgggatgaagataagaaggagtactcaaaagaacttggtagaggaaaactggcttatgaccaaaagaatcgggaacacagttatgaaggcgggcaacttacccttcgacttgataaagccaaagagtcttatgaagtcgttattgattctattactaaccagtacaatagtcggttgctccagtcagaaaaacgagccgagagttataaacgtcaagcctcaaccggaaccactcaatgcctcaatcttgcaagccatgcagccagactcgactcaagtcttgaagaaggcagacgtttggttgaagaactcagggcaactgttagactccgtgataaccaactgattgaactggggaaccagattcgttctgaccgaattactatggaacaaaacactgattctatggttccattgccagacccaagccaagctactaagttaactagctggaagaatgaaccttccttgcaagcacttaaagcagacttggatgcagcaaagccatctcatactgccatgatgattaaggtcaaagaatggaatgaccttatgcgtattgaaggcaaagccaagccacctaaagtcaaaggacgttcacaggtacagcctaaacttgtacgtcgtcaagctgaatggcgttattctgctttaactgaacctttccttggttctaataagttattcaaagttactcctgtaacttgggaagatgtacaaggtgcacgccagaatgaactggttcttaactaccaattccgtaccaaactaaatcgtgtaagtttcattgataactatgttcgttcagttgttgatgatggtactggtattgttcgtgttggttggaacagggaaattcgtaaagagaagcaagaagttcctgtatttagtttgttccctattcaaacacaagaacaagctgatgctttacaacaggctctacaacttcgtacagataaccctcgcggttatgaagagaatgtagatgaagctattaaggaatcagtacgtttctttgatgaaacgggacaagcaacgtatgcagtacaaactgggacaactacaactgaagttgaagttcctttagcaaaccatcctacggtggaaatgctaaacccagagaacattattatcgacccttcatgtcagggtgatattaataaggcaatgtttgccattgtctcttttgaaacttgtaaggcagacctgcttaaagagaaagaccgttatcacaatctaaataagattgattggcaaagctctgctcccgttaatgaaccagaccatgcaaccactactcctcaagaatttcagattagtgaccctatgcgtaagcgtgtagttgcttatgaatattggggattctgggatattgaagggaatggtgtattagagcctatcgttgctacttggattggttctacccttattcgtttagagaagaatccttatcctgacggcaaactcccatttgtattaattccgtatatgcctgttaaacgggatatgtatggcgaaccagatgcagagttattaggtgataaccaagcagtacttggtgctgtaatgcgtgggatgattgacttacttggacgtagtgccaatggtcaacgtggtatgcctaaaggtatgcttgatgccctgaatagtcgtcgttacagggaaggtgaggattatgaatacaatcctacacaaaaccctgctcaaatgattattgagcataagttccctgaattgccacaatcagcactgactatggctacccttcagaaccaggaagcagaatctcttactggtgttaaagcatttgctggtggggtaactggtgagtcttatggtgatgtagctgctggtattcgtggtgtattagatgctgcttctaaacgtgagatggctatccttcgtcgtttagctaaaggcatgtctgaaattggtaataagattattgctatgaatgctgtgttcttggcagagcatgaagtagtacgtattaccaatgaagaatttgtcactattaaacgtgaagacctgaaaggtaactttgaccttgaagtagatatttctactgctgaagtagacaaccaaaagtcccaagacttaggctttatgcttcagactattggtccaaacgtagaccagcaaatcactttgaatattcttgcagagattgctgacttgaaacgtatgcctaaactggctcatgatttacgtacatggcaacctcaaccagacccagtacaggaacaactcaaacaattggctgttgagaaagcacagcttgagaatgaagagttacgttctaaaattcgtcttaatgatgcacaagctcaaaaagctatggcagaacgagacaataagaatctggattatctggaacaagaatctggcactaaacatgctcgtgaccttgagaagatgaaagctcaatcacaaggtaatcagcaattagaaattactaaagcattaaccaagccacgtaaggaaggagaacttccccctaacttatctgctgcaattgggtataatgcattgactaatggggaggatacaggtattcaatctgtatctgaacgggatatagctgctgaagccaaccctgcttattcacttggttccagtcagtttgacccaacccgtgacccagctcttaacccaggaattagattagactgtgctcgttatgtacaagaatcctgtgacccattgcttgaagaccgtcaacgtgctgatgctcttgctatggctcaagctgctggttgtttaaaacgttatctggaaattactcttcagaaagcagaaacactggtaggtgtccaatcagatattgagaatgcattggatgttgctcgtgatacccccatgactacggaagctgcaaaaacagcttccgacatttttaaaatgtcggatgaagagattctgaacatgcctggtccatcaagcattcagaacaacccggaaccggtagaaaataatactcctgcacaaccagacccaattgttgaagttgaacaaactgatgaaccagaagtaactactgaaccaactgaagtagaaaatacttctgaatcagaaagcaattcagatgcattcacaactggtaatgatagtgctacagttgacccaaataaggttgacagcaacagtaagcctgctactgataatgcaccttctactactgagcaaggccaagcaaaagtagtagaagacaagcaggtatcagaccagaaaactgacttcgactataaggctggttatgaacggataatggctccgtttaaagctaacggcaaaatgattactcctcagagtcctgaagaggtcattagcttgatgcaaatgggagctaactatacccgtaaaatgcaggagattcagccgtatcgtaagtatctcctgatgttagaaaacaacggattattagatgaagggcaactctcttatgctatcgatttagttaaagggaatcctgatgctattaagaagttggttaaagaatctggtattgatgttctggatattaatccagaagaggaagttaaataccaagctggtaatcaccgtgtgtcagatgctgaagcagcatttgcaaccgaactggaagatgctaaatccactccagaaggacaagctactcttcagttaatttcgactacgtgggatgaccacagcaaacaggcattgctggaaaatcgtggtctggttaataccatcgttgaacagaaagctaacggtatttacgaccgtattgtttctgaaattgaacgactcaaaatcttaggccaaatcccaatcggtacagcattcctggatgcttataatcaagtcggtaactaccttgctgctaatggtggttttaatgatttgattaagcagaaacctgttgaacaacctgaaccagtggttcagccagtagcaactcgtgttgcaacacctaagtctgaaatcactaatactcaacaggcagcagcggcatccccatcacgggttacaccgcgtaagacagaaaaatctagtattgatggtgctaactctgaccagatgcaaaccttcttctggctgaagaaagcaatcatcactgcccgtaaagagcagtacttcatgccactggcctctgtaactaacatgccgaagcattacggtaagaccatcaaggtatatgaatatgttcctctgctggatgaccgtaacatcaatgaccagggtattgatgcaagtggtgctactattgttaacggtaacctgtatggttccagcaaagacatcggtaacattacttccaaactgcctctactgactgaaaacggtggtcgagttaaccgtgttggttttactcgtattgctcgtgaaggttctattcacaagtttggcttcttctatgagttcactcaggaatctattgacttcgattctgatgatggcctgatggaacacctgtcccgtgaactgatgaatggtgctactcagattactgaagctgtactgcaaaaagacctgctggctgctgctggtactgttctgtatgctggtgctgctacttctgatgccaccatcactggtgaaggttctactccgtctatcgtttcttataagaacctgatgcgtcttgaccagattctgacagagaaccgtactcctactcagactaccattatcactggttcccgtatgattgatactaaagtcatcggtgctactcgtgttatgtatgtaggttctgaactggttccagaactgaaagcaatgaaagacctgttcggtaataaagcctttatcgaaactcagcactatgctgatgcaggtactatcatgaatggtgaagtcggttctattgataagttccgtatcattcaggttccagaaatgctgcactgggcaggtgctggtgcacaggctactgtagctaaccctggttaccgtacctctatggtatctggccaagagcactatgacgtttacccaatgctggtagtaggtgatgattcctttacctccattggcttccagactgacggatatatacacatgagcattaacgataaaccgaccgctgatttaactcagggcaacgatgacaccgttgatgaagttaaggttgatgaactttctctgctgaaacaacgagctaatatgatgggtatttcatactcaaataatattagtgctgaaactcttcgtaagaagattgaagcagctcaggaaccagtagaacctcagcctaatcctctggctctgtctacaggtacagtaactacggcaacttctttacgtcaccagcaacgcttagaacaattaaagctggttcgagtacgtattcagaaccttgaccctaagaagaaagacctgcctggtgagattattacagtagctaacgaatatattggtactgttcgtaaattcgttccatttggtgaagctactgatgagggctatcacatcccttactgtatttataacttcctcaaagaacgtaagttcctgaacattcgagttaccaaaggtaagaatggtcagcctaatattacgtctgcatgggtacgtgagtttgccattgaagttctgcctccactgactaaggaagaattacaaactctggctgctgctcagattgctgctggtgaggattttacgcttcctgacatcgacatgtctggcagtgagtatgatattcctggtggcattaatagccctatctatgcagagatagagaagataaccacagaacaactaactactcgtgaggttgggggttctggtgtatttgacgctttaatgcaatcagcaagcaatcatctactggcagaatttaagaataaccgaattactggtggtgattacgttaaggcatacattgctactatggaagcatgtatggctaatgctgtgcaattcctcaccactaaagaccaggcttattggaatgctgttactgctcaggtagctgcaattactgctcgtgctaatcttggtattatcaaagctaactttgttacagctaagattcaggctctggctactaaagctgaatatgcccttactaagctgaagctgtctaatgagtcagtaacttactgtactgctcaatacaatctatcctctatgcttcctcaacaattactgatgttgaagaaccagaccactcaggttgctgaacagactaagttaactactgaacaaatcaatatgacgaaagagcagaaggaagcacaacgtgctcagacttctgatactcgtactgatggtactcgtgtagctggttctgtaggtaaacagaaagaactctatgaccaacagattacgtcttataaacgtgatgctgaagttaaagctgccaaactgtttactgatgcatgggtcactcagaaaaccattgatgagggtctgtctcctcctaatggcttcactaacaccagtctggatagcattcttactgcattgaagaataacaacgcattgggtaagactaaaatctacgtagcatcctctgtctacaatttggcaggggatatacataaacgtccaaattatttaaagactacggtgattggtaacatcgtcagtaaatctgactttagtatgggtgataccatcactaactcttatttaaatggacctggtattcgtttacgtagattccctggttgggctgcaactaactatgacccttcaattggtattgcttatgggaacttgtcaatactgtctcagatagaccctgaagtagttaaatggcaagttcctcaaaaagcaggttatgaggtacaggttcagagcagtaggattggatttggtgattttgaggaatgggctgataaattcctctatgagaattatccagaccgtattactgaagagtttgaaatagacatcatggatgatgacaggattgtactcactgctactgatggtagtgagttatccttttatccagagaattacagtcaggatgcaatgtatctgtatgtgaactattactacatacagcctactagtgttgcagacccagtggttcatcctgctgtatctgtaccatctgctgatgacttaccttctacttctgaatggactcaggtatctcagaaccatactcctaagtcagctaccctgaagacagttactcatattaagagtgtattctctgatggcagacctgatgaggaaagtaccaatactgaagaagaacaggttagttggactaacttctcagatgtttacgagaaagaatttcgtgaaccaagtgaagtaggcttaatcattattcgtaagactacaatgacccaggtacagactggtactgtatctactggttccactacaaacactgaagttattgatttaggtggtggggttactgaaaccagaactactacagtaactacagatactttaggttatacatggtcttatcagaatacagatgtagttactactatgtctgctggtggtatgcctcaattgtttatttataaacagaacagtggtaatgccatccttgatgctctgtttattaataagacgaccaataacagattctattcattcatccctatccgtagtgataagaactggatttctggttctacatatactctttgtaagaaagcctttaagaaggctacagggggtaagatttctgacattatggatgacctgaagaagaacaaagatattggtgatattcagtatatctatgctgtatttggttgttctcttaatagtcctgaaaatacagctaaagagtacatatacagattcttccagttagtgaatcagtcaatgcctgctgacccaaactacccaactatggatgctttggtagaaggctttgctcaggctaacagagactttgatgcttatcaggaatggtgggaatctcgcagtggtaatagggatattcccatagggaagcctcctaaaagacccgtatatccaacaataccttctaaatccattaatattcgttctaacggtggataccgttacaacatgactattagttggaacttcattgaagaatcagttagttcaggtaaagcattctctggagccaagaaagggcagctcaagtttgcttatgaaggtactgtagtccttatgcagaaagccgttatgtactctgaaaagggtaatgacaaagttgggtttactatctacaggctagataagataacaatgtattggcagaatggggataattcatggaggaagatttctgtctatggcctgaaccataacaataatgtttacaagaataaatctgtaagcatttctggtgtagatgcactaaatgatgatgaagagtccggatttatcatccctcttcataacaacatttatcgtagtatgtctttggtaaatggtactcagttatctactgcatgttgttatctggttcttaactcatataagaaagttaagaagaaatggtatcagtctggcatttttaaagtagtagtggttgttgttgcagtagtagtgtctgtgttctttactcctgctgctggtgctggggtaatgggtactgctgcttctattggtgctgcattaggttttgcagggttagctgctattatcgttggggctgtggctaatgccattgcagctatgattctgatgtccattattcaaacagtctctgttagtctgcttggggataagattggaatcattgttgctactattgcctctatggtagccatgaatgtcggcacagctttatccactggttcatccatgtctacgatgctgggtgaaatgatgaaagcagacaacatcattaaactcacttcatctgtaggaaatggcataagtgattacatcaatgcttctgctatggaaactgtcaaaaagacagagaaacttatggcagagtaccgtgaccagataaaaaccattcaggaaaagtacgaggaaatgtttggcactgagggcatgggttacattgacccaatgaacctaactaatgtaggccaacaatttgaaccactggattcattccttagccgtactcttatgactggtcatgatatagctgatatgtctaacaacatgattaccaactttgcagatataacgttgcagcttgatttagataccaattttggctatgggtatggttcctttaataccccaaccatgaactataaccctatgcaatctggcatccttagtaatgactggcttcagaatattactggtggtgctacagggaataccggtgggcagactcaagggcttactgaccaactgggtctgaacattcctacattccagttggggttaggtggtcttaatgcactgggtaatatctatggtgcattacaggctaacaagttagctaagaatcagttctcttttgctaaagatgttactaacactaatctgaataaccagattaagtcctataacactgctctggaagaccgtgctcgtagtcgtgctgttgcagaaaatcgtgaccaatctacggctgatgcttacattgcagctaatcgcttaactcgtgattttcgaaactctgcaagacagcaagctggtgatgcaattatggctgaagccatgcgttaccaagaccctaatgagtatcgtaatgccttagcttctggagcattatttgctggctatgacccttctctaatttcttctcgtactatggagaacttagataatcgtgctggcaatctgttagaccaagcatctaaacaacaaaatctggatttcactcgatacagtaatgacagaaccatgaaggtaaatgcagctactgatgctgctgcccctgcattacaggaattagctctggcttatcaatctggtgacccaagaaaggttcaggcagcacaggctcagtatggggatgtattaaaaacccttcctgctggtgttgttatggactacatgaacaaccttcaaggacagggtactgctggtattggtcaacgtcgcagcttattcaacttaggtgttgatatacgtaacgatgcggatactcaggctgctatgcagttactgaataatattcgtcgtggtgcatacagtgctgacgatgctcgtatgcttgcagagggtacgttcgaccaaatgtcaccaggagcagtaagtcgtgcactatctcagttagatagagcatatccaggtgcatatactccgggaactggttctgcatccctatctcctcctggtactcagggtactcggaatggttctgcatatgacactacctataagttcacaccaactgatgtacctattactcagatgaacttaggtgaggtggttcagcatcaagacactatgaagaagacactaggtgcttctcctgttggtgcataccagattaaccaagatactcttaaagactttgctccaaaggtatttggtgaagattggcagaacattcctatgtctccggagaaccaagacaaactgggtgaagctatttttaatgcccgtaagaatggcaatctgaagagtacatgggctgctttaccggatgatactcctggtgcttataagaacttgtcatgggatgaaatgaaggattacattgctcaagcagaaacaggtaattctattaatccattacaggaacaagcattcacttctgttgctggtaatactgttggtactcgtaatatgcagaatattggtaatactctgctgccagaataccaagctgctactgttgacccttctacgactggtcaggtggctaaacgtattattgatagcaatgaactgaaaggcattaaccaaggtgcactggttcgacaaatcaatgaggtagcaaaacagaatgctatttctcccgctatggcaggagcaatcattcaacgtagtatcaccggtaaaccagagggatggtttagtggtattcgaaatgcctttgatactgatgttattgatttgggtggtgattaccaactggataaagcagccgtagaagcaaatgcaaaacttgcaactactggtactgctattgaacagaatgctcgtaatcagcttactgcacaaattcaatcaaacatctatgcagcacagaatacgttagatactgcacttgctgatttacgtgaagtacagcgtcgtattcagaccggtcaggaaaaccttagaagtgtactacctcgctatcaggagcgagttaacactgctaaacgtcttcttgatggtgctcgtagtgctgtagctgctgaccctcagaatttggatattaagagcctacaaaatattaaacaggaagagagcgaggcaaaccggagaagtttaggcagagatgccggacgtcgattggacagcgtaaccaatgcaaagcaagttgacgtctctactgcaaccgcccagaagaaagctgaacaaggtgtcactactcctcttgtttctcctgatgctgcttatcaaatgcaagctgcccgtactggtaatgttggggctaatgcatttgaaccagggacagtgcaatcagatttcatgaatctgactccaatgcaaatcatgaataagtatggggttgagcaaggcttacaacttatcaacgctcgtgctgatgcagggaaccaggtattcaatgattcagttactacaagaactcctggggaagaactgggggatattgctactggtgttggtcttggttttgttaatacccttgggggcattggtgctcttggggcaggcttactcaacgatgatgcaggtgctgttgttgctcaacaattgagtaagtttaatgatgctgtccatgctacccaaagccaagcattacaagataaacgtaagctctttgctgctcgtaacttaatgagtgaagtagagagtgaacgtcagtatcaaacagataagaaagaaggcactaatgacatagtagcttccttatctaaatttggacgtgattttgtaggttcaattgagaacgctgcccaaactgactccattatttctgatgggttagcagaaggggtaggttctctattaggtgctggtcctgtattaaggggtgcatctttactgggtaaagcagttgttccagcaaatactcttcgtagtgctgcattggctggtgctattgatgcaggtactggtactcagtccctggctcgtattgcttctactgtaggcagagctgcaccaggtatagttggtgttggtgcaatggaagctggtggtgcataccaacaaactgctgatgaaattatgaagatgagtcttaaagacttagagaagtctcctgtttatcaacaacatattaaagatggtatgtctccagaacaggctcgtcgtcagactgcatctgaaactggtcttactgctgctgctattcaattacctattgctgctgcaactggtcctctggtatctcgttttgagatggctcctttccgtgctggttctttaggtgctgtaggtatgaaccttgcccgtgaaacagtggaagaaggtgttcagggtgctacaggccaactggctcagaatattgcacagcaacaaaacattgataagaaccaagacctgcttaaaggtgtcggtacacaagctggtttaggtgctctttatggctttggttctgctggtgttgtacaggctccggctggtgctgctcgtttagcaggtgctgcaactgctcctgtattgcgtaccacaatggctggtgttaaagctgctggtagtgtagcaggtaaggttgtttcccctattaagaacactttggtagctcgtggtgagcgggttatgaagcagaatgaagaagcatctcctgttgctgatgactatgttgcacaggcagcacaagaagctatggctcaagcaccagaagcagaagttactattcgtgatgctgttgaagcaactgatgctactccggaacagaaagttgcagcacaccagtatgtttctgacttaatgaatgctactcgttttaatcctgaaaattatcaggaagcaccagagcatattcgtaatgctgtagctggttctactgaccaagtacaggttattcaaaagttagcagacctagttaacacattagatgaatctaatcctcaagcactgatggaagctgcatcttatatgtatgatgctgtttcagagtttgagcaattcattaaccgtgaccctgctgcactggatagtattcctaaagattctccggctattgagttactcaatcgttatacaaatctgacagctaatattcagaacacaccaaaagtaattggtgcactgaatgttattaatcgaatgattaatgaatctgcccagaatggttctttggatgtgactgaagaatccagtccacaggaaatgcagaacgtagcattagctgctgaagtagctcctgaaaagctcaatccagaatctgtaaatgttgttcttaaacatgctgctgatggtcgtattaaactgaataatcgccaaattgctgcccttcagaatgctgctgcaatcctgaagggggcacgggaatatgatgcagaagctgcccgtcttggattacgtcctcaagacattgtgagtaaacagattaaaacggatgagagcagaactcaggaaggacaatactctgcgttgcaacatgcgaataggattcggtctgcgtataactctggtaatttcgagttggcctccgcttacctgaacgactttatgcagttcgcccagcacatgcagaataaggttggagcgttgaatgagcatcttgttacggggaatgcggataagaataagtctgtccactaccaagctcttactgctgacagagaatgggttcgtagccgtaccggattgggggtcaatccctatgacactaagtcggttaaatttgcccagcaagttgctcttgaagcgaaaacggtagcggatattgctaatgccctcgcttcggcttacccggaactgaaggtcagtcatataaaagttactccattggattcacgtcttaacgcccctgctgctgaggtggtcaaggcattccgtcaaggcaatcgagacgttgctttttctcaacagaaagctgactccgtgaatcaggttaaagaaactcctgttacaaaacaggaaccagttacatctactgtacagactaagactcctgttagtgaacctgttaaaacagaacctactactaaagagtctagaccacaggctataaaagaacctgtgagccagtctgaaaaacgggatgttaaccttactaatgaggacaccatcaagcaacctactgaatctgttaaagaaactgaaacttctgcaaaagaaagcacagttacagaagaattaagagaaggtatcgatgctgtttacccctcattggtaggtactgctgattctaaagcagagggtattaagaactatttcaaattgtcctttaccttaccggaagaacagaaatcccgtactgttggttcagaagcacctctaaaagaggtagctcaagctctgtcttctcgtgctcgttatgaactctttactgagaaagaagttgctaatcctgcttttaatggggaagttattaagcgatataaagaactcatggaacatggggaaggtattgctgatattcttcgttcccgtctggctaagttccttaacactaaggatgttggtaaacgttttgctcagggtacagaagccaaccgttgggtaggcggtaagttacttaacatcgttgaacaggatggggatacctttaagtacaatgagcaattgctacagactgctgtattagcgggtcttcagtggagacttactgctaccagcaatactgctatcaaagatgcaaaagatgttgctgctattactggtattgaccaagccctgctgccagaaggtttagtagagcaatttgatactggtatgacactcactgaagcagttagttccctggctcagaaaattgagtcttactggggattatctcgtaatccaaatgctccattgggttataccaaaggtatccctacagcaatggctgctgaaattctggctgcatttgtagagtctactgatgttgtagagaacatcgtggatatgtcagaaattgacccagataataagaagacgattggtctgtacaccattactgaactggattccttcgacccaattaatagcttccctactgctattgaagaagctgttttagtaaatcctacagagaagatgttctttggtgatgacattcctcctgtagctaatactcagcttcgtaaccctgctgttcgtaatactccagaacagaaggctgcattgaaagcagaacaggctacagagttctatgtacacactccaatggttcaattctatgagacgttaggtaaagaccgtattctcgaactgatgggtgctggtactctgaataaagagttacttaatgataatcatgctaaatctctggaaggtaagaaccgttcagtagaggactcttacaaccaactgttctccgtcattgagcaggtaagagcacagagtgaagacatctctactgtgcctattcactatgcatacaatatgacccgtgttggtcgtatgcagatgttaggtaaatacaatcctcaatcagccaaactggttcgtgaggctatcctacctactaaagctactttggatttatcgaaccagaacaatgaagacttctctgcattccagttaggtctggctcaggcattggacattaaagtccatactatgactcgtgaggttatgtctgacgagttgactaaattactggaaggtaatctgaaaccagccattgatatgatggttgagtttaataccactggttccttaccagaaaatgcagttgatgttctgaatacagcattaggagataggaagtcattcgtagcattgatggctcttatggagtattcccgttacttagtagcagaggataaatctgcatttgtaaccccactgtatgtagaagcagatggtgttactaatggtccaatcaatgccatgatgctaatgacaggtggcctgtttactcctgactggattcgtaatattgccaaagggggcttgttcattggttctccaaataagaccatgaatgagcatcgttctactgctgacaataatgatttatatcaagcatccactaatgctttgatggaatcgttgggtaagttacgtagtaactatgcttctaatatgcctattcagtcccagatagacagtcttctttctctgatggatttgttcctaccggatattaatcttggtgagaatggtgctttagaacttaaacgtggtattgctaagaacccgctgactattaccatctatggttctggtgctcgtggtattgcaggtaagctggttagttctgttactgatgccatctatgagcgtatgtctgatgtgctgaaagctcgtgctaaagacccaaacatctctgctgctatggcaatgtttggtaagcaagctgcttcagaagcacatgctgaagaacttcttgctcgtttcctgaaagatatggaaacactgacttctactgttcctgttaaacgtaaaggtgtactggaactacaatccacaggtgcaggagccaaagggaaaatcaatcctaagacctataccattaagggtgagcaactgaaggcacttcaggaaaatatgctgcacttctttgtagaaccactacgtaatggtattactcagactgtaggtgaaagtctggtgtactccactgaacaattacagaaagctactcagattcaatctgtagtgctggaagatatgttcaaacagcgagtacaggagaagctgacagagaaggctaaagacccgacatggaagaaaggcgatttccttactcagaaagaactgaatgatattcaggcttctctgaataacttagctcctatgattgagacaggttctcagactttctacattgctggctcagaaaatgcagaagtagcaaatcaggtattagctactaaccttgatgaccgtatgcgtgtaccaatgagtatctatgccccagcacaggctggtgtagcaggtattccatttatgactattggtactggtgatggcatgatgatgcaaactctttccactatgaaaggtgcaccaaagaataccctcaaaatctttgatggtatgaacattggtttgaatgacatcactgatgctagtcgtaaggctaatgaagctgtttacacttcttggcagggtaaccctattaagaatgtttacgaatcatatgctaagttcatgaagaatgtagatttcagcaagttgtcccctgaagcattggaagcaattggtaaatctgctctggaatatgaccaacgtgagaatgctactgtagatgatattgctaatgctgcatctttgattgaacgtaacttacgtaatattgcactgggtgtagatattcgccataaggtactggataaggtaaatctgtccattgaccagatggctgctgtaggtgctccttatcagaacaacggtaagattgaccttagcaatatgactcctgaacaacaggctgatgaactgaataaacttttccgtgaagagttagaagcccgtaaacaaaaagtcgctaaggctaaggctgaagtcaaagaagaaattgtttctgaaaaagaaccagtgaatccagactttggtatggtaggccgtgagcataaggcatccggtgttcgtatcctgtctgctactgctattcgtaacctggctaagattagtaatctgccatctactcaggcagctactcttgcagagattcagaaatcactggcagctaaagactataagattatctacggtacacctactcaggttgcagaatatgctcgtcagaagaatgttactgaattgacttctcaggaaatggaagaagctcaggcaggtaatatttatggctggactaacttcgacgataagaccatttatctggttagcccatctatggaaaccctcattcatgaactggttcatgcttctaccttcgaggaagtttattccttctatcagggtaatgaagtaagccctacttctaagcaggctattgagaaccttgaaggtctgatggaacagttccgttctctggatatttccaaagattctccagaaatgagagaagcatatgctgatgctattgcaactattgaaggtcatttgagtaatggctttgttgacccagctatttctaaagctgctgctcttaatgagtttatggcttgggggttagctaaccgtgctctggctgctaaacagaagagaacatcttcactggttcaaatggtgaaagatgtttatcaggccattaagaaattgatttggggacgtaaacaagctcctgcattgggagaagatatgttctctaatctgctgtttaattctgcaattctgatgcgtagccaacctacaactcaggcagtagctaaagatggcacactgttccatagcaaagcatatggtaacaatgaacgtctgtctcagttgaatcagaccttcgataaactggtaactgattaccttcgtactgacccagttacagaagtagaacgtcgtggcaatgtggctaatgcattaatgagtgctactcgactagttcgtgatgttcagtctcgtggcttcaatatgactgctcaggaacaatctgtattccagatggttactgctgcattagcaactgaagctgcaattgacccacacgctatggctcgtgctcaggaactttatacccatgtaatgaaacaccttacggtagaacatttcatggctgaccctgatagtactaaccctgctgaccgttactacgctcaacagaaatatgacactatctctggtgctaatctggttgaagtagatgccaaaggcagaaccagtctgttacctacattcctgggtctggctatggttaatgaagaactacgttcaatcattaaagaaatgcctgtacctaaagcagataagaaattagggaatgatgtagatactctgcttaccaatgcaggcactcaggtaatggaatctctgaaccgtcgtatggctggtgaccagaaagctactaatgttcaggacagtattgatgctctgtcagaaacaatcatggctgctgctctgaaacgagagtccttctatgatgctgtagcaacccctaccggtaatttcattgaccgtgctaatcagtacgtaacagatagcattgaacggttatctgaaactgttattgagaaggcagataaggtaattgctaatccttctaatgtagctgctaaaggtgttgctcatctggctaaactgactgctgctattgcatctgaaaaacaaggtgaaatagtggctcagggtgttatgactgctatgaaccagggtaaagtatggcaacctttccatgacttagttaatgacattgttggccgtactaagactaatgccaatgtctatgacttaatcaaattggttaagagccagatttctcaagaccgtcaacaattccgtgagcatttacctacagtcattgctggtaagttttcccgtaaactgactgataccgagtggtctgcaatgcatactggtttaggtaaaacagatttagctgttctacgtgaaactatgagcatggctgaaattagagatttactctcttcacctaagaaagtgaaagatgaaatctctactctggaaaaagagattcagaaccaagcaggtagaaactggaatctggttcagaagaaatctaagcaactggctcaatacatgattacaggggaggtaggtaataacctccttcgtaatgcccatgctattagtcgtttattaggtgaacgtattactaatggtcctgtggcagatgtagctgctattgataagctcattactttgtactctctggaattgatgaataagtctgaccgtggccttttgtcagaattggctcaatcagaagtggagggtatggagttctccattgcttatatggtgggtcaacgtactgaagagatgcgtaaagctaaaggtgataaccgtactttgctgaatcactttaagggctatatccctgtagagaaccagcaaggtgtgaatttgattattgctgacgataaagagtttgctaagttaaatagccaatcttttactcgtattggtacttatcagggaagcactggtttacgtactggttctaaaggttattacttcagcccagtagctgcccgtgccccatactctcaaggtattcttcagaacgttcgtaatactgctggtggtgtggatattggtacaggctttacgttaggtactatggttgctggtcgtattactgacaaaccaaccgtagagcgtattaccaaagctctggctaaaggtgaacgtggacgtgaaccgctgatgccaatttataacagcaaaggtcaggtagttgcttatgagcaatccgtcgaccctaatatgttgaagcatctaaaccaagacaatcactttgctaagatggtgggtgtatggcgtggtcgtcaggtggaagaggctaaagcacaacgttttaatgacattctcattgagcaattacatgctatgtatgagaaagacattaaagactccagtgctaataaatctcaatatgtaaacctgttaggtaaaattgatgacccagtactggctgatgcaattaacctgatgaacattgagactcgccataaggccgaagaactctttggtaaagatgagttatgggttcgtagggatatgctgaatgatgcacttggctatcgtgctgcatctattggtgatgtatggactggtaactctcgttggtcacctagcacccttgatactgttaagaagatgttcctcggtgcatttggtaataaggcatatcatgtagtaatgaatgctgaaaataccattcagaacttggtgaaggatgctaagacagtaattgttgttaaatctgttgtagtaccggcagttaacttccttgctaacatctaccagatgattggacgtggtgttcctgttaaggatattgctgtgaatattcctcgtaagacgtcagagattaatcagtacattaaatctcgcttacgtcagattgatgcagaagcagaattacgtgctgctgaaggcaatcctaatctggttcgtaaacttaaaaccgagattcaatctattactgatagccatcgtcgtatgagcatctggcctttgattgaagcaggtgagttctcttctattgctgatgctggtattagtcgtgatgacctgttagtagctgaaggtaagattcatgagtacatggaaaaacttgctaataaacttccagaaaaagtacgtaatgctggccgttatgctcttattgctaaggacactgctctgttccagggtatccagaaaacagtagagtattcggacttcattgctaaagccatcatctatgatgatttagtgaaacgtaagaagaaatcctcttctgaagcattaggtcaagtaactgaagagtttgttaactatgacagattgcctggtcgtttccgtggttatatggaaagcatgggtctgatgtggttctacaactttaagattcgttccattaaagttgctatgagcatgattagaaacaacccagtacattctctgattgctacagtagtacctgctcctgccatgtttggtaatgtaggtctgccaattcaggacaacatgttaaccatgctggctgaaggaagactggattattcattaggcttcggacaaggactaagagcaccaaccctcaatccttggttcaaccttacccactaa

SEQ ID NO: 11803 - DNA, 235 bp, Homo sapiens
  SIMILAR (1)..(69): 1001254mologous to Gallus gallus ribosomal protein L36,accession number AB046396,Smith-Waterman Score=107.
gccaagaggaagcgggaggagctgagcaacgtactggccgccatgaggaaagctgctgccaagaaagactgagcccctcccctgccctctccctgaaataaagaacagcttgacagaagccctggctctcctgctgtccgtgggtgggtgtgggtgtgtcgggggcccgcagtcccctgtctggtgcccgctctgagccacaccctctccgggtgctgcctggtcgtgaatcaaa

SEQ ID NO: 11804 - DNA, 672 bp, Homo sapiens
  SIMILAR (178)..(366): 961254mologous to Homo sapiens ribosomal protein L36,accession number BC003052,Smith-Waterman Score=308.
gctgaaggagccgggacgcggggctctgggcctcgggaactgagccggtactcacctccgccccttctccccgtcgctgtccgcagccatggccctacgctaccctatggccgtgggcctcaacaagggccacaaagtgaccaagaacgtgagcaagcccaggcacagccgacgccgcagggcgtcttgaccaaacacaccaagttcgtgcgggacatgattcgggaggtgtgtggctttgccccgtacgagcggcgcgccatggagttactgaaggtctccaaggacaaacgggccctcaaatttatcaagaaaagggtggggacgcacatccgcgccaagaggaagcgggaggagctgagcaacagtactggccgccatgaggaaagctgctgccaagaaagatttaggcccctccccctgccctctccctgaaattaaagacaagcttgacagaagccctggctctcctgctgtccgtgggtgggtgtgggtgtgtcgggggcccgcagtcccctgtctggtgcccgctttgagccacaccctctccgggtgctgcctggtcgtgaatcaaaagccgtggcccgcccacccttcccggggcagcaggtgaggaagccgccgtactgcaaatgactttaatcattaaatagcttttaaacaacactctga

SEQ ID NO: 11805 - DNA, 418 bp, Homo sapiens
  SIMILAR (12)..(143): 1001254mologous to Homo sapiens Amino acid sequence of a human secreted protein,accession number Y30721,Smith-Waterman Score =231.
  misc_feature (1)...(418): n = a,t,c or g
tttcgtggaagatgctgcgtccagcgttaccgtggctgtaccttggcctctgcagcctcctggtgggggaggcagaggccccgagccccgtggatccgctggagcggagccggccgtacgcggtgctgcgagggcagaacctggagnnnnnnnnnnnnnnnnnnnnnnnnnnnnnnnnnnnnnnnnnnnnnnnnnnnnnnnnnnnnnnnnnnnnnnnnnnnnnnnnnnnnnnnnnnnnnnnnnnnnnnnnnnnnnnnnnnnnnnnnnnnnnnngtcggttgaggattgcatcactactagagagggggcgttatagaggaggccaggctgcgcacacactcctgacatcgcgaacctcctgtcttgtgctacctnnnnnnnnnnnnnnnnnnnnnnnnnnnnnnnnncgtgatagaga

SEQ ID NO: 11806 - DNA, 725 bp, Homo sapiens
  SIMILAR (442)..(675): 541254mologous to Caenorhabditis elegans F35D11.3 gene product,accession number U29381,Smith-Waterman Score=219.
ttttttttttaggattttactttagttttaattgacgttttgctcaaaagcaaagaactgaacatttcaatggttcaatgttacaagattacaaacaaaatccttacacagttacagtatcctacttcggttacttcacattaaatgcaggttgttaaaatcagtgctgtgcttgaacacaagataagcatttcaatttaataacaaaattaaatctagcaccttgaaataaatattgacgacagctttataagtatgaaagtatcatttcaataggaggaaaaaatccagttcaccaacagtggaaactaatagcagcattttcaaagctgagatgaagaacttgtctggctgtcaccgacgccgaatgggcttgtagacacaaaatgccataaggatgacagtcaccagcaggatgctgaaaatggttcccatcaacactgtaatcccagctactcagggggctgaggcaggagaatcgcttgaaccccagacgcggaggttgcagcgagccgagatcgcaccattgcactccagcctgggcgacagggactccaggttctgccctcgcagcaccgcgtacggccggctccgctccagcggatccacggggctcggggcctgtgcctcccccaccaggaggctgcagaggccaaggctcagccacggtaacgctggacgcagcatcttccccagccctgcagaagcagagaggccacttccgt

SEQ ID NO: 11807 - DNA, 500 bp, Homo sapiens
  SIMILAR (40)..(171): 1001254mologous to Homo sapiens Amino acid sequence of a human secreted protein,accession number Y30721,Smith-Waterman Score =231.
gcgtccggtggcctatctgcttctgcagggctggggaagatgctgcgtccagcgttaccgtggctgtaccttggcctctgcagcctcctggtgggggaggcagaggccccgagccccgtggatccgctggagcggagccggccgtacgcggtgctgcgagggcagaacctggatcaaactcttcattgaagtactcatcaggcgtgatggctgtggggttgtttgcagtagcacattccgtggtgaggtcctgctgagccagaactcaggagagtcagaaatgccaaatgatgttcacaagtgaaggcctgtggcactcagtgtctgaggtggacgtgttaaccagctaaagaccgggaagttctattcactaacttttttgcatggaacaagaaaatctatgaggatatcaccaaactacacaggaagtgtaatggatttcttcattttaaaatatttctctactctcctttacatttttaaatcctgattataacaaa

SEQ ID NO: 11808 - DNA, 1784 bp, Homo sapiens
  SIMILAR (1)..(1464): 951254mologous to Homo sapiens putative p150,accession number U93563,Smith-Waterman Score=2414.
atgtggattgggactctgaagaacaactttatggtggacaccttcgtctccatctgctttgctctggtgagtggcaagctgtaccagtggaaagagcctgtcatcagttctgtgcacagcaaggtgaaaaggacagcagaagtgaaagaggagatcgtggagaaagaaatgaagaagttggtgcacagtgtctttaacatggcagattacaccttccctttgcaggtgaacacctgcctcctggtgggggaggcagaggccccgagcccccgtggatccggctggagcgaagccgggccgtacgcggtgctgcgagggcagaacctggtgttgatgggaaccattttcagcatcctgctggtgactgtcatccttatggcattttgtgtctacaagcccattcggcgtcggtgacagccagacaagttcttcaatgagtatttggggaataggataagttgtgttgcacacaggccagtggagaagttggaaccaaaactttcctacttggaaatgacctttggtctgtgacagttggaaaacgctaaatgaattagaagaaaacatgtactagacattattttttcctaacactgtagcgcaaataattggcccctgagtccgcttctcagtgtttctgactggacttgctaaaagaaagacctgagagctccaaaggtcagcgtgaagatggagtgttcatgagaaagaaaacatggtaaccttgtgagtgcctgtaagaaccacactgtaaagaactcatcattaatgcttgaaaatgttattaagaaggagacttaccatgcagacattccctatttaagaaccatttggttacagtgggttaagaatcacagatttttttttttaatctcacctgagttagcctagaattccgctggttgcaaagtggtgtcagctgtggggatcttgggccctcgttcctcacctgcatcctgccctgcactcaggtgcttccccctggaagtcagggtcacatcaggtaggacctgttactatatggcacctttgggcctgggaattgctcttgaagttgggactgggaaatgtttacttagggttgggcctgtttacaaaaagggacccccattcctgctttaaacacatttgatcttccctttgccctggcattttgagtcttttcttaggcccacgggtctggaaacttgagggcagctttccaggatttgggaatgtaaaaggtctcagtggggcacttctggtttcatccctggggtgggggagggcccagccaacaggaagtgcatgtcccactgtgcgggcccagtgtgtgtttacacaaatttccatctcagctttgaaaatgctgctattagtttccactgttggtgaactggattttttcccccccccattgaaatggatacctttccataccttataaagctgtccgtcaatatttatttccaaggtgcctagatttaattttgttattaaattgaaatgccttatcttgtgttcaagcacagcactgattttaacaacctgcatttaatgtgaagtaaccgaagtaggatactgtaactgtgtaaggattttgtttgtaatcttgtaacattgaaccattgaaatgttcaagttctttgcttttgagcaaaacgtcaattaaaactaaagtaaaatcctatatattgttttactccaccagttatttcccaagtgtttgaaatgcaggtgtgtgtctgaatttggatctaatccacttaaagaagctctgtggaggggaaattccttttttgagg

SEQ ID NO: 11809 - DNA, 1173 bp, Homo sapiens; identical to SEQ ID NO: 1787
  SIMILAR (183)..(67): 921254mologous to Homo sapiens Human secreted protein, SEQ ID NO: 7681,accession number G03600,Smith-Waterman Score=193.

SEQ ID NO: 11810 - DNA, 558 bp, Homo sapiens
  SIMILAR (1)..(255): 1001254mologous to Homo sapiens bA504H3.2 (Similar to PTMA (prothymosin-alpha)),accession number AL121585,Smith-Waterman Score =433.
atgtcagacgcagccgtagacaccagctccgaaatcaccaccaaggacttaaagaagaaggaagctgtggaggaagcggaaaatggaagagacacccctgctaatgggaaggctaatgaggaaaatggggagcaggaagctgacaatgaagtagatgaagaagaggaagaaggtggggaggaagacgaggaggaagaagaaggcgatggtgaggaagaggatggtgatgaagacgaggaagctgagtccgctaggggcaagctctgtgtgattgattggaagacatcagagaaaccaaagccttttattcaaagtacatttgacaacccactgcaagttgtggcatacatgggtgccatgaaccatgataccaactacagctttcaggttcaatgtggcttaattgtggtggcctacaaagatggatcacctgcccacccacatttcatggatgcagagctctgttcccagtactggaccaagtggcttcttcgactagaagaatatacggaaaagaaaaagaaccagaatattcagaaaccagaatattcagaatag

SEQ ID NO: 11811 - DNA, 1470 bp, Homo sapiens
  SIMILAR (897)..(67): 871254mologous to Homo sapiens putative p150,accession number U93574,Smith-Waterman Score=1212.
ttaggttactatatccttgtaatatattttaaagtcaggtaatgtgatgcctccaggtttgttcattttgtttagagttgctttggctatttggacttttttgtagatatgcggcattatttctgagggctctattctgttccattggtctatatctctgttttggtaccagtaccatgctgttttggttactgtagccttgtagtatagtttgaagtcaggtagcgtgatgcctccagctttgttcttttggcttaggattgacttggcaatgcgggctctcttttggttccatatgaactttaaagtagttgtttccaattctgtgaagaaagtcattggtagcttgatggggatggcattgaatctataaattaccttgggcagtatggccattttcacgatattgattattcctacccatgagcatggaatgttcttccatttgtttgtatcctcttttatttcattgagcagtggtttgtagttctccttgaagaggtccttcacgccccttgtaagttggattcctaggtattttattctctttgaagcaattgtgaatgggagttcactcgtgatttggctctctgtttgtctgttattggtgtataagaatgcttgtgatttttgcacattgattttgtatcctgacactttgctgaagttgcttatcagcttaaggagattttgggctgagacgatggggttttctagatatacaatcatgtcatctgcaaacagggacaatttgacttcctcttttcctacttgaataccctttatttccttctcttgcctgattgccctggccagaacttccaacactttggtctttgatgatggtgatgtacagatggggttttggtgtggatgtcctttctgtttgttagttttccttctaacagtcaggaccctcagctgcaggtctgttggagtttgctggaggtccactccagaccctgtttgccatttccactcaatattgtactggaggtcatagccagaggaataaaacaagaagaaattaaaagcgtacaggcttactcttcttttctgcccgtttagcatagcaatctgttgtacgttttgtttactgctgtattgccggagcctgctaccatgcttggaacacagcaggctctcaataaaaaatgtgttgaataaagaaataatactgaggctgagatgaggatcttcggggactagctggccaactggagtaactgggtacatttgaagatggaaagaagaaccttccagctcacttgactctgggtcaggtgagtctctggtgtaattgagaccaattatcaacatgcagttttttcttgagctatcagcaacagaatctccttgcccaagccagacattgcgagtcacctgcatgatcttggtcatgtatcccattagaatgtcacagttgttaagcgattccagcctttgggctttgctgagttcctgcaccat

SEQ ID NO: 11812 - DNA, 2835 bp, Homo sapiens; identical to SEQ ID NO: 7486
  SIMILAR (67)..(1476): 961254mologous to Homo sapiens putative p150,accession number U93569,Smith-Waterman Score=2359.

SEQ ID NO: 11813 - DNA, 2991 bp, Homo sapiens
  SIMILAR (1857)..(841): 821254mologous to Homo sapiens putative p150,accession number U93569,Smith-Waterman Score=1398.
ttagtaccagtaccatgctgttttggttactgtagccttgtagtatagtttgaagtcaggtagcgtgatgcctccagctttgttcttttggcttaggattgtcttggcaatgctggctcttttttggttccatatgaactttaaagtagttttttccaattctgtgaagaaagtcattggtagcttgatggggatggcattgaatctataaattaccttgggcaatatggccattttcacaacattgattcttcctacccatgagcatggaatgttcttccatttgtttgtgtcctcttttatttcattgatcagtggtttgtagttctccttgaagaggtccttcacatcccttgtaagttggattcctaggtattttattctctttgaagcaattgtgaatgggagttcactcatgatttggctctctgtttgtctgttattggtgtataggaatgcttgtgatttttgcacactgactttgtatcctgagactttgctgaagttgcttatcaacttaaggagattttgggctgagatgatgggggtttctaaatatacaatcatgtcatctgcaaacagggacaatttgacttcctcttttcctaatggaataccctttatttctttctcctgcctgattgccctggccagaacttccaacactgtcttgtgccaattttcaaagggaatgcttccagtttttgcccagtcagtatgatattggctgtgggtgagatatgtcccatcaatacctagtttattgagagtttttagcatgaagggctgttgaattttgttgaaggccttttctgcatctattgagataatcatgtggtttttgtctttggttctctggtagaattcagctgtgaatccatctggtcctggactttttttggttggtaggctattaattattgcctcaaattcagagcctgttattggtctattcagggattcaacttcttcctggtttagtattgggagggtatatgtgtccaggaatttatccatttcttctagattttctagtttatttgcgtaccagtaccaaataatataaacagtagtttgtatttctgtgggatcggtggtgatatcacctttatcattttttattgtgtctatttgattcttctctcttttcttctttattagtcttgctagtgttctatcaattttgttgatcttttcaaaaaaccagctcctggattcattgattttttgaagggttttttgtgtctctatctccttcagttctgctctgatcttagttgtttcttgccttctgctagcttttgaatgtgtttgctcttgcttctctagttctgttaattgtgatattagggtgtcaattttagatctttgctgctttctcttgtgggcatttagtgccataaatttcccactatacattgctttaaatgtgtcccagagattctggtatgttgtgtctttgttctcattggtttcaaagaacatctttatttctgccttcatttctttatatacccagtagtcattcaggagcagattgttaagtttccatgtagttgagcggttttgagtgagtttcttaatcctgagttctaatttgattgcactatggtctgagagacagtttgttataatttctgttcttttacatttgctgaggagtgctttacttccaactatgtggtcaattttagaataagtgggatgtggtgctgagaagaatgtatattctgttgatttggggtggagagttctttggtctttgatgatggtgacatacagatggggttttggtggatgtcctttctgtttgttagttttccttctaatagtcaggaccctcaactgcaggtctgttggagtttgctggaggtccactccagaccctgtttgcctgggtgtcaccagtggaggtgtttggcctgctgttaccaactcccaaagtaatgtgaccagggacgcttcactcgtttcttttctactgccttgactcaactcagtgtcatctggctgcttgaagtcttggtttacaataacttttgttattgttgttattctctggctgtcattttgaggctttttccccccacagattttaattgaatgttccagaggggacatatttctcagtggtgggtagtagttggggcattgacagtgttcacgtctgtccttgacactgaccccatgagagataacaagagaagtgggtctgagatcctgcctttctgcagggagcatggaacaagctttacatataatcatgcccattctcctctgtcctgctccccttcctgtctgttctccggtctggctctctttagcccagaaaacaacagtggtttcctctgcatgacactgcctgcatcgtttactgctggaaatcgtcttttctcttctgctggtcagccttggtggattcagcaaggattcaaagcacacgccaaagctaggagactcatacttcttgcttttcaccactattgctgccgcccctttcttgctgtggaacttaagccttctcctgtctctacaccaaccttcctctttgcttgactgttgcctccgtgctctgtccctggggctatcctccacgagagctttggggaagcaatcacctggttggatgctgaaaagtgatacatgccagcccttcctgtcaatggcgatgccgtggctggaaacatgcgcttccactgagcttggctccaggttgccaagagcctgcacctgacaagcaaccaggggggaatccttccgatacacagcaagagcaaaagagagagtctgcattgaaaaccggccctggcccagctggtccattgagaataagaataagaacctggtaaactgcttcttccttccatcaaatgtgtccatcttagctttgggggcctgaatgacaaaagatgggcattgccttacaaacaaaggaacttttcgtttctgtcttgtgcttggactgtgaggctgctctgagtggggaggcat

SEQ ID NO: 11814 - DNA, 490 bp, Homo sapiens
  SIMILAR (1)..(435): 601254mologous to Homo sapiens NAG13,accession number AF194537,Smith-Waterman Score=418.
atgatcaaaaccctcagcaaaataggcatagaagggacataccttaaggtaataaaagccatctatgacaaacccacagccaacattatactgaatggggaaaagttgaaagcattcctcctgagaactggaacaacacaaggatgcccattttcaccatttctattcaacacattatcagaagttctagcgagagcaatcaaacaagagaaagaaatcaagggcatccaaatgggtaaagaggaagtcaaactgttgctttttgctgaagatatgaccgtatacctagaaaaccctaaagactcatccaaaaaactcctagaactgcctctgctgctgatacccaggcaaacagggtctggagtggacctccagcaagctccaacagacctgcagctgagggtcctgactgttagaaggaaaactaacaaacagaaaggacatccacagcaaaaccccatctgtacgtcaccatcatcaaagaccaaag

SEQ ID NO: 11815 - DNA, 683 bp, Homo sapiens
  SIMILAR (116)..(541): 821254mologous to Homo sapiens putative p150,accession number U93572,Smith-Waterman Score=580.
ccaatatcatactgaatgggcaaaagctggaagcattccctttgaaaactggcacaagacaaagatgccctctctcaccactcctattcaacatggtattggaagttctggccaggtcaatcaggcaagagaaagaaataaaagtattcaaataggaagagaggaagccaaattgtctctctttgcagatgacatgattgtatatttagaaaaccccatcgtctcagcccaaaatctccttaagctgataagcaacttctgcaaagtctcaggatacaaaatcaatgtgcaaaaatcacaagtgttcctatacaccaataacagacaaacagagagccaaatcatgagtgaactcctattcacaattgctactaagagaataaaatacctaggaatccaacttacaagggatgtgaaggacctcttcaaggagaactacaaactgctgctcaaggaaataagagaggacacaaacatatggaaaaacattccaggctcatggataggaagaatcaatatccctccgctgctgatacccaggcaaacagggtctggagtggacctccagcaaactccaacagacctgcagctgagggtcctgactgctacaaggaaaactaaccaacagaaaggacatccacaccaaaaccccatctgtacatcaccatcatcaaagaccaaag

SEQ ID NO: 11816 - DNA, 707 bp, Homo sapiens
  SIMILAR (1910)..(3271): 921254mologous to Homo sapiens putative p150,accession number U93563,Smith-Waterman Score=2243.
ttagttgactgtcagctgtccttgctccaggatgctgtttttgacaacggatgttttattgcctttgatgttcattaagaagcttggcgcaaatgttgcctccccctcctcgaagaagcctctgtttgtcataagacttgtgataaccacattgttgcctttggcttgcggcactttaccaacttcatccgtttcacgtacaacattttttagaaccatgcttccccaggcatcccgaatttgctcctccatccacggggactgagagccattactattgctgtatttggtaagcaaaatacgtacatcaggctcgaaccctttaagatcaacgttcttgagcagatcacgaagcatatcgaaaaacctgcacttgcgtccgtccacggtctcctcctcaaagccttctccgaccttgaagttgatctcagtggtgcgcaccgtggtggatgtcttgatgtagaactgatccccgtcctggcggatctccacgtgcggcttggacgcagccgctacggccactttcctcagcatggcgttcacacctttggtctttgatggtggtgacgtacagatggggttttggtgtggatgtcctttctgtttgttagttttccttctaacagacaggaccctcagctgcaggtctgttggagtttgctggaggtccactccagaccctgtttgctgggtatcaccagcggagg

SEQ ID NO: 11817 - DNA, 798 bp, Homo sapiens; identical to SEQ ID NO: 2433
  SIMILAR (352)..(795): 871254mologous to Homo sapiens p40,accession number U93569,Smith-Waterman Score=659.

SEQ ID NO: 11818 - DNA, 441 bp, Homo sapiens
  SIMILAR (179)..(57): 871254mologous to Homo sapiens Human secreted protein, SEQ ID NO: 4473,accession number G00392,Smith-Waterman Score=203.
atgaagcttccagaggaaggatcaggcagcagcatttgccgttctgcaatatttgctgttctgcagcctccactggtgatacccaggcaaacagggtctggagtggacctccagcaaactccaacagacctgcagctgaaggtcttgactgttagaaggaaaactaacaaacagaaaggacatccacaccaaaacccgatctgtacatcaccatcatcaaagaccaaagtctcttgtgagtttgtcgtccccgttcacagcaattcgcgtctagaggccctctttaaggggaccatttggtgggaaaccagagagtattctgggccaccaagggacgttggaaaacaccaggaatatgacacaccaagccacggggagtactgccagactaccactgatgttctgttaaggcccaaggactctcaagtcagcttgtggtga

SEQ ID NO: 11819 - DNA, 852 bp, Homo sapiens
  SIMILAR (1677)..(793): 781254mologous to Homo sapiens hypothetical protein,accession number AL365515,Smith-Waterman Score=1095.
atgaagcttccagaggaaggatcaggcagcagcatttgccgttctgcaatatttgctgttctgcagcctccactggtgatacccaggcaaacagggtctggagtggacctccagcaaactccaacagacctgcagctgaaggtcttgactgttagaaggaaaactaacaaacagaaaggacatccacaccaaaacccgatctgtacatcaccatcatcaaagaccaaagactcatcccgggactgttcacctctccctggatttcagcaagaatctaaggctagggagatttctccccacttagagcagaaaaagggggcctgtttggaagatactcttctggattggaatctggtctgggatcttggtttgggatgccttttgcgtgttttcactttgagtctccctctgttaccgagaaagctcactcttttacccaaacgtgtcaagcctttgaatgcattttgtcttacaatttctgacggaattcttggggatcatggggacacctcttctactccctctttagaagtatctcttccttatgcgaaggcaaatgaggagcaaagtcaagtcttacatggcggcaggcaagagcgcttgtgcagggaactcccatttataaaaccatcagaccttgtgagagtgattcactactatgagaacattgtgggggaaaccactcccgtattcaatgatctccacttggccctacccttgacacatggggattattacaattcaagactactactgggtaataaaaagaaacaagctattgatacatataacaacatggatgaatctccagagaattatgatgaatacaaaaagtcaatcctgaaagattag

SEQ ID NO: 11820 - DNA, 1213 bp, Homo sapiens
  SIMILAR (273)..(106): 391254mologous to Mus musculus odorant receptor,accession number U28773,Smith-Waterman Score=78.
cttaacctctcccactcgaggtttccatgccaccccaatcctgctcgaagcagccctgaaaaacatcacccattatctctccataccaccccccaaaatttttgccaccccaacacttcgccactgtcttgttttgtttttcttattaatacaagaagacagtaatgtcaggcctctgagcctaagcctgcagtgttttgaagttggagagggtcacaggaaaaggaacgcaggaggcttccaggagcgaaaggtagacctgggactgagagctagcaaggaaacaggaacgacacacctacaacttgtattaacagtcagtctggagtatacacaaggaaagctaagtggaaagaagaaaaaggagaaagctagactcttccttgcccctaggtattggaagaagaaaggaaagagggagaagagtaaaaaatccagggtggaacacaacaggtcccagcgagcagagtttgatcctgctggcgtcaaaagggttctagcgctcgtgcactccagatcctgccttgtttgcttgcattccttcctgcaaggagttgagactgccaccctccttgccaacttgagtgtccctgtggtggtcaagaggtttctcatgcccatctgcctgaggccagtggcaagagcaggttgcttcttgctagtccaactcaccggtttccctggagccatctctaactgggaggcacctcccagtaagggtcaactgacacctcatactgccgggtgtccctctgagatgaagcttccagaggaaggatcactcagcgatatttgctgttctgcaatatttgctgttctgcagcctctgctggtgatacccagggaaacagggtctggagtggacctccagcaaactccaacagacctgcagctgagacaaacagagagccaaatcatgagtgaactcccattcacagttgcttcaaagagaataaaatacctaggaatccaacttacaaaggatgtgaaggacctcttcaaggagatctacaaaccactgctcagcgaaataaaggaggacacaaacaaatggaagagcattccatgctcatggttaggaagaatcaatatcgtgaaaatggccatactgcccaaggtaacctatatattcaatgccatccacatcaagctaccaatgacagaattggaaaaaactaaagttcatatggaaccggaaaagagcctgcattga

SEQ ID NO: 11821 - DNA, 1425 bp, Homo sapiens
  SIMILAR (175)..(35): 481254mologous to Bombyx mori silk fibroin (AA 37 - 252),accession number X13869,Smith-Waterman Score=80.
tcatcttggatacaagaggcatgaaccgtcagtgcggaaatccctaagattatttatggaagtgggacctactgctatttctgttcccatctccagaaggtttaagtcagataccttctggaacagtcttttctctgcttcttgtatacttgtaattttggcttgccaagcttcacatgcacaactttccaaaaggtgtttatgacttagatcaaccattgatttgagaagaattagctgtgacaagatataaagacagcacccagatctgtaccataaggtggaacacagatgccccttaatatcttcatgaataccgcttcggctacacccaaacatgcttatatgtggcctacaagctgtgcttctgcttccatttctcacaactgatttctggttttctgggtacttgctcatgttagatgccacacagcagcaaagttctagctgcaggtcgactctaaagatcccagcaaatattaacctgccagccttttgacccccagattgactaaatggattcaactcagagaaatgaggcaatttcttctgagaatgcaatttagggacgtagccagtacaatcctcccagtaagggctgactgatacctcatacaggtgggtgcccctctgggatgaagcttccagaggaaggatcaggcagcaatatttgctgttctgcaatatttgctgttctgcagcctctgctgctgatacccaggcaaacagggtctggagtggacctccagcaaactccaacagacctgcagctgagggacctgacttttctcctccagaggattccagctccttgctagcaatggaataaagctcaatggataatgattttgatgagttgatagaagtaggcttcagaaggtcagtaataacaaacttgtccaagctaaaggaggatgttcgaacccattgcaaggaagctaaaaactggacaatcccaaggatgcgaattctgtcagcaacctgagagaacttggaagtggatctttccacagccccacaggtgaggggcctttgggccaaggcactgttgagagtcgcacctctatcaatttggtctggatttattaaactctgcagggtccgggataggaaagaatgaagtccaggagcagaaacgggcagaagtgggagcccgtgcagctccagagaaggaactgcctgaagcactgtcttggttcctgaaagtactttggtaatggccacagcgtggtccagggagacaaagagcccatgagccaggctgacggctgtgggaatggagagagggacacacatagcaaaaggggttaggagtatctttttctcagagatactctcttccccactatgagaaaaatcgcatttgctggcctctacttccacttcactcactgctaaccaagtgtgtccattatgtttgctcat

SEQ ID NO: 11822 - DNA, 894 bp, Homo sapiens
  SIMILAR (217)..(717): 501254mologous to Homo sapiens p40,accession number U93570,Smith-Waterman Score=439.
atgaagcttccagaggaaggatcaggcagcaacatctgccgttcttcaatatttgctgttctgcagcctccgctggtgatacccaggaaaacagggtctggagtggacctccagcaaactccaacagacctacagctgagggtcctgactattacaaggaaaactaacaaacagaaaggacatccacaccaaaaccccatctgtacgtcaccatcgtcaaagaccaaagaaatgcaaaatgctctggacagtctcagcaacagaattgaacaagtagaagaaagaatttcagagtttaaagacaaggtcttcaaattaatcctattcaataaagacaaagacaaaagaatgagaaaatatgaacaaagcttccaagaagtctgggattatgtcaagcaaccaaacctaagaataattggtgttgccaaggaagaagagaaatctaaaagcttggaaaacatatttgggggaataatcgaggaaaacttccccggcctttctagagacctagacatccaaatacaagaagcacaaagaacacccgggaaattcattgcaaaaagatcttcacctaggcacattgtcatcaggttttccaaagttaagacgacggaaagaatcttaagagctgtgagacagaagcaccaggtaacctacaaaggaaaacttaacagattaacagtcgatttctcagaagaaaccctacaagctagaaggggggcctgcaggccactaacaggagtccctgctctgtctcatacttacactgagaggcatctaacaaacacaagagccatccacctaaagtggtaccaagacagggctaaaatcaagccttcatctgcctgcaaagttgaacacagcaaatcacaacatctccctgaattcagatag

SEQ ID NO: 11823 - DNA, 1133 bp, Homo sapiens
  SIMILAR (739)..(1278): 871254mologous to Homo sapiens Similar to ribosomal protein S2,accession number BC001795,Smith-Waterman Score=815.
ggcagtagaaaagaaacgagtgaagcgtccctggtcacattactttgggagttggtaacagcaggccaaacacctccactggtgacacccaggcaaacagggtctggagtggacctccagcaaactccaacagacctgcagttgagggtcctgactattagaaggaaaactaacaaacagaaaggacatccaccaaaaccccatctgtatgtcaccatcatcaaagaccaaagaactctccaccccaaatcaacagaatatacattcttctcagcaccacatcccacttattctaaaattgaccacatagttggaagtaaagcactcctcagcaaatgtaaaagaacagaaattataacaaactgtctctcagaccatagtgcaatcaaattagaactcaggattaagaaactcactcaaaaccgctcaactacatggaaacttaacaatctgctcctgaatgactactgggtatataaagaaatgaaggcagaaataaagatgttctttgaaaccaatgagaacaaagacacaacataccagaatctctgggacacatttaaagcaatgtatagtgggaaatttatggcactaaatgcccacaagagaaagcagcaaagatctaaaattgacaccctaatatcacaattaacagaactagagaagcaagagcaaacacattcaaaagctagcagaaggcaagaaacaactaagatcagagcagaactgaaggagatagagacacaaaaaacccttcaaaaaatcaatgaatccaggagctggttttttgaaaagatcaacaaaattgatagaacactagcaagactaataaagaagaaaagagagaagaatcaaatagacacaataaaaaatgataaaggtgatatcaccaccgatcccacagaaatacaaactactgtttatattatttggtactggtacgcaaataaactagaaaatctagaagaaatggataaattcctggacacatataccctcccaatactaaaccaggaagaagttgaatccctgaatagaccaataacaggctctgaatttgaggcaataattaatagcctaccaaccaaaaaaagtccaggaccagatggattcacagctgaattctaccagag

SEQ ID NO: 11824 - DNA, 669 bp, Homo sapiens
  SIMILAR (229)..(642): 941254mologous to Homo sapiens putative p150,accession number U93569,Smith-Waterman Score=676.
atgccagtgacacttggtactagtatgaggtcagattccctaggagagccccagacagaggttgagcctccgctggtgatacccaggaaaacagggtctggagtggacctccagcaaactccaacagacctgcagctgagggtcctgactgttagaaggaaaactaacaaacaaaaaggacatccacatcaaaaccccatctgtacgtcaccatcatcaaagaccaaagcccaaaatctccttaagctgataagcaacttcagcaaagtctcaggatacaaaatcaatgtgcaaaaatcacaagcattcttatacaacaataacagacaaacagagagccaaatcatgagtgaactcccattcacaattgcttcaaagagagtaaaatacctaggaatccaacttacaagagatgttaaggacctcttcaaggagaactgcaaaccactgctcaaggaaataaaagaggacacaaacaaatggaagaacattccatactcatggataggaagaatcaatatcgtgaaaatggccatacagcccaaggtaatttatagattcaatgctatccccatcaagctacccataactttcttcacagagttggaaaaaactactttaaagttcatatggaaccaaaaagagcccgcattcccaagacaatcctaa

SEQ ID NO: 11825 - DNA, 1257 bp, Homo sapiens
  SIMILAR (495)..(304): 401254mologous to Homo sapiens Polyproline-rich domain from dynamin,accession number Y56033,Smith-Waterman Score=82.
atgccctattcccagtacaaatttactgtattaatctgttttcatgatgctgataaagacatatctgagactgggaagaaaaagaagtttaattggacttacaatttcacatggctgatgaggcatcagaatcatggtgcgaggcaaaacgcacttcttacatggcagcagcaagagaaaaatgaggaagaagcaaaagcagaaacccctgataaacccatcagatcttttatttccatgacaaacatgaagatccaagggactctcttctacaccaggatctattttgtttattatactgcggtcattcagtgtaattcctggtacatggtccccgggcggggcgtccagaaatcccgcagggatgtggacgggctgcgggaagcaaggagctgcttaagcggcgttcgggactcccggctctcggcccttggaggactgggcggacccagtgcttgggcttttgggggatcggggaggatgcctagcgcagggattcgagcgaaaaggatgcagaatcaggggtggcagccaagggacgtccccgacccgcagcccttcccgcttccgaagagaacaccttgctcacccgaccccagaggctgggcaggagcctgcgatgacggctctgcgggacccagggccaggggctgggctagaaaatggctgccaccccagcagcatgctgttcaggtctctgctgtcctagggaacacccagcagaggagcgacggctctgaacgcggcatgtatttgggtcacttttggcggggagaagggtcccggggaagcaatgggagcctcaggcgagaggggatttctttttgtctgcgcctgacttcaaagtcagtaatcggcccctgtcagcggcgtgacgagaaggattttggctgtttgttagggcgagtcgcggccgcgcacctcggcggacgctccgcagccctcggggcgacggaggcaaagctgaagcaggctcttgcggggatggggtttcctaattccccatctgagcctaagaccaagcgcaacccggaaccctggtttcggttttccagcttcagccaccgtccgaggcctttgcccctcgcactttgccctcgcactcgccacgtgcccctttccagcctaacccttcaggtttgcttcagcatatcaaagccagtgggaaaagcacgcaaattaaggaaaaccacgcgtgagcgcggcttttggggtgagactccaagaccaagggtggaaagcacccttcgattttga

SEQ ID NO: 11826 - DNA, 1068 bp, Homo sapiens
  SIMILAR (20)..(367): 301254mologous to Chlamydomonas reinhardtii vegetative cell wall protein gp1,accession number AF309494,Smith-Waterman Score=92.
atgggcaaatattatacgcaaggcgacaaggtgctgatgccgctggcgattcaggttcatcatgccgtttgtgatggcttccatgtcggcagaatgcttaatgaattacaacagtactgcgatgagtggcagagggataaattggaagaaatcttgcggggattaactccaaggaaaaatgatattggagatgcaatggttttctgtcttaataatgctgaagctgctgaagaaatagtggattgcattactgagtcgttgtccatcttaaagacaccccttcctaaaaagatgaatgaagaaatgctgtgccaagaatttggaagatttggaccgttagccagtgtgaaaatcatgtggcctagaactgatgaagaaagagccagagagagaaattgcggctttgtggcctttatgaatagaagagatgctgaaagagctttaaaaaatttgaatgccactgccttcagacctgctctgtcacatttcccttctctgcccatggacacaacttcacaaatcccaaaacattccagtcaccgtcagttcaacaaacaagctcattctgatcatcaagactcactttcaggcccagtccagtctgaatcaaaatatccatcccatggatccatcccatgggattcaatactcagccttctcaccctcaacacccaacccatcccacccagccttgccctgacccacatggagatggagagtggtctgcacttccactgcccctttacagcatctccaccttcagccgtccctcctccagaattggaaaaaactactttaaagttcatatggaaccaaaaaagagcccgcatcgccaattcaatcctaagccaaaagaacaaagctggaggcatcacactacctgacttcaaactatactacaaggctacagtaaccaaaacagcatggactggaagtcctacagcaattaggcaagctagaacaactaggcaagaaaaagaaatgaaaggcattcaaattggaaaggaagaagtaaaattatctctgttcacagatgacgtaaacttacaggtgagagaaaataagtaa

SEQ ID NO: 11827 - DNA, 902 bp, Homo sapiens
  SIMILAR (121)..(603): 981254mologous to Homo sapiens nuclear pore complex interacting protein NPIP,accession number AF132984,Smith-Waterman Score=820.
aattgaagaacacagtatcatacagtgggaaaaggaaagggcccgattcgttgtctgatggacctgcttgcaaaaggccagctctgttgcattcccaatttttgacaccacctcaaacaccaacgcccggggagagcatggaagatgttcatctcaatgaacccaaacaggagagcagtgctgatctgcttcagaacattatcaacattaagaatgaatgcagccccgtttccctgaacacagttcaagttagctggctgaaccccgtggtggtccctcagagctcccccgcagagcagtgtcaggacttccatggagggcaggtcttttctccacctcagaaatgccaaccattccaagtcaggggctcccaacaaatgatagaccaggcttccctgtaccagtattctccacagaaccagcatgtagagcagcagccacactacacccacaaaccaactctggaatacagtccttttcccatacctccccagtcccccgcttatgaaccaaacctctttgatggtccagaatcacagttttgcccaaaccaaagcttagtttcccttcttggtgatcaaagggaatctgagaatattgctaatcccatgcagacttcctccagtggtcaagcagcaaaatgatgctcacttgcacagctttaacatgaagcccacaagcgcctgtgaaggcatggtggggcacgagatggcctctgactcttcaaacacttcactgccattctcaaacatgggaaatccaatgaacaccacacagttagggaaatcactttttcagtggcaggtggagcaggaagaaagcaaattggcagatatttcccaagaccagtttctttcaaaggatgcagatggtgacacgttccttcatattgctgttgccca

SEQ ID NO: 11828 - DNA, 3089 bp, Homo sapiens
  SIMILAR (1195)..(1572): 881254mologous to Homo sapiens dJ120N9.1 (KIAA0656 protein (similar to clathrin assembly lymphoid myeloid leukemia protein (CALM))),accession number AL109915,Smith-Waterman Score=582.
ggcggacaaaacgccaggcggatctcagaaggccagttcaaagacgagatcatcagatgttcattcatctggatcttcagatgcacatatggatgcatctggaccctcagatagtgatatgccaagtcggacacgacctaagagcccaagaaaacataattataggaatgaaagtgcccgtgaaagcctttgtgattctcctcatcagaatctctcaagacctcttctggaaaacaaacttaaagcattcagtattggaaaaatgagtacagctaagcgaactttaagtaaaaaggaacaggaagaattaaagaaaaaggaggatgaaaaggcagctgctgagatttatgaggagtttcttgctgcttttgaaggaagtgatggtaataaagtgaaaacatttgtgcgagggggtgttgttaatgcagctaaagaagaacatgaaacagatgaaaaaagaggtaaaatctataagccatcttcaagatttgcagatcaaaaaaatcctccaaatcagtcttccaatgaaagaccaccatctcttcttgtgatagaaaccaaaaaacctccacttaaaaaaggagagaaagaaaagaaaaaaagcaatttggaactcttcaaagaagaattaaagcaaattcaagaggaacgtgatgagagacataaaacaaaaggcagattaagtcgatttgaacctcctcagtcagattctgatggtcagcgtcgttctatggacgcgccttcaagaagaaatagatcatctggtgttcttgatgattacgcacctggctcacatgatgtaggagatccaagcactactaatttataccttggaaacattaatccacagatgaatgaagaaatgctgtgccaagaatttggaagatttggaccgttagccagtgtgaaaatcatgtggcctagaactgatgaagaaagagccagagagagaaattgcggctttgtggcctttatgaatagaagagatgctgaaagagctttaaaaaatttgaatggaaaaatgattatgtcttttgaaatgaagttaggttggggtaaagctgtacctattcctccacatccaatatacattccgccttctatgatggaacatacgcttcccccacctccatccggactgccttttaatgcgcagcctagagagcggttaaaaaaccctaatgctcctatgttaccgccacctaaaaacaaagaggattttgagaagactctgtcgcaagccatagtcaaagtggttatcccaacagaaaggaatttgctcgccctgatacatcgaatgatagagtttgttgtacgtgaagggccaatgtttgaagctatgattatgaacagagaaatcaacaatcctatgttcaggttcttatttgaaaaccagacaccagcccatgtttactataggtggaagctttattctattctgcagggagattctccaactaaatggcggacggaagattttcgtatgttcaaaaatggatctttttggaggccaccaccattaaatccgtacttgcatggaatgtcagaagagcaagaaacagaagcttttgtagaggaacctagtaaaaagggagcacttaaggaagaacagagggataaattggaagaaatcttgcggggattaactccaaggaaaaatgatattggagatgcaatggttttctgtcttaataatgctgaagctgctgaagaaatagtggattgcattactgagtcgttgtccatcttaaagacaccccttcctaaaaagattgccagattatatttggtttctgatgttttgtacaactcttcaaccaaaggtggttaatgcttcatattatagaaaattttttgaaacaaagttatgtcagatattttcagacctcaatgccacctatcgtacaattcaaggccatttacaatctgaaaactttaagcaacgggtaatgacttgcttcagagcatgggaagattgggcaatttatccagaaccatttttgatcaaactacaaaatattttcttaggacttgtaaatattattgaagaaaaggaaacagaggatgttccagatgaccttgatggtgcccccatcgaggaagagcttgatggtgcacctctggaagatgtagatggaattcctattgatgctactcccatcgatgatcttgatggagtccctataaaaagtcttgatgatgatcttgatggagtgcctttggatgcaactgaagactcaaaaaagaatgagcctatatttaaagttgccccatcaaaatgggaagctgtggatgaatctgaattggaagcacaggctgttacaacttctaaatgggaattatttgaccagcatgaagaatcagaagaagaagaaaatcaaaatcaagaagaagaaagtgaagatgaagaagatactcaaagttccaaatctgaagaacatcatttgtactctaatccaatcaaagaagaaatgactgagtctaagttctctaagtactctgaaatgagtgaggaaaaacgagccaaacttcgtgaaattgagctcaaagttatgaagtttcaggatgaattggaatctgggaaaagacctaaaaaaccaggccagagttttcaggagcaagtagaacactacagagataaacttcttcaacgagagaaagagaaagagttagaaagagaacgagaaagagacaagaaagataaagaaaaattggaatctcgctccaaagacaagaaggaaaaagatgagtgtactccgacaaggaaggaaaggaagaggcgacacagtacatcccccagcccatctcgcagtagcagtggtagacgagtgaaatccccatcaccaaaatcggagcgatcagagcgttcagaaagatctcataaagagagctcacggtccaggtcatctcacaaagattctcctagagatgttagcaaaaaagccaaaagatcaccatctggttcaaggacacctaaaaggtctaggcgatcacggtctagatctcctaaaaaatcaggaaagaagtccagatcccagtccagatctccacacaggtctcataaaaagtcaaagaaaaacaaacactga

SEQ ID NO: 11829 - DNA, 823 bp, Homo sapiens
  SIMILAR (374)..(820): 891254mologous to Homo sapiens p40,accession number U93569,Smith-Waterman Score=674.
atgagaacaccaaagagcagcatcaaacccagtctaggggaggaaaaggaaaattatagaggttctttgaaagagacagcaccttccttgcaaaaagaatgggcagagcagtcaagcaaaagccaagagacagtgggagtgaagggaataaccagacacttccaggtctcaacactgttggaaagaagagaggataggaagagcaaagcagccaccgctgctgatacccaggcaaacagtgtctggagtggacctccagcaaactccaacagacctgcagctgagtgtcctgactgttagaaggaaaactaacaaacagaaaggacatccacaccaaaaacccatctgtacgtcaccatcatcaaagaccaaagcaaggcaggccaacattcaaattcaggaaatacagagaatgccacaaagatactcctcaagaagagcaactccaagatgcataattgtcagattcaccaaagttgaaatgaaggaaaaaatgttaagggcagccagagagaaaggtcaggttacccacaaagggaaccccatcagactaacagcagatctcttggtaaaaactctacaagccagaagagagtgggggccaatattcaacattctcaaagaaaagaattttcaacccagaatttcatatccagccaaactaagcttcataagtgaaggagaaataaaatcctttacagacaagcaaatgctgagagatttcggcaccaccaggcctgccctaaaagagctcctgaaggaagcactaaacatggaaaggaacaaccagtaccagccactgcaaaaacatgtcagattgtaa

SEQ ID NO: 11830 - DNA, 2590 bp, Homo sapiens
  SIMILAR (935)..(1582): 881254mologous to Homo sapiens putative p150,accession number U93565,Smith-Waterman Score=978.
atgcaaaatgtcccagaggggcttggacttcctattacgtttattaatcatcttgatgaaaatggaaagtctacattgattaaattcactaatgatcctaaactgagcagaggagtaaattccagaaaggatggatttataaggggcagactgacacctcacacagccaggtacccctctgagacaaaacttccagaggaacgatcaggcagcaacatttgctgttcagcaatatttgctgttttgcagcctccgctgctgaaacccaggcaaacagggtctggagtggacctccagccaaactccagcagacctgcagctgagggtcctgactgttagaaggaacactaacaaacagaaaggacatccacaccaaaaccccatctgtacgtcaccatcatcaaagaccaaagaagttgaaaaccttgaaaaaaggttagacaaatggctaactagactaaccaatgtagagaagtccttaaatgacctgatggagctgaaaaccatggcacgagaactacatgacgaaggcacaagcttcagtagccaattcgatcagctggaagaaagggtacctgtgatggaagatcaaatgaatgaaatgaagcaagaagagaagtttagagaaaaaagaatgaaaagaaacgaacaaagcctccaagaaataagggactatgtgaaaagaccaaatctacgtctgattggtgtacctgaaagtgacggggagaatggaaccaagttggaaaacactctgcaggatattatccaggagaacttccccagcctagcaaggcaggccaacattcaaattcaggaaatacagagaatgccacaaagatactcctcaaggagagcaactccaagacacataattgtcagattcaccaaagttaaaatgaaggaaaaaatattaagggcagccagagagaaagaaatacagactaccatcagcgaatactataaacatctctacgcaaataaactagaaaatctagaagaaatgggtaaattactggacacatacaccctcccaagacaaaaccaggaagaagttgaatccctgaatagaccaatagcaggctctgaaattgaggcaataattaatagcctgccaaccaaaaaaagtccaggaccagacggattcacagccaaattctaccagaggcacaaagaggagctggtaccattccttctgaaacaattccaatcaatggaaaaagaggtaatcctcccaaactcattttatgaagccagcatcatcctgataccaaagcctggcagagacacaacagaaaaagagaattttacaccgatatccctgatgatcattgatgcaaaaatcctcaataaaatactggcaaaccgaatccagcagcacatcaaaaagcttatccaccaagatcaagttggcttcatctctgggatgcaaggctggttcaacgaacacaaatcagtaaacgtaattcatcatataaacagaaccaaagacagaaaccacatgattatctcagtagatgcagaaaaggccttcaacaaaattcagcagcccttcatgctaaaaactctcaataaactaggaatccaacttacaagggatgtgaaggaccccttcaaggagaactacaaaccactgctcaatgaaataaaagaggatacaaacaaatggaagaacattccatactcatggataggaagaatcaatatcgtggaaatagccatactgcccaaggtttccctagaaagagaacgacaacatgatcaaacacatgttcagagccaacttgaaaaattggatcttcttgaacaggagtataacaaacttaccacaatgcaggcccttgcagaaaaaaaaatgcaagagttggaagcaaaactccatgaagaagaacaggaaaggaaacgcatgcaagctaaggcagctgagcatccacgtttgtgtttgtatttggcagccatattttctgctcttaagaatcttcaagataagattcgacgcttggaacttgagaggattcaggcagaagaaagtgtgaaaaccttgtctagagaaacaattgaatataagaaagtactggatgaacagatacaagaaagggagaattcaaagaatgaggaatcaaagcacaatcaagaactgacatctcagttgttagctgcagaaaataaatgcaatctattagaaaaacaattggaatacatgcgaaatatgataaagcatgccgaaatggagaggacatctgtcttagagaaacaaactccgctgctgatacccaggcaaagagggtctagagtggacctccagcaaactccaacagacctgcagctgagggtcctgactgttagaaggaaaactaacaaacagaaaggacatccacaccaaaaccccatctgtatgtcaccatcatcaaagaccaaagaggaacgcagctcctcaccaacaacggaacgaagctggacagagaatgactttgacgagttgagagaagaaggcttcagacgatcaaactactctgagctaaaggaggaacttcaaacccatggcaaagaagttaaaaaccttgaaaaaaaaattagacgaatggctaactag

SEQ ID NO: 11831 - DNA, 2584 bp, Homo sapiens
  SIMILAR (1502)..(1951): 531254mologous to Mus musculus MAIL,accession number AB020974,Smith-Waterman Score=408.
atgaagcttccagaggaaggagcaggcagcaacatttgctgttctgcaatttttgctgttttgcagcctcctctggtgatacccaggcaaacagtgtctggagtggacctccagcaaactccaacagacctgcagctgagggtcctgactcttagaaggaaaactagcaagcagaaaggacatacacaccaaaaccccatctgtatgtcaccatcatcaaggaccaaaggtagacagagggataaattggaagaaatcttgcggggattaactccaaggaaaaatgatattggagatgcaatggttttctgtcttaataatgctgaagctgctgaagaaatagtggattgcattactgagtcgttgtccatcttaaagacaccccttcctaaaaaggcgtgcgcgccccgagtagtcagcggtgcggggccggcgggtacctggctggcgctcggcgcgggcgccgcctttcgaccgggactccacggcgccgcgggaggacacccgccaggcagaggagaagtcggaggagtccggacccggcgaacccggcccccgagggccccagaccgagcaactggcgtctcaagccccccggggccggcgtccgccggcaaccccccaaaaagttatagggtacatgtgcacaaggtgcaggtttgctacataggtatacatgtgccatgttggtttgctgcagccgtcaaattgtcatgtacattagatatttgtcctaatgctatggtgtcggcagcgcgccaggtcccaacaggagccggcacccccgtgaggagacaggaaggcagcattgaggtttatgaagatgctggctcccattacctctgcctgctgaaagcccggacccagggacagtgggacatacagctgcactgcttccaacgcccaaggccagctgtcctgtagctggaccctccaagtggaaacgcaccctagtttcctaattccccatctgagcctaagaccaagcgcaacccggaaccctgggtttcggttttccagcttcagccaccgtccgaggcctttgcccctcgcacttggccctcgcactcgccacgtgcccctttccagcctaacccttcaggtttgcttcaggtggggtcgtgggcgccaggttctttctccagctggggggctctgtgtgcccagggcgctcctgcgctgggatctgcgaggagatacccagagccctgaaaagctgtatatgccaaaaacaattaaagaaacttctctgagtacttaccatgtaccaggaattacactgaatgaccgcagtataataaacaaaatagatcctggtgtagaagagagtcccttggatcttcatgtttgtcatggaaataactatgtggatgaaaaaccagcactactgctgctgagcgggaagcttggatgcccctccctcacctcttgctacagcaactgcctcagctatggaaaccgctgtcgactattgcaggaacttgtagtcaaccagcatgtagagcagcagccacactacacccacaaaccaactctggaatacagtccttttcccatacctccccagtcccccgcttatgaaccaaacctctttgatggtccagaatcacagttttgcccaaaccaaagcttagtttcccttcttggtgatcaaagggaatctgagaatattgctaatcccatgcagacttcctccagtgttcagcagcaaaatgatgctcactcgcacagctcaagcatgatgcccagcagcgcctgtgaggccatggtggggcacgagatggcctctgactcttcaaacacttcactgccattctcaaacatgggaaatccaatgaacaccacacagttagggaaatcactttttcagtggcaggtggagcaggaagaaaacaaattggcaaatatttcccagacccagtttctttcaaaggatgcagatggtgacacgaagactgcagcacaggctggagtctggaggaaccaggtggcagagctaggatggagaagaaagattttcgacttggatctaaatgcagcaggggaccaggtcgctgcagagagagtggcagaaactaacagtctagaactatctcaaggctcaggaacttttccttctgggtattattataaagaccagtggaggcccagaaagtttaagatgcgtcagtttaatgaccctgacaacattacagagtgcttacaaagaaaagtggtgcatttatttggtgactcaacaatcagccaatggtttgaataccttactacatttgttccagagagggaggaagaaaggccacaaaaagagacaatacttcaaaactgcatcttcaattgcaaccaaactgttgttgctaagtcaccttataacaaagggatgaagtctcaaagatctgaccctttagtgattgtggaagattctggaaatctcatgttgccaggagataagaaattggatattccctatccactaggttcttctcagcaaagctgcagagtcttaccaggaaaaacaacaacaaaaagaattcccttcaaatttcaagtcaggaaaactcaggccttaatccgaagctcaggatag

SEQ ID NO: 11832 - DNA, 4164 bp, Homo sapiens
  SIMILAR (3093)..(697): 991254mologous to Homo sapiens protocadherin alpha 4,accession number AF152312,Smith-Waterman Score=4045.
atgagcgacgcagaagacgaacgatttctgcagttccaactgaggtaccgggtgtatctcactggggattgtcggacagtgggtgcaggacagtgggtccagcgcaccgagcgtgagccgaagcagggcgaggcattgcctcacccaggaagtgcaaggggttggggagttccctttcctagggatgacggatggcacctggaaaatcgggtcactcccaccctaatactgcgcttttctcacagtcttagcaaacagcacaccaggagaccatattccgcgcctggctcagagggtcctacacccacggagccgtgctcattgctagcacagcagtctgagatcaaactgcaagatggcagcgaggctgggggagggcctctgctgctgatacccaggcaaacagggtctggagtggacctccggcaaactccaacagacatgcagctgagggtcctgactgttagaaggaaaactaacaaacagaaaggacagccacaccaaaaccccatctgtacgtcaccatcatcaaagaccaaagcaccacaccacacctattccaaaactgaccacatagttggaagtaaagcactcctcagcaaatgtaaaagatcagaaattataaccaactgcctctcagaccacagtgcaatcaaactagaactcaggattaagaaacgcattcaaaaccgctcaactacatggaaactgaacaacctgctcctgaatgactactgtgtacataacgaaataaaggcagaaataaagatgttctttgaaaccaacgagaacaaagacacaacataccagaatctctgggacacattcaaagcagtgtgtagagggaaatttagagcactaagggcccacaagagaaagcaggaaagatctaaaattgacaccctaacatcacaattaaaagaactagagaagcaagagcaaacacattcaaaagctagcagaaggcaagaagtaactaagatcagagcagaactgaaggaaacagagacacaaaaaaaaaccttcaaaaaatcaatgaatccaggagctgaaatacaaactaccatcagagaatactataaacacctctatgcaaataaactagaaaatctggaagaaatggataaattcctcgacatatacactctcccaagactaaaccaggaagaagttgaatctctgaatagtccaataacaggctctgaaattgaggcaataattaatagcttaacaaccaaaaagattccaggaccagatggattcacagccgaattctaccagaggtacaaggaggagcagcagcacatcaacaagcttatccaccatgatcaagtgggcttcatccctgggatgcaagactggttcaacatacgcaaatcaataaatgcaatccagcatataaacagaaccaatgacaaaaaccacatgattatctcaatagatgcagaaaaggcctttgacaaaattcaacaacccttcatgctaaaacctctcaataaattaggtattgatgggacgtatctcaaaataataagagctatttatgacaaacgcacagccaatatcatactgaatgggcaaaaactggaagcattccctttgaaaactggcacaagacagggatgccctctctcaccactcctattcaacatagtgttggaagttctggccagggcaattaggcaggagaaggaaataaagggtattcaattaggaaaagaggaagtcaaattgtccctgtttgcagacgacatgattgtatatctagaaaaccccactgtctcagcccaaaatctccttaagctgataagcaacttcagcaaagtctcaggatacaaaatcaatgtacaaaaatcacaagcattcttatacaccaacaacagacaaagagagagccaaatcatgagtgaactcccattcacaactgcttcaaagagaataaaatacttaggaatccaacttacaagggatgtgaaggacctcttcaaggcgaactacaaaccactgctcaaggaaataaaagaggatacaaacaaatggaagaacattccatgctcatgggtaggaagaatcaatattgtgaaaatggccatactgcccaaggtaatttatagattcagtgccatccccatcaagctaccaatgactttcttcacagaattggaaaaaactactttaaagttcatatggaaccaaaaaagagcccgcatcgccaagtcaatcctaagccaaaagaacaaagctggaggtgtcacactacctgacttcaaactatactacaaggctacagtaaccaaaacagcatggtactggtaccaaaacagagatacagaccaatggaacagaacagagccctcagaaataatgccacatatctacaactatctgatctttgacaaatctgacaaaaacaagcaatggggaaaggattccctatttaataaatggtgctgggaaaactggctagccatatgtagaaagctgaaactggatcccttccttacaccttatacaaaaatcaattcaagatggattaaagatttaaacgttagacctaaaaccataaaaatcctagaagaaaacctaggcaataccattcaggacatagtcgtgggcaaggacttcatgtctaaaacaccaaaagcaatggcagcaaaagccaaaattgacaaatgggatctaatgaaactaaagagcttctgcacagccaaagaaattaccatcagagtgaacaggcaacctacaaaatgggagaaaatttttgcaatctactcatctgacaaagggctaatatccagaatctacaatgaactcaaacaaatttacaagaaaaaagcaaacaaccctattaaaaagtgggcaaaggacatgaacagatacttctcaaaagcagacatacatgaggctgatgaacatatgaaaaaaagctcaacatcactgatcattagagaaatgcaaatcaaaatcacgctgagataccatctcacaccaccttcgctgctgatacccaggcaaacagggtctggagtggacctccagcaaactccaacagacctgcagctgaaggtcctgactgttagaaggaaaactaacaaacagaaagtacatccacaccaaaaccccatctgtacatcaccatcatcaaagaccaaagaactagaaaagcaagagcaaacacattcaaaagctagcagaaggcaagaaataactaagatcagagcagaactgaaggaaatagagacacaaaaaaaccttcaaaaaatcaatgaatccaggagctggtttttggaaaaggtcaacaaaattgatagactgctagcaagactaataaagaagaaaagagagaaggatcaaatagatgcaataaaaaatgataaaggggatatcaccaccgatcccacagaaatacaagctaccatcagagaacactataaacacctctacgcaaataaactagaaaatctagaagaaatggataaattcctggacacatacactctcccaagactaaaccaggaagaagttgaatctctgaatagaccaataacaggctctgaaattgaggcaataatcaatagcttaccaaccaaaaagagtccaggaccagatggattcacagccaaattctaccagaggtacaaggaggaactggtaccattccttctgaaactattccaatcaatagaaaaagagggaatcctccctaactcattttatgagtccagcatcatcctgataccaaagccgggaagagacacaaccaaaaaagagaattttagaccaatatccttgatgaacattgatgcaaaaatcctcagtaaaatactggcaaaccgaatccagcagcacatcaaaaagcttatccaccatgatcaagtgggctacatccctgggatgcaaggctggttcaacatatgcaaatcaataaatgtaatccagcatataaacagaaccaaagacaaaaaccacatgattatctcaatagatgcagaaaaggcctttgacaaaattcagcaacgtttcatcctgaaaactcttaatgaattaggtattgatgggacatatctcaaaataataagagctatctatgacaaacccacagccaatatcatactgaatagggaaaaactggaagcattccctttgaaaactggcaaaagatag

SEQ ID NO: 11833 - DNA, 444 bp, Homo sapiens
  SIMILAR (114)..(515): 701254mologous to Canis familiaris splicing factor,accession number AJ388517,Smith-Waterman Score=428.
atgaaagccccgtggacaggacagtatagatatatcagtccaaaagaccttaaagtcaccattgggaagatcaattaccagtttgcaggatacagtcaagattcacaagaattttttctgttcctaatggatggtctccgtgaagatctaaataaaactgataatcggaagacatataaagaagaaaataatgatcatctcaatgactttaaagctgcagaacatgcctggcagaaacacaagcggctctatgagtctattattgttgcactttttcaggatcactgcggtgggctggatggaggccattacacagcctactgtaaaaatgcagcaaaacagcggtggtttaagtttgatgatcatgaagtttctgatatctctgtttcttctgtgaaatcttcagcagcttatatcctcttttatacttctttgggaccatga

SEQ ID NO: 11834 - DNA, 4391 bp, Homo sapiens
  SIMILAR (1068)..(1547): 941254mologous to Homo sapiens putative p150,accession number U93572,Smith-Waterman Score=739.
gtgagctgggctggcttccgtcctggtagccaaggctaattctccctcgagttcttgggagatgggcatttggcgagaaggctggcgttagtgaagcgcgcccggcgtcacggtgagtgcgggtcttgggccctagcacctgttctctgggaagtcgtccgctgtgaacgatgaacgcctttccttccaccagctgctggttaccccggagacaagctctgtccgcggagaggagtgggacaactcctaaaggaaagaagcacttgtaaggaaatatagcatccattgtgaaagtggaaaagtaaagataattcatcatgcctgctgtggcttcagttcctaaagaactctacctcagttcttcactaaaagaccttaataagaagacagaagttaaaccagagaaaataagcactaagagttatgtgcacagtgccctgaagatctttaagacagcagaagaatgcagattagatcgtgatgaggaaagggcctatgtactatatatgaaatacgtgactgtttataatcttatcaaaaaaagacctgatttcaagcaacagcaggattatttccattcaatacttggacctggaaacatcaaaaaagctgtcgaagaagctgaaagactctctgaaagccttaaattaagatatgaagaagctgaagtccggaaaaaacttgaggaaaaagacaggcaggaggaagcacagcggctacaacaaaaaaggcaggaaacaggaagagaggatggtggcacattggctaaaggctctttggagaatgttttggattccaaagacaaaacccaaaagagcaatggtgaaaagaatgaaaaatgtgagaccaaagagaaaggagcaatcacagcaaaggaactatacacaatgatgacggataaaaacatcagcttgattataatggatgctcgaagaatgcaggattatcaggattcctgtattttacattctctcagtgttcctgaagaagccatcagtccaggagtcactgctagttggattgaagcacacctgccagatgattctaaagacacatggaagaagagggggaatgtggagtatgtggtacttcttgactggtttagttctgccaaagatttacagattggaacaactctccggagtctgaaagatgcacttttcaagtgggaaagtaaaactgtcctgcgcaatgagcctttggttttagagggaggctatgaaaactggctcctttgttatccccagtatacaacaaatgctaaggtcactccacccccacgacgccagaatgaagaggtgtctatctcattggattttacttatccctcattggaagaatcaattccttctaaacctgctgcccagacgccacctgcatctatagaagtagatgaaaatatagaattgataagtggtcaaaatgagagaatgggaccactgaatatatcaactccagttgaaccagttgctgcttctaaatctgatgtttcacccataattcagccagtgcctagtataaagaatgttccacagattgatcgtactaaaaaaccagcagtcaaattgcctgaagagcatagaataaaatctgaaagtacaaaccatgagcaacaatctcctcagagtggaaaagttattcctgatcgttccaccaagccagtagttttttctccaactctcatgttaacagatgaagaaaaggctcgtattcatgcagaaactgctcttctaatggaaaaaaacaaacaagaaaaagaacttcgggaaaggcagcaagaggaacagaaagagaaactgaggaaggaagaacaagaacaaaaagccaaaaagaaacaagaagctgaagaaaatgaaattacagagaagcaacaaaaagcaaaagaagaaatggagaagaaagaaagtgaacaggccaagaaagaagataaagaaacctcagcaaagaggggcaaagaaataacaggagtaaaaagacaaagtaaaagtgaacatgaaacttctgatgccaagaaatctgtagaagatagggggaaaaggtgtccaaccccagaaatacagaaaaagtcaacaggagatgtgccccatacatctgtgacaggggattcaggttcaggcaagccatttaagattaaaggacaaccagaaagtggaattctaaggacaggaacttttagagaggatacagacgataccgaaagaaataaagctcaacgagaacctttgacaagagcacgaagtgaagaaatggggaggatcgtaccaggactgccttcaggctgggccaagtttcttgacccaatcactggaacctttcgttattatcattcacccaccaacactgttcatatgtacccaccggaaatggctccttcatctgcacctccttccacccctccaactcataaagccaagccacagattcctgctgagcgggatagggaaccttccaaactgaagcgctcctactcctccccagatataacccaggctattcaagaggaagagaagaggaagccaacagtaactccaacagttaatcgggaaaacaagccaacatgttatcctaaagctgagatctcaaggctttccgccttcctcagattcggaaccctcaatccctgtttttgggaggttcctggacccagctccttacctggaccctcccgaccctagggaaataccttggttatatgaaccctcaatattgcaagtcccccatgtaaccggcccccacatttggctgattatttccaacccgaaactgttatccaggatgatattaacaggtcaaatttgttggggcataaaggtgaagtggcagaagaatttggtataatcatgaaagccctgtggacaggacagtatagatatatccagcccaaaggactttaaaatcacccattgggaagatcaatgacccagtttgcaggatacagtcagcaagattcacaagaattgcttctgttccctaatggatggtctccatgaagatctaaataaaagctgataatcggaagagatataaagaagaaaataatgatcatctcgatgactttaaagctgcagaacatgcctggcagaaaacacaagcagctcaatgagtctattatttgttgcactttttcagggtcaattcaaatctacagtacagtgcctcacatgtcacaaaaagtctaggacatttgaggccttcatgtatttgtctctaccactagcatccacaagtaaatgtacattacaggattgccttagattattttccaaagaagaaaaactcacagataacaacagattttactgcagtcattgcagagctcgacgggattctctaaaaaagatagaaatctggaagttaccacctgtgcttttagtgcatctgaaacgtttttcctacgatggcaggtggaaacaaaaattacagacatctgtggacttcccgttagaaaatcttgacttgtcacagtatgttattggtccaaagaacaatttgaagaaatataatttgttttctgtttcaaatcactacggtgggctggatggaggctttttacacagcctattgtaaaaatgcagcaggacaacggtggtttaagtttgatgatcatgaagtttctgatatctccgtttcttctgtgaaatcttcagcagcttatatcctcttttatacttcattgggaccacgagtaactgatgtagccacataaggagacataggttataaactagttatcttttaaaaggctcagcaacacaactcttgaaatgcttatcaggataatggtagctatagctggccatttagaggaattctaggacagtgggagctgtgttactagcactatataattccggtcagtgctgacaaataacatttaacaagtattgcagtaatcatcacttacaggtaccatttatttcaaaacaacttttttagtctgctccaaagttaaaataattaactagctaagcattattattcaactggtctaaaaactattgttatctttttttttccttttcactgttatggccttttcacatttctaaatcccatcttgatatactatgaatactctagaatgatgtaaagcagataggaatgtatgtgtacatatttattgcatacttgcacatcaaatcgatgtacatagtttaacacgtggtccttttgtgaaacctagaactcagaggattgctttttttctttcagcctattttgagttaacttcagtcctttcttagggaaatgacagggcaaagcaatttttctgttggctttgggctgtatttgtgcactaaatctttattctaaaaaaaaaaatggaaactttaatttttttaaaacgggaatttcatttacagctacattaaaatcttaatgagaaaaat

SEQ ID NO: 11835 - DNA, 612 bp, Homo sapiens
  SIMILAR (391)..(1095): 821254mologous to Escherichia coli FecA,accession number M63115,Smith-Waterman Score=960.
atggcgcccagccggaatggcatgatcttgaagccccactttcacaaggactggcagcggcgcgtggccacgtggttcaaccagccgacgcggaagatccgcagactcagggccttgcaagccaaggcgcaccgcatcggcccgcgtcacgcatcggggcccatccggcccatcgtgcgctgcacaccaccctccctccccgcccccgtggttccgtaccacacggaggcgcccgtcggccgcggcttcagcctggaggagctcagggtggccggcattcacaagaaggtggcccagatcgttggcattgctgtggatccgaggaggcggaacaagtccattgctgtccctgcaggccaacgaagccctcggacccccaagaagggagacagttctgctgaagaactgaaactggccactcagctgacaggaccggtcatgcccacccggaatgtctataagaaggagaaagctcgaatcgtcactgaggaggagaagaatgtcaaagcctttgctagtctctgcatggcccgtgccaacgcccggcttttcggcatacgggcaaaaagagccaaggaagctgcagaacagaatgttgaaaagaaaaaataa

SEQ ID NO: 11836 - DNA, 1047 bp, Homo sapiens
  SIMILAR (101)..(727): 931254mologous to Escherichia coli inner membrane copper tolerance protein,accession number Z36905,Smith-Waterman Score= 1014.
gccttcgtgtagacaacgcgcccgcccacgcgtccgggctgtttttctgcgcaggagccgcagggaccgtattgtttgccatggcgcccagccggaatggcatggtcttgaagccccacttccacaaggactggcagcgggcgcgtggccacgtggttcaaccagccggcccgggaagatccgcagaacgtaggccccggcaagccaaggcgcgccgcatcggccccgcgccccgcggtgggggtcccatccggcccatcgtgcgctgccccacgggtcgggtccacaacggaagttggcgccccggccgcgggtttcagcctggaagaagctcaagggtggccggccattcaccaagaaaggtggccccggacccatccggcatttctgtggatccgaaagaggcgggaaacaagttcccacgggagtcccctgcaggcccaacgtgcaagcgggctgaaggaattaccgctcccaaactcaatcctcttccccaaggaagccctcggcctctcattatagggagacagttctgctgaagaactgaaactgggccacccagcctgaccggaccggtcatgcccgtccggaacgtctataagaaggagaaagctcgagtcatcgactgaggaagttatagaatttcaaagccttcgctagtctccgtatggcccgtgccaaacgcccggctcttcggcatacgggcaaaaagagccaaggaagccgcagaacaggatgttgaaaagaaaaaataaagccctcctggggacttggaatcagtcggcagtcatgctgggtctccacgtggtgtgtttcgtgggaacaactgggcctgggatggggcttcactgctgtgacttcctcctgccaggggatttggggctttcttgaaagacagtccaagccctggataatgctttactttctgtgttgaagcactgttggttgtttggttagtgactgatgtaaaacggttttcttgtggggaggttacagaggctgacttcagagtggacttgtgttttttctttttaaagaggtgaggat

SEQ ID NO: 11837 - DNA, 330 bp, Homo sapiens
  SIMILAR (777)..(691): 961254mologous to Homo sapiens FLJ00071 protein,accession number AK024478,Smith-Waterman Score=153.
atggatgtctttgcagggggtctgcttagacatggatcaggctcgcagaacggaataaataaggcggtgactgacttcaagacattgagaacaaaagcccatggcacacaacaggagctacacactgctggcatcatcataggcatgcaagccatttgcagcccagctgtgtgtaacagcatctcaaaccctgtcaccaaggagatgctgtttgagttcatcgacagatgtactgcagcttctcaaggacagaagcgaaaacatcatttggaccctgacacggagctcatgccaccaccacctcccaaaagaccacgccctttaacctaa

SEQ ID NO: 11838 - DNA, 759 bp, Homo sapiens
  SIMILAR (7)..(519): 781254mologous to Homo sapiens unnamed protein product,accession number AK023130,Smith-Waterman Score=771.
atggcgcgatctcagctcaccgcaacctccgcttcctgggttcaagtgattctcctgcctcagcctcccaagaacactggggcacagaaacactggcccactgaaggggaagcaaaggaacactgtgtaagtgatgactctgagagcactttgaaagctggagggcagcacagaataaaacagggtggaaatagttcttcaggagcaagagagcctgcaccaaatattctgaatagtagaaggtcttggtggactttggttgctaaggcagcagctgtcacagtgattataagggtcattctcatggcagcaattcttaggggcactttggcaaaggaagtgaattggtgggttcttgatctcactgacttcaagaatgaagccgcggaccctcgcgctagacataaagattctccaagtccccaccagactcaggagcccagctggcttcactcagtggatcccacaccggggccacaggtggagctgcctgccagtcccacgatgtgcgccggcacttctcagcccttggtcagtcgatgggactggtcgccgtggagcaggaagcggcacatcatatttgctccaagtagccacaacaaatatgctggagaatcatttcctggaatctatgatgctatctttgatattgaaaataaagccaactctcgtttggcctggaaagaagtaaagaaacatatttctattgcagcttttacaattcaagcagcagcaggaactctgaaagaagtattatag

SEQ ID NO: 11839 - DNA, 222 bp, Homo sapiens
  SIMILAR (140)..(202): 471254mologous to Xenopus laevis forkhead-domain-containing protein 5,accession number AF064810,Smith-Waterman Score=55.
atgcccgatcgcctcagaagcccgatagaccatcatggatgccgagctttaggtaactctcacagtggaggcctcagttctcctacttgtgatggctggcaaacgctgatgcctatggggccagcagttctttctctcaccctgtttattaccacaattaatcaccagcagcacaacctcaccttcgccgacctctccacaggaaagaaaataaaatattga

SEQ ID NO: 11840 - DNA, 229 bp, Homo sapiens
  SIMILAR (39)..(377): 771254mologous to Homo sapiens dJ774I24.2 (NEURONAL MIGRATION PROTEIN ASTROTACTIN),accession number AL031290,Smith-Waterman Score=429.
ctttgcctctggctgtgtggcgctgcctgtgttgatgaacatcaaggctgtgattgagcagcggcagtgcactggggtctggaatcacaaggacgagttaccggacctgggtgcagccgcaggctccaagcgccccacctgtgtgataatggtcaagccccatgaggagtaccaggaggcttacgatgagtgcctggaggaggtgcagtccctgcccctacccctatga

SEQ ID NO: 11841 - DNA, 570 bp, Homo sapiens
  SIMILAR (1)..(273): 821254mologous to Rattus norvegicus ribosomal protein L15,accession number X78167,Smith-Waterman Score=410.
atgggtgcatacaagtacatccacgagctgtggaggaagaagcagtctgatgtcatgagctttcttctgagggtccgctgctggcagtaccgccagctctctgctctccacagggctccccgccccacccggcccgataaagtgcaccaactgggctacaagatcaagcaaggttatgttatctacgggattcgtattctccgtgatggccgaaaatgctcagttcctaagggtgcaacttacggcaagcctgtccatcatgctattggaagaaatcctgacacccagtggatcaccaaaccagtccacaagcacaaggagatgcgtgggctggcatgtgcaggccaaaagagccatggccttggaaagggccggcctccccaattaggcaacgataaagccattggtgtggtcagatccctcctgggacaggatgttaaccctcagcagctcctgaaccatgggagctggtccctgtcaatgtcacggaaacagaacaagaggaggcttcaaagaaatcagttgcccgcactccctgattgcaaccaggccttatctagtgccttttaa

SEQ ID NO: 11842 - DNA, 1042 bp, Homo sapiens
  SIMILAR (2)..(970): 911254mologous to Homo sapiens dJ423N22.1.2 (mouse Astrotactin isolog) (isoform 2),accession number AL022145,Smith- Waterman Score=1534.
ggaattcggcggcagccatcaggtaggctgcgttgaggatctttgctcttccatccgcctttgatcgtcttcctcttcagccatccaggtaagccaagatgggtgcatacaagtacatccaggagctatggagaaagaagcagtctgatgtcatgcgctttcttctgagggtccgctgctggcagtaccgccagctctctgctctccacagggctccccgccccacccgggcctgataaagcgcgccgactgggctacaaggccaagcaaggttacgttatatataggattcgtgttcgccgtggtggccgaaaacgcccagtttcctaagggtgcaactttacggcaagcctgtccattcatgggtgtttaaccagctaaaagttttgcttcgaagcctttcagttccgttggcaggagggagcgagcttgggacggcacttgtggggggcttcttgaggagttcctgaatttttttaattgggtttgggttgaaggatttccacattacaaattttttttgaggttatcctcatttgatcccattccataaaagctatcagaagaaattcctggacacccagtgggatcaaccaaaccagtcccacaagcacaggggagatgcgtggggctgacatctgcaaggcccgaaaagagccgtggccttggaaagggccacaagtttccaccacactattggtgggctctccgccgggcaacttggagaaggcgcaatactctccaagctccaccgttaccgctaatataagtaaagtttgtaaaattcatacttaataaacaatttaggacagtcatgtctgcttacaggtgttatttgtctgttaaaactagtctgcagatgtttcttgaatgctttgtcaaattaagaaagttaaagtgcaataatgtttgaagacaataagtggtggggtatcttggttctaataagaataaacttttttgtctttgctttatcttattagggagttgaatgcagtgtataaaacatactgtgtggtataacaggcttaataaattcttt

SEQ ID NO: 11843 - DNA, 447 bp, Homo sapiens
  SIMILAR (421)..(356): 541254mologous to Brassica napus LFY4,accession number AF140051,Smith-Waterman Score=48.
gcgggcgcctcccccagcctcgctgccgccttgcagtttgatctcagactgctgtgctagcaatcagcgagactctgtgggtgtaggaccctccgagccagtgagatgaacccggtacctcagatggaaatgcagaaatcacccgtcttctgcgttgctcacgctgggagctgtggaccagagctgttcctattcggccatcttggctcctcccccgggtgttggtgtccctctgttgcccaggctggagtgcagtggcaagactggctcactgcaacctccacctcctgggatcaagcgatcctcccatctcatcctccaggagctgggactaaagacagttgaccattaaacaacacaggtttgaactgagtggatccacttatatgcatacgtgcattttctcctgactcggccacccctgagacagcaagaccaatcactcct

SEQ ID NO: 11844 - DNA, 945 bp, Homo sapiens
  SIMILAR (497)..(411): 961254mologous to Homo sapiens bK126B4.2 (novel protein),accession number AL022316,Smith-Waterman Score=140.
atggcgggcgcccctcccccagcctcgctgccgccttgcagtttgatctcagactgctgtgccagcagtcagcgagactccgtgggctcgtcggaaaagcgcggtattcgggtgggagtgacccgattttccaggtgccctccgtcacccctttctttgactcggaaagggaactccctgaccccttgcgcttccccaatttgtctttcatggtcacatgatggctgtagcaactccagaagttatatttacataactccaagttacttgaccacagcacgaacttctttcccagcgttggaaattctggccagggcaatcaggcaggagaaagaaataaagggtattcaattaggaaaagaggaagtcaaattgtccctgtttgcagatgacatgattgtacatttagaaaaccccatcatctcagcccaaaatctgggacaaacagagagccaaatcatgagtggactcccattcaaaattgctacaaagagaataaaatacctaggaatccaacttacaagggatgtgagggatctcttcaagaactacaaaccactgctcaacgaattaaaagagggcacaaacaaatggaagaagaacatcctgtcctcatggataggaagaatcaatatcgtgaaaatggccatactgcccaagaagtggaattttaagcccaagggtggaaacttagaatttgaaggaacctcaagatatcatctggctgaagcctttgccttagtccctaagtgtcattcgcacatcctctgtgcttcacctaactacaacttggccaaagctgttgctactaatttcagtttacttagaattagttcaattgttcaattcccacttatgagtgagaacacatggacacaaggagaacaaggagaaaacatggacacagggaggggaacatcacccatggggcctgttgggggatga

SEQ ID NO: 11845 - DNA, 465 bp, Homo sapiens
  SIMILAR (168)..(380): 781254mologous to Homo sapiens dJ222E13.1 (novel protein with some similarity to Drosophila KRAKEN),accession number Z93241,Smith-Waterman Score=277.
atggcgggcgcccctcctgcagcctcgctgccgccttgcagtttgatctcagactgctgtgctagcaatcagcaagactccatgggcgtaggaccctccaagccagaagctaaaaaccttgagaaaagattagacgaatggctaactacaataaccaatgaagagaagtccttaaatgacctgatggagctgaaaaccatgacacgagaactacgtgacgcatgcacaagcttcagtacccgattcgatcaactggaagaaagggtatcagtgattgaagatcaaatgaatgaaatgaagcaagaagagaagtttggagaaaaaagagtaaaaagaaacgaacaaagcctccaagaaatatgggactatgtgaaaagaccaaatctgcgtctcattggtgtacctgaaagtgacggggagaatggaaccaagttggaaaacactcttcaggatatcatccagtag

SEQ ID NO: 11846 - DNA, 441 bp, Homo sapiens
  SIMILAR (145)..(435): 551254mologous to Homo sapiens p40,accession number U93570,Smith-Waterman Score=297.
atggcgggcgcccttcccccagcctcgctgccgccttgcagtttgatctcagactgctgtgctagcaatgagcgtagctccatgggcataggaccctctgagccatgtgcaggatataatctcctggtgtgccgtttgacaaagaaaaaaagaataagaagtacgaacaaagtctgggattatgttaaacgaccaaatctaaggataattggtgttcctgaggaagaagagaattctaaaagttgtgaaaacatacttggggaaataattgaggaaaacttccccagccttgctacagacctagacatccaaatacaagaagcacaaagaacaccccagaaattcatcacagaaagatctttgcctaggtacattgtcatcagattatccaaagttaagacaaaggaaagaatcttaagagctgtgagacagaagcaccag

SEQ ID NO: 11847 - DNA, 268 bp, Homo sapiens
  SIMILAR (1)..(87): 791254mologous to Homo sapiens Human secreted protein sequence encoded by gene 2 SEQ ID NO:250,accession number Y91577,Smith-Waterman Score=123.
atggtgggcgcccctaccccagcctcactgctgccttgcagtttgatctcagactgctgtgctagcaatgagcgaggctccgtgggcgtaggaccttccaagccaggtgcaggatataatctcctgccctacttcttgcttcccaaggtctaccaggactcagggctggggtcggaaggaagaaagttggagtacgtggcttttgcaactctccctgggccatatgacattcttctctctttgggttcattgaacagggaatatacag

SEQ ID NO: 11848 - DNA, 708 bp, Homo sapiens
  SIMILAR (131)..(349): 691254mologous to Homo sapiens Human Hydrolase protein-15 (HYDRL-15),accession number Y71117,Smith-Waterman Score=239.
atggcgggcgcccctcccccagcctcgctgccgccttgcagtttgatctcagactgctgtgctagcagtcagcgagactccgtgggcgtaggaccctctgagccaggtgcgagatataatctcgtggtgtgccgttttttaagccggttggaaaagcgcggtattcgggtgggagtgacccgattttccaggtgccgttcgtcacccctttctttgactaggaaagggaactccctgaccccttgcgcttcccaagctgggagctgtggaccggagctgttcctattcggccatcttggctcctcgcagttcattctttgtggggttaattggaagcagctgcagcaggagtattcacaagaaaacaggacacacccacagccaagctataggaagcctgtcggaaaagtgcagtattcgggtgggagtgacccgattttccaggtgccatctgtcacccctttctttgactcagaaagggaactccctgaccccttgcacttcccaaacaaaggtggacaggctgatggcaacatgggtcagggagaggatattgccactactggggatggggaagctgtttcttttggcaaaaaaacttcatcagagtttacaaactcagtgtcctcagcttcatcagggtcctccaacacatccccattccaagtttcagggtcccatgcttttccaatcaatgccttcatttaa

SEQ ID NO: 11849 - DNA, 834 bp, Homo sapiens; identical to SEQ ID NO: 7585
  SIMILAR (587)..(399): 571254mologous to Homo sapiens Human secreted protein, SEQ ID NO: 7083,accession number G03002,Smith-Waterman Score=176.

SEQ ID NO: 11850 - DNA, 1305 bp, Homo sapiens
  SIMILAR (256)..(501): 331254mologous to Mus musculus collagen type XIV,accession number AJ131395,Smith-Waterman Score=84.
atgctgattatgcaccaagttgtctgtgcgaccaccaatcccgctaaaattcaggccattctgcaggcatttcacgagatcttcggcgaaggatcctgccatattgcatccgttgccgtcgagagcggtgtaccggaacagccctttggcagtgaggaaacgcgcgctggcgcacgaaatcgggtagccaatgcccgccgtttacttccagaggctgatttttgggtggcgattgaagctggcatcgatggtgacagcactttcagttgggtggtgattgaaaacgccagccagcgcggcgaggcgcgttcggctactttgccgttgcctgcggtgattctggaaaaagtgcgtgaaggtgaggcgcttggtcccgtgatgtcgcgttataccggtattgatgagattggtcgtaaggaaggggcgatcggcgtgtttaccgccgggaaactcactcgcgccagcgtctatcaccaggcgacaggactgtcagctgtaggtctgttggagtttgctagaggtccactccagaccctgtttgcctgggtatcagcagcagtggctgcagaacagcggattttcgtgaactgtgaatgctgctgtccagtcgttcctctggaagttttgtctcagaggagtacctggccgtcctcgctgctgccttgcagtttgatctcagactgctgtgctagcaatcagcaagactccgtgggcataggaccctccgagccaggtgcgggatataatctcccggtgcgccgttttttaagcccgtcggaaaagcgcagtattcgggtgggagtgacccgattttccagcagtggctgcatgacactgagcaagaatttgtgtgcgttgaggagggaaagtgcagtgattgtgggcctgtgcattggaactcagtgctgctctgccatagcagaaagcaaccctgggcagaactcagccaacacccatggaggagcatttaaactggccctagccagagtcagttttcacgctgctgataaagacatacccgagactgggaagaaaaagaggtttaattggacttacagtttcacatggctgaggaggcctcagaatcatggtgggaggcgaaagccacttcttatctggcagcggcaagagaaaatgaggaagacgcaaaagcggaaacccctgataaacccatcagatctcgtgagacttattcactaccacgagaacaatatgggggaaactgcccccatgattcaaattatctcccacctggtccctcccacaacaacacgtgggaattatgggagctacaattcaaattga

SEQ ID NO: 11851 - DNA, 1370 bp, Homo sapiens
  SIMILAR (313)..(1110): 391254mologous to Caenorhabditis elegans liprin-alpha homolog SYD-2,accession number AF170122,Smith-Waterman Score=491.
atgtcggaaggaaacgccgccggacgcccagcacggcagggcccggaccttctcctgactggggcccgggggtcatcgggcggcggcggcctcccctcacccccggccgttccctccatccgttccagggacctaaccctcgggggagtcaagaagaaaaccttcaccccaaatatcatcagtcggaagatcaaggaagagcccaaggaagaagtaactgtcaagaaggagaagcgtgaaagggacagagaccgacaacgagaggggcatggacgagggcgacgccgtccagaagtgatccagtctcactccatctttgagcagggcccagctgaaatgatgaagaaaaaagggaactgggataagacagtggatgtgtcagacatgggaccttctcatatcatcaacatcaaaaaagagaagagagagacagacgaagaaactaaacagatcttgcgtatgctggagaaggacgatttcctcgatgaccccggcctgaggaacgacactcgaaatatgcctgtgcagctgccgctggctcactcaggatggctttttaaggaagaaaatgacgaaccagatgttaaaccttggctggctggccccaaggaagaggacatggaggtggacatacctgctgtgaaagtgaaagaggagccacgagatgaggaggaagaggccaagatgaaggctcctcccaaagcagccaggaagactccaggcctcccgaaggatgtatctgtggcagagctgctgagggagctgagcctcaccaaggaagaggaactgctgtttctgcagctgccagacaccctccctggccagccacccacccaggacatcaagcctatcaagacagaggtgcagggcgaggacggacaggtggtgctcatcaagcaggagaaagaccgagaagccaaattggcagagaatgcttgtaccctggctgacctgacagagggtcaggttggcaagctactcatccgcaagtctggaagggtgcaactcctcttgggcaaggtgactctggacgtgaccatgggaactgcctgctccttcctgcaggagctggtgtccgtgggccttggagacagtaggacaggggagatgacagtcctgggacacgtgaagcacaaacttgtatgttcccctgattttgaatccctcttggatcacaaacaccggtaaaatgagcaggtggaggaggacggcgcctgtgcccacggctgctgcctgctccagacattttgttcttgaatctgtgagacccagaaggggcccactgagcccactcactccagcctttggcaaccattgttccaggtcccccagggcttcctcccacagcagctgtgaatggcacagtgacc

SEQ ID NO: 11852 - DNA, 872 bp, Homo sapiens
  SIMILAR (1)..(210): 711254mologous to Homo sapiens PRO1546,accession number AF116638,Smith-Waterman Score=273.
tctgtagacagcttaagcattaacagctcagttgagtgaccctccattgtcaccaatgtgacagccctttgcacccacactcatggcacccgagttcttgtccggcatccaggataaatgaggtcacacaaacgagttggagatggtaaatgcaggggattttattgccgatgaaagtggctctcaacaggaaggggagctgaaagggggatgaagcaggaagataatcccctgggagtccggtcatccccagccagactcctctccaaagctatgccattcaagctgtccctcttgaagttcaagccgcttcttcttccgatgtccaaccgtggtcttacaacatccagctgcttctcctcttctttctctgttggctgagcctgacagagggtcaggttggcaagctgcccatctgcaagtccgaaagggtgcaactcctcctgggcaaggtgactctggacgtgaccatgggaaccgcctgctctttcctgcaggagctggtgtctgtgggccttggagagagtaggactggggagatgatagacctgggacatgtgaagcacaaacttctgtgttcccccgattttgaatccctcttggatcacaaacactggtaaaatgatcagatggaggaggatggcggctgctgtctgctccagacattttgttctcgaatctctggaagatcgggtcattcccacctcaatactgcgcttttccaacaggcttaaaaaatggcgcaccaggagattatatcccgcacctggctcggagggtcctacgcccatggagtctcgctgattgctagcacagcagtctgagatcaaactgcaaggcagcagcgaggctgggggaggggcgcccgccat

SEQ ID NO: 11853 - DNA, 2241 bp, Homo sapiens
  SIMILAR (1)..(363): 1001254mologous to Escherichia coli ORF 1 (AA 1- 121),accession number V00279,Smith-Waterman Score=604.
atggcgggcgcccctcccccagcctcgctgccgccttgcagtttgatctcagactgctgtgctattaatcagcgagactccgtgggcgtaagaccctccaagccaggtgcgggatataatctcgtggtgcgccgttttttaagcctgttggaaaagcgcagtattccggtgggagtgacccgattttccaggtgccgtccgtcacccctttctttgactcggaaagggaactccctgaccccttgtgcttcccgaataatcaatatgcatttccaagccttttggctatgtttgggtcttctgttcatctcaattaatgcagaatttatggatgatgatgttgagacggaagactttgaagaaaattcagaagaaattgatgttaatgaaagtgaactttcctcagagattaaatataagacacctcaacctataggagaagtatattttgcagaaacttttgatagtggaaggttggctggatgggtcttatcaaaagcaaagaaagatgacatggatgaggaaatttcaatatacgatggaagatgggaaattgaagagttgaaagaaaaccaggtacctggtgacagaggactggtattaaaatctagagcaaagcatcatgcaatatctgctgtattagcaaaaccattcatttttgctgataaacccttgatagttcaatatgaagtaaattttcaagatggtattgattgtggaggtgcatacattaaactcctagcagacactgatgatttgattctggaaaacttttatgataaaacatcctatatcattatgtttggaccagataaatgtggagaagattataaacttcattttatcttcagacataaacatcccaaaactggagttttcgaagagaaacatgccaaacctccagatgtagaccttaaaaagttctttacagacaggaagactcatctttatacccttgtgatgaatccagatgacacatttgaggtgttagttgatcaaacagttgtaaacaaaggaagcctcctagaggatgtggttcctcctatcaaacctcccaaagaaattgaagatcccaatgataaaaaacctgaggaatgggatgaaagagcaaaaattcctgatccttctgccgtcaaaccagaagactgtgctcttggtttagagctttggtctatgacctctgatatctactttgataattttattatctgttcggaaaaggaagtagcagatcactgggctgcagatggttggagatggaaaataatgatagcaaatgctaataagaaaaaacataaagatacagagtataaaaaaaccgacatatgtataccacaaacaaaaggagtactagagcaagaagaaaaggaagagaaagcagccctggaaaaaccaatggacctggaagaggaaaaaaagcaaaatgatggtgaaatgcttgaaaaagaagaggaaagtgaacctgaggaaaagagtgaagaagaaattgaaatcatagaagggcaagaagaaagtaatcaatcaaataagtctgggtcagaggatgaggctctcgcagagcagccacgggaaggtccaggcgtgccaggtcccattccacccaaacgcccctcccgcagtccaattccagagccgagagctgcaaagcggctcccgacccaggagctgcggggagaaagctacacgatgtctgcgtcagggaccgcgagaggtccctctcccaaagaacgcctgggcctgacaacgaaaacaggagaaaaagaggtcgcgcaagggttctgccgggagccaggcctccgccgcccaccaaatgcccaggcccgagaccgctcctcccgggcccccgcaacccacagaaaggaactgaagcctgagcgtgaacacatttcttgctcaaggtcacatatacggtatcaagagtggagtgttcttcgtgacaccgttcatcgtaatctagtacttgacacaaagcggcatcctgctttaatactcgttgagtacaaggaacgcacctcctcaccagcaacagaacaaagctgcatggagaatgactttgatgagttgagagaagaaggcttcagacgatcggtaataacaaacttctccgagctaaaggaggatgttcaaacccatcacaaagaagctaaaaaccttgaaaaaagattagacaaatggctaactagaataaacagtgtagagaagtccttaaatgactggatggagctgaaaaccatggcatga

SEQ ID NO: 11854 - DNA, 2288 bp, Homo sapiens
  SIMILAR (1714)..(2304): 941254mologous to Escherichia coli gcvHP,accession number L20872,Smith-Waterman Score=978.
tcactgcccgctttccagtcgggaaacctgtcgtgccagctgcattaatgaatcggccaacgcgcggggagaggcggtttgcgtattgggcgccagggtggtttttcttttcaccagtgagacgggcaacagctgattgcccttcaccgcctggccctgagagagttgcagcaagcggtccacgctggtttgccccagcaggcgaaagtcctgtttgatggtggttccgaaatcggcaaaatcctgcccgctttccagtcgggaaacctgtcgtgccagctgcattaatgaatcggccaacgcgcggggagaggcggtttgcgtattgggcgccagggtggtttttcttttcaccagtgagacgggcaacagctgattgcccttcaccgcctggccctgagagagttgcagcaagcggtccacgctggtttgccccagcaggcgaaaatcctgtttgatggtggttccgaaatcggcaaaatcctgcccgctttccagtcgggaaacctgtcgtgccagctgcattaatgaatcggccaacgcgcggggagaggcggtttgcgtattgggcgccagggtggtttttcttttcaccagtgagacgggcaacagctgattgcccttcaccgcctggccctgagagagttgcagcaagcggtccacgctggtttgccccagcaggcgaaaatcctgtttgatggtggttccgaaatcggcaaaatcctgcatgcggcttttcggtgagagatccacaactagttttttccaattctgtgaagaaagtattggtagcttgatggggatggcattgaatctgtaaattaccttgggcagtatggccattttcacgatattgattcttcctacccatgagcatggaatgttcttccatttgtttgtatcctctttcatttccttgagcagtggtttgtagttctccttgaagaggtccttcacatctcttgtaagttggattcctaggtattttattctctttgaagcaattgtgaatgggagttcactcatgatgtggttctctgtttgtctgttgttggtgtataagaatgcttgtgatttttgtgcattgattttgtatcctgagactttgctgaagttgcttatcagcttaaggagattttgggctgagacaatggggttttctagatatacaatcatgtcgtctgcaaacagggacaatttgacttcctcttttcctaactgaataccctttatttccttctcctgcctaattgccctggccagaacttccaacacattttgggctcccacatactcgcagtcttcgcttttgctgacgcatttgcttttgccagtgttggcagcatgtgcagttaatgcatattgcccgctttccagtcgggaaacctgtcgtgccagctgcattaatgaatcggccaacgcgcggggagaggcggtttgcgtattgggcgccagggtggtttttcttttcaccagtgagacgggcaacagctgattgcccttcaccgcctggccctgagagagttgcagcaagcggtccacgctggtttgccccagcaggcgaaaatcctgtttgatggtggttccgaaatcggcaaaatcctgcccgctttccagtcgggaaacctgtcgtgccagctgcattaatgaatcggccaacgcgcggggagaggcggtttgcgtattgggcgccagggtggtttttcttttcaccagtgagacgggcaacagctgattgcccttcaccgcctggccctgagagagttgcagcaagcggtccacgctggtttgccccagcaggcgaaaatcctgtttgatggtggttccgaaatcggcaaaatccctggaaaatcgggtcactcccacccgaatactgtgcttttccgactggcttaaaaaacggcacaacaggagattatatcccgcacctggttcagagggtcctatgcccacggagtcccgctgattgctggcacagcagcctgagatcaaactgcaaggcggcagcgaggctgcgggaggggcgcccgccattgcccaggcttgcttaggtaaacaaagcagccaggaagctcaaactgggtggagcccaccacagctcaaggaggtctgcctgcctctgtaggctccacctctgggggcagggcacagacaaacaaaaagacagcagtaacctctgcagacttaagtgtccctgtctgacagctttgaagagagcagtgtttcccccagcacgcagctggaagatcttgagaacgggcagactgctcctcaagtgggtcccttga

SEQ ID NO: 11855 - DNA, 1296 bp, Homo sapiens
  SIMILAR (445)..(666): 981254mologous to synthetic construct lac repressor,accession number A14595,Smith-Waterman Score=345.
atggcctttaaagtcatatttggtctaacagagtcatctgaagaaacaagcaacaggaaccagaaaagtttaagtgattttatggtcctcattcaggaaatggccttaaaaattgatcaagggtttctaggagctattattgcactgtttaccccaacaacagaccctgaagctgaaagaagacgggaagtgccctggaaaagtacggcccccacagggccaaactaccttgaggagttcacaatatgtgggatgacaaaaggaacagggtctgttccacaaaaaagaccagtgccaattcaaggctgtgttcgaaaagtttacctgaaggacaccgcacaggcagagagcatgtggccggcatctccactaagacgaatcacagcagggcaggttagttcttcaccagtgtcctcatttgcatcgaattttgccgatttcggaaccaccatcaaacagtattttcgcctgctgggccaaaccagcgtggaccgcttgctgcaactctctcagggccaggcggtgaagggcaatcagctgttgcccgtctcactggtgaaaagaaaaaccaccctggcgcccaatacgcaaaccgcctctccccgcgcgttggccgattcattaatgcagctggcacgacaggtttcccgactggaaagcgggcagagaagaggttgccgctctttagagttaccagttatcctgctctgctttttccccaatccttgcgctcccaccaactattgcttctctgatgatggtgaatgtacagatggctttttgggtgtggatgtcccttctgctcgtcagttctcccttttaacagaacaggaccactcagctgcgagtttgatctcagactgctgtgctagcaatcagcgagactccgtgggcgtaggaccctccgagccaggtgcgggatataatctcgtggtgcgccgttttccaagcccgtcggaaaagcgcagtattcaggtgggagtgacccgattttccaggtcccgtccgtcacccctttctttgagtaggaaagggaactccctgaccccttgcgcttcccgagtgagggcaatgcctcggccctgctttcggcttcgcgcacggtgcgcgcatccactgacctgcgcccactgtctggcactccctagagagatgaacccggtacctcagatggaaatgcagaaatcacccgtcttctgcgtcgctcaggctgggagctgtagaccagagcttgttcctattcggccatcttggctccttattctcattaccttcttgagttgtggctcagacact

SEQ ID NO: 11856 - DNA, 1598 bp, Homo sapiens
  SIMILAR (1)..(711): 1001254mologous to Escherichia coli Aminopeptidase n (EC 3.4.11.2) (alpha-aminoacylpeptide hydrolase),accession number D90732,Smith-Waterman Score=1195.
gatctagtcttactaaagacgtgggaggaagttctccagctgagcagctttccccaacgtggaagggaccatagcaaggacccctgagttctccaacagacgttcaacgccaggggattcacaggtgggtgcacctgtgtggaagtaaagctgttgcttattctgggagcccaatcctaggctgagggaggtgggcgcggggctgtttaagcgttggcggaggccgggctgggtcgctgcgcgtctgctcctccttctcgcgcttctgctgccgccctaatcctgccttggccatgagggaaatcgtgctcacgcagaccgggcagtgcgggaaccagatcggggccaagttctgggaggtgatctctgatgaacatgccatcgactccgctggcacctaccacggggacagccacctgcagctggagcgcatcaacgtgcaccaccacgaggccagcggtggcaggtacgtgccccgcgctgtgctcgtggatctggagccgggcaccatggactctgtgcgctcggggcccttcgcggaggtcttcaggccagacaacttcatttcccgtcagtgtggggccggaaacaactgggccaagggacgctacaccgaaggcgcggagctgatggagtcagtgatggacgttgtcagaaaggaggctgagagctgtgactgcctgcagggtttccagctgacccactccctgggtggggggactgggtctgggatgggtacccttctgctcagtaagatccgggaggagtacccagacaggatcataaacacattcagcatcctgccctcgcccaaggtgtcggacaccgtggtggagccctacaacgccaccctctcagtccaccagctcatagaaaacgcagatgagaccttttgcatagataacgaagcgctatatgacatatgttccaggaccctaaaactgcccacacccacctatggtgacctgaaccacctggtgtctgctaccgtgagtggggtcaccacgtgcctgcgcttcccaggccagctgaatgctgacctgcggaagctggccgtgaacatggtcccgtttccccggctgcatttcttcatgcccggctttgccccactgaccagccagggcagccagcagtaccgggccttgactgtggctgagctcacccagcagatgtttgatgctaagaacatgatggctgcccgtgacccccgtcacggctgctacctaacggcggctgccattttcaggggtcgcatgcccatgagggaggtggatgaacagatgttcaacattcaagataagaacagcagctactttgctgactggctccccaacaacataaaaacagccgtctgtgacatcccaccctgggggctaaaaatgtcagtcaccttcactgggaacaacacagccgtccaggaactcaagcgggtctcagagcagtttacagcaacgttcaggcgcaaggccttcctccactggtacacgggcgagggcatggatgagatggaattcactgaggccgagagcaacatgaacgacttggtgtctgaatatcagcaatatcaggatgccacggccgagggagaaggagtatga

SEQ ID NO: 11857 - DNA, 1203 bp, Homo sapiens
  SIMILAR (922)..(1656): 971254mologous to Escherichia coli DNA recombinase,accession number M64367,Smith-Waterman Score=1212.
atgcttcatgggagagccagactcttactggcagtgacgctacacggtagagctctgttcctcctgcccatgtctgtggttggggctgaggtagtgcacaaacatgacgctgatgaggcccaagcattgttggaaaagaaatcagcagctgccacaagaatcttgaatccgtggctgaagaccttgactttctctgggaccaatgtggtcaagaacaaatggatccgggaggagtacccagagtggatcataaacacattgagcatcctgctcttgcccaaggtgtcagacacggtggtggagccctacaacgccaccctctcagtccaccagctcatagaaaacgcggatgagaccttctgcatagataacgaagcgctatatgacatatgttccaggaccctaaaactgcccacacccacctatggtgacctgaaccacctggtgtctgctaccatgagtggggtcaccacatgcctgcgcttcccaggccagctgaatgctgacctgaggaagctggccgtgaacatggtcccgtttccccggctgcatttcttcatgcccggctttgccccactgaccagccggggcagccagcagtaccgggccttgactgtggctgagctcacccagcagatgtttgatgctaagaacatgatggctgcctgtgaaccccgtcacggccgctacctaacggtggctgccattttcacgggtcgcatgcccatgaaggaagtggatgaacaaatgttcaacattcaagataagaacagcagctactttgctgaatggctccccaacaacggattggttagtggaaaccaggcagccattaccgttttcacgtccttttggaggagtcaatcacgaatcaatcggttcggcgctatcggaaaggcaatagccacggccccagttcagttcccggcagggacatcagtagctcctcaccttgagaagacacccgggctttcgtcccgaagcccgtttaagagaggcagattgagcgactcgactcggcagataggagggtgttcaggggccctggcgccacagttcccacaggatgaccttggagcgttcttggattttgagctgccctggataaggagccgcaccccagacttcgcccgcagcttatgggaaatgaagttgtctggcctgaagacctgcccgaagggccccgagcgcatgcagaagtga

SEQ ID NO: 11858 - DNA, 603 bp, Homo sapiens
  SIMILAR (1011)..(598): 981254mologous to Escherichia coli 37KD protein, similar to YI22-ECOLI,accession number D85613,Smith-Waterman Score=731.
atgaagaccctgttcctgggtgtcacgctcggcctggccgctgccctgtccttcaccctggaggaggaggatatcacagggacctggtacgtgaaggccatggtggtcgataaggactttccggaggacaggaggcccaggaaggtgtccccagtgaaggtgacagccctgggcggtgggaagttggaagccacgttcaccttcatgagggaggatcggtgcatccagaagaaaatcctgatgcggaagacggaggagcctggcaaatacagcgcctatgggggcaggaagctcatgtacctgcaggagctgcccaggagggaccactacatcttttactgcaaagaccagcaccatgggggcctgctccacatgggaaagcttgtgggtaggaattctgataccaaccgggaggccctggaagaatttaagaaattggtgcagcgcaagggactctcggaggaggacattttcacgcccctgcagacggcacagcagcccccgggtctgcacctccagagcccaccctaccaccagacacagagcccggaccacctggacctaccctccagccatgacccttccctgctcccacccacctga

SEQ ID NO: 11859 - DNA, 666 bp, Homo sapiens
  SIMILAR (850)..(1575): 781254mologous to Homo sapiens putative p150,accession number U93565,Smith-Waterman Score=934.
atgaagaccctgttcctgggtgtcacgctcggcctggccgctgccctgtccttcaccctggaggaggaggatatcacagggacctggtacgtgaaggccatggtggtcgataaggactttccggaggacaggaggcccaggaaggtgtccccagtgaaggtgacagccctgggcggtgggaacttggaagccacgttcaccttcatgagggaggatcggtgcatccagaagaaaatcctgatgcggaagacggaggagcctggcaaatacagcgcctgtgagcccctccccgaccccccactccccatgcccaaccccggatgcaccagccccactgcagatgggggcaggaagctcatatacctgcaggagctgcccgggacggacgactacgtcttttactgcaaagaccagcgccgtgggggcctgcgctacatgggaaagcttgtgggtaggaatcctaataccaacctggaggccctggaagaatttaagaaattggtgcagcacaagggactctcggaggaggacattttcatgcccctgcagacggcacagcagcccccgggtctgcacctccagagcccaccctaccaccagacacagagcccggaccacctggacctaccctccagccatgacccttccctgctcccacccacctga

SEQ ID NO: 11860 - DNA, 1896 bp, Homo sapiens
  SIMILAR (1620)..(1465): 861254mologous to Homo sapiens Human secreted protein, SEQ ID NO: 5210,accession number G01129,Smith-Waterman Score=239.
ttatctgagcaagaaatcactaaaatattctgtgaatttttcccgcccctcaactagcaggtttgaggatactatgcccaaggcaggtgtgatgtgcctgggccagacgcagaaccacactcctgcgtggcccctgagctcctgcattccactgttctgggtccctttcttcttctgcttcctgcttccccttccagcatcactcttggctctgtcaagaagtggtgtaggtgatgtggccttgggaatcctagggcatcctggaggtggccgactattatcattagtgtgatggcagatgggaaaggaaaggcattcccagaaggctgcaggacttgggagccctagagcactgatgggtactggttctcccagaactgcagaggccctgggagtttgtgtggagctgtgggaaatgaaccggcacactttcgttagctgagtgtgtgctaaagccccctccgccttttcctcaaggctcgtcaaagtggtcacttggtagctagttcgtgaggttgataattttagtgaagttggaagttgagctacgtcttgacacatgagcaggcatagagtccacgactcggagagaaaataaggagcattcatggagtggataggcaaaacaatttggttgataaggcgcagattctgaactaacttgtaagccttgtctggttttaggacaggtaaaatgggggaatggtaaggagagtttataggttttagaagcccatgctgtagcaggcgagtgataacaggctttaatccttttaaagcgtgctgagggattggatattggcgttgagtggggtaagggtgattaggttttaatgggatggtaatgggcatgtgatcagttgccagggaaggagtagagatgtcccatacttgtgggttaaggtagggggatatgagaggaagacgcgaaggaggctttgggttggggagaaggacggcaatgagatgtggctgtagtccaggaatcgtcagggaagcagataatttagttaaactgtctcggccttccactgtgagagttacccgaagctcggcgtctgtgatggtcttgactatgcctttggctccagccacctttttaagagtaaattgctgggcaggtgggggagggctagtcacagaacgaaactgtaagccggaccaggtgtgaggaggggaggtgataaaaagattatagggtggaggagcagaggctgaggaagaattgggacctagctcggcctggcgaggagcagcttgccccttccccagaaaagcgggacttgccgctaagggtgaaggaccaaggcaggcatccctgcgtggtctgacacccttgaaacgtgggtgtataatcagagaggtgtccctgcagttattaaacaccaagggaaggctgccttcccagtccgtgaccggcactggagttttgggtccacggataaaacatgtctcctttgtctgatttaaaattggtgagatgttccttgggctggtgggtctgaggacctgaggtcgtaggtggatctttctcacggagcaaagaacaggaggacaggggattgatctcccaagggaggtcccccgatccgagtcacggcaccaaatttcatacgcgtccgtgtgaagagaccaccaaacaggctttgtgtgagcaacatggctgtttatttcattgggtgcaggcgggctgagtccgaaaagagagtcagcaaagggagataggggtggggccgttttataggatttgggaaggtaatggaaaattacagtcaaagggggttgttctttggtgggcaggggcaggggtctcaaggtgctcagtgggggagcttctgtggttttaacagggcgagccccaaaagcagatgcaggaatgtaaggatcattattcat

SEQ ID NO: 11861 - DNA, 1710 bp, Homo sapiens
  SIMILAR (1318)..(1677): 741254mologous to Homo sapiens putative p150,accession number U93572,Smith-Waterman Score=432.
atggggaaaaaacagaacagaaaaactggaaactctaaaaagcagagcacctctcctcctccaaaggaacgcagttcctcaccagcaacggaaaaaagctggatggagaatgactttgacgagctgagagaagaaggcttcagacgatcaaattactctgagctacgggaggacattcaaaccaaaggcaaagaagttgaaaactttgaaagaaatttagaagaatgtataactagaataaccaatacagagaagtgcttaaaggagctgatggagctgaaaaccaaggctcgagaactatgtgaagaatgcagaagcctcaggagccgatgcgatcaactggaagattgcttattaaaaaaactccattctcatcaggctaatccagaatttgatttaataactgagcatctaactctttgtattagaatatcaattcaaataaaagcttaccttagcctctcaaaggcccaatcctctctaagccatcggcctccaacataccttgcatatctcttcaatgggttcaggcttttcaaaaatctgaaagcctacctgcacccaggtgaaataaacagctttattgctcacacaaagcctgtttggtggtctcttcacacagacgcacatgaaatttggtgccgtgactcggatttgaaattggttcccacgctgcccctaatcccgcttgaagcagccctgagaaacatcacccattctctctccataccaccgcccaaaaattttcgccgccccaacacttcaacactattttgtgttatttttcttattaatataagaaggcaggaatatcaggcctctgagcccaagccaagccatcgcatcccctgtgacttgcagagaataaaatacctaggaatccaacttacaagggatgtgaaggacctcttcaaggagaactacaaaccactgcgcaatgaaataaaagaggatacaaacaaatggaagaacattccatgctcatgggtaggaagaatcaatatcgtgaaaatggccatactgcccaagcctctgctggtgatacccaggcaaacagggtctggaatggacccccagcaaacttcaggagacctgcagaagtgcctgactgttctaaggaaaactaacaaacagaaagcaatagcatcaacatcaagaaaaaggatgaccatgcaaaaactccatctgaaggaaaaactcatcaacagcaaagaccaaagaaccaacgacaaaaaccacatgattatctcaatagatgcagaaaaggccttcaataaaactgaacatcgcttcatgctaaaaacactcaataaactagaaattaactcaagatggattaaagatttaaatgtaaaacctaaaaccataaaaaccctagaagaaaacctaggtaataccattcaggacatagtcatggacaaagacttcatgactaaaacaccaaaagcaatggcaacaaaagccaaaattgacaaatgggatctaattaaactaaagagcttctgcacagcaaaagaaactatcatcagagtgtacaggcaacctacagaacgggagagcatttttgtaatctatccatctgacaaaggtctaatatccagaatctacaaggaattagctattccagggaagggcaattcctccaatgtcagcaaggacagtaagatgtcaaagcatcagaaaatgcaaggggaaaacaagcacgattaa

SEQ ID NO: 11862 - DNA, 2709 bp, Homo sapiens; identical to SEQ ID NO: 7845
  SIMILAR (328)..(2418): 941254mologous to Homo sapiens putative p150,accession number U93563,Smith-Waterman Score=3389.

SEQ ID NO: 11863 - DNA, 1788 bp, Homo sapiens
  SIMILAR (742)..(1239): 1001254mologous to unidentified cloning vector 29kD protein essential for the replication of mini F plasmid,accession number AB015619,Smith-Waterman Score=862.
atggatgacactggaagccataattctcagcaaactaacacaggaacagaaaaccatacaccacgttttttcacacataagtgggagctgagcaatgagaacacatggacacagggaggagaatatcacacactggggcctgtcagggggcccagaggcttggagaaagaatatttcagggacccgccaaggacactgttgcctgctcagcttggaaggttactccctgcaaccagggtgctccagctccagatgtggctcaaaggccccagggattttgccgatttgggaaccacccatcaaacaggattttcgcctgctggggcaaaccagcgtggaccgcttgctgcaactttctcagggccaggcggtgaagggcaatcagctgttgcccgtctcactggtgaaaagaaaaaccaccctggcgcccaatacgcaaaccgcctctccccgcgcgttggccgattcattaatgcagctggcacgacaggtttcccgactggaaagcgggcagtgagcgcaacgcaattaataccagtacgcgggaaccggccccagaatcaatattttcccactgggtccttcccccatgggaataagggaagtccaattcaagatgagattggggtgaggcccaagaacccaaacccatatcagtcagtaaaagatattagaagatccagcttcatggtgattgagtgtgacaatctaaaaacttgtcacacttcacatggatctgtcatggcggaaacagcggttatcaatcacaagaaacgtaaaaatagcccgcgaatcgtccagtcaaacgacctcactgaggcggcatatagtctctcccgggatcaaaaacgtatgctgtatctgttcgttgaccagatcagaaaatctgatggcaccctacaggaacatgacggtatctgcgagatccatgttgctaaatatgctgaaatattcggattgacctctgcggaagccagtaaggatatacggcaggcattgaagagtttcgcggggaaggaagtggttttttatcgccctgaagaggatgccggcgatgaaaaaggctatgaatcttttccttggtttatcaaacgtgcgcacagtccatccagagggctttacagtgtacatatcaacccatatctcattcccttctttatcgggttacagaaccggtttacgcagtttcggcttagtgaaacaaaagaaatcaccaatccgtatgccatgcgtttatacgggggatcctctagagtcgaaaagcgactgttggtggtctttcacaggaacgtgcatgaaattggtgctgtgacaggatcgggggacttccctgggagatcaatcccccgtcctcttgctcttggctccgtgagaaagatccacctacgacctcaggtcctcagacctaccagcccaagaaacatctcaccaatttcaaatccgggatgcctctctgattatacacccacgtttcaagggtgtcagaccatgcagggacgcctgccttggtccttcacccttagcggcaagtcccgcttttctggggaaggagcaaagacaaaagagacacgttttatctgtggaccccaaactccggcgccggtcacggactgggaaggcagccttcccttggtgtttaatcattgcagggatgcctctctgattatacacccacgttcaaggggtcagaccatgcagggacgcctgcttggtcggggatctctagagtcgaaaagcgggtatgcaagccaagttgtctctgtttccaggaagaaccagggtttttag

SEQ ID NO: 11864 - DNA, 1134 bp, Homo sapiens
  SIMILAR (985)..(1134): 721254mologous to Homo sapiens Human secreted protein, SEQ ID NO: 7420,accession number G03339,Smith-Waterman Score=170.
ctaagccaagaagatctgggaagcagtcagagagccttgggccagagttccaggggctctgggagtggatgccaggtgagttggacagtccaatttccagtggggtcccgcacagatgggacgtggcttaggaggaatcctgggctgcaggcattccttggcctggtggccggatttctggcacttgtagcaagctcctgggggaggaggttctggaggaatgcctggccgctgaggttcaggcgtttggaagttcttgtgtgctggagacatggctgaggtttgtctcacagtgaaggcaaggaattgcaacttttttctattattgtacaccttgaaggtgaggttaattaaattcgctaagggtgaaggactaaggcaggcgtccctgcgtggtctgacacctctaaaacctgggtgaataatcagagaggcgtccctgcaatgattaaacaccaagggaaggctgccttcccagtccgtgaccggcgccggagttttgggtccacggataaaacgtgtctcctttgtcagatttgaaattggtgagatgtttcttgggctggtcggtctgaggaccataggtggatctttctcaaggagcaaagaacaggaggacctcccaagggaggtcacgatctgagtcacggcaccaaatttcatgcatgtgtgcagcttccacttggatggaaaggacagcatatggaggttcacatcgtgaacttttgctccaacaactgccacaggaacataccaggaaaaccctgcccctgcagcaaacttctgcctggacatacaggcttttccatacatcctgcgaaatataggcaaaggttcccaaacctcaattcttgatttctgagcacccacgggcccaacacctcctggaagctgccaatgctttggccttgcaccctctgaagccatggtctgagctgtatcttgtccccttttagtcaaggctagagtggctaggatgcagggcaccaagtctctaggcttattccagttcccaacaaattcctcatctccatctgagatgacctcagcctgaatttcatcgtccatatcattatcagcattttggtcaaagccattgaaaatgtttccaggaagttccaaactttcccacat

SEQ ID NO: 11865 - DNA, 1200 bp, Homo sapiens
  SIMILAR (1)..(1131): 951254mologous to Homo sapiens putative p150,accession number U93574,Smith-Waterman Score=1940.
atgagtgaactcccattcacaattgcttcaaagagaataaaatacctaggaatccaacttacaagggatgtgaaggacctcttcaaggagaactacaaaccactgctcaaggaaataaaagaggatacaaacaaatggaagaacattccatgctcatgggtaggaagaatcgatatcgtgaaaatggccatactgcccaaggtaatttatagattcaatgccatccccatcaagctaccaatgactttcttcacagaattggaaaaaactactttaaagttcatatggaaccaaaaaagagcctgcatcgccaagtcaatcctaagccaaaagaacaaagctggaggcatcacgctacctgacttcaaactatactacaaggctacagtaaccaaaacagcatggtactggtaccaaaacagacacatagaccaatggaacagaacagagccctcagaaataatgctgcatatctacaactatctgatctttgacaaacctgacagaaacaagcaatggggaaaggattccctatttaataaatggtgctgggaaaactggctagccatatgtagaaagctgaaactggatcccttccttacaccttacacaaaaattaattcaagatggattaaagacttaaatgttagacctaaaaccataaaaaccctagaagaaaacctaggcaataccattcaggacataggcatgggcaaggacttcatgtctaaaacaccaaaagcaatggcaacaaaagccaaaattgacaaatgggatctaattaaactaaagagtttctgcacagcaaaagaaactaccatcagcatgaacaggcaacctacagaatgggagaaaatttttgcaacctactcatctgacaaagggctaatatccagaatctacaatgaactcaaacaaatttacaagaaaaaaacaaacaaccccatcaaaaagtgggcaaaggacatgaacagacacttctcaaaaaaagacatttatgcagccaaaagacacatgaaaaaatgctcatcatcactggccatcagagaaatgcaaatcaaaaccacaatgagatgccatttcacaccagttagaatggtgatcattaaaaagtcaggaaacaacaggtgggaactgaacaatgacaacacatggacacgggaaggggaacatcacacaccggggactattgtggggtag

SEQ ID NO: 11866 - DNA, 1044 bp, Homo sapiens
  SIMILAR (832)..(2847): 941254mologous to Homo sapiens putative p150,accession number U93569,Smith-Waterman Score=3250.
atgggagaatttaacaccccactgtcaacattagacagatcaacaagacagaaagttaacaaggatatccaggaattgaactcagctctgcaccaagcggacctaatagacatctacagaactctccaccccaaatcaacagaatatacattcttttcagcaccacaccacacctattccaaaattgaccacatagttggaagtaaagcactcctcagcaaatgtaaaagaacagaaatgataacaaactgtctctcagaccacagtgcaatcaaactagaactcagggttaagaaactcactgaaaaccactcaactacacggaaactgaacaacctgctcctgaatgactactgggtacataacaaaatgaaggcagaaatgatgttggaagttctggccagggcaatcaggcaggagaaggaaataaaaggcattcaattaggaaaagaggaagtcaaattgtccctgtttgcagatgacatgattgtatatctagaaaactccatcatctcagccctaaatctccttaagctgataggcaacttcagcaaagtttcagcatacaaaatcagtgtgcaaaaaccacaagcattcctatacgccaataatagacaaacagagagccaaattgtgagtgaactcccattcacaatttcttcaaagagaataaaacacctaggaatccaacttacaagggatgtgaaggacctcttcatggagaactacaaaccactgctcaatgaaataaaagaggatacaaacaaatggaagaacattccatgctcatgggtaggaagaatcaatatcgtgaaaatggccatactgcccaaggtaatttgtagattcaatgccatccccatcaagctaccgatgagtttcttcacagaattggaaaaaactactttaaagttcatatggaaccaaacaagagcccacattgccaagtcaatcctaagccaaaagaacaaagctagaggcatcacactacctgacttcaaactatactacaaggctacagtaaccaaaacagcatggtactga

SEQ ID NO: 11867 - DNA, 1096 bp, Homo sapiens
  SIMILAR (249)..(1094): 941254mologous to Homo sapiens putative p150,accession number U93572,Smith-Waterman Score=1436.
aaatacaaactaccatcagagaatactataaacacctctatgcaaataaactagaaaatccagaagaaatggataaattcctggacacatacaccctcccaagactaaaccaggaagaagttgaatctctgaatagaccaataataggctctgaaattgaggcaataatcaatagcttaccaaccaaaaaaagtccaggaccagatggattcacagccaaattctatcagaggtacaaagaggagctgacaaacagccaaatcgtgagtgaactcccattcacaattgcttcaaagagaataaaatacctaggaatccaacgtacaagggatgtgaaggacctcttcaaggagaactacaaaccactgctcaatgaaataaaagaggatacaaacaaatggaagaacattccatgctcatgggtaggaagaatcaatatcatgaaaatggccatactgcccaaggtaatttatagattcaatgccatctccatcaacctaccaatgactttcttcacagaactggaaaaaactactttaaagttcatatggaaccaaaaaagagcccgcattgccaagtcaatcctaagccaaaagaacaaatctggaggcatcatgctacctgacttcaaactatactacaaggctacagtaaccaaaacagcatggtactggtaccaaaacagagatatagaccaatggaacagaacagagccctcagaaataatgccacctatctacaactatctgatctttgacaaacctgagaaaaacaagcaatggggaaaggattccctatttaataaatggtgctgggaaaactggctagccatatgtagaaagctgaaactggatcccttccttacaccttatataaaaattaattcaagatggattaaagacttaaatgttagacctaaaaccataaaaaccctagaagaaaacctaggcattaccattcaggacataggcatgggcaaggacttcatgtctaaaacaccaaaagcaatggcaatgaaagccaaaattgacaaatgggatctaattaaactaaagagcttctgcacagcaaaagaaactaccatcagagtgaacag

SEQ ID NO: 11868 - DNA, 1843 bp, Homo sapiens
  SIMILAR (578)..(1606): 961254mologous to Homo sapiens putative p150,accession number U93572,Smith-Waterman Score=1790.
atggataaattcctcaacacatacactctcccaagactaaaccaggaagaagttgaaactctgaagagaccaataacaggagctgaaattgaggcaataatcaataacttaccaaccaaaaacagtccaggaccagatggattcacagccgaattctaccagaggtacaaggaggaaatggtaccattccttctgaaattattccaatcaatagaaaaagagggaatcctccctatctcattttatgaggccagcatcattctgataccaaagcctggcagagacacaaccaaaaaagagaattttagaccaatatccttgatgaacactgatgcaaaaatcctcaataaaatactggccaaccaaatccagcagcacatcaaaaagcttatccactgcgatcaagtgggcttcatccctgggatgcaaggctggttcaatatacacaaatcaataaatgtaatccagcatataaacagagcaaaagacaaaaaccacatgattttttccatagatgcagaaaaggcctttgacaaaattccacaacccttcatgctaaaaactctcaataaattagagaataaaatacctaggaatccaacttacaagggatgtgaaggacctcttcaaggagaactacaaaccactgctcaaggaaataaaagaggatacaaagaaatggaagaacattccatgctcatgggtaggaagaatcaatatcgtgaaaatggccatactgccgaaggtaatttacagattcagtgccatccccatcaagctaccaatgactttcttcacagaattggaaaaaactactttaaagttcatatggaaccaaaaaagagcccgcatcgccaagtcaatcctaagccaaaagaacaaagctggaggcatcacactacctgacttcaaactatactacaaggctacagtaaccaaaacagcatggtactggtaccaaaacagagatatagatcaatggaacagaacagagccctcagaaataacaccgcatacctacaactatctgatctttgacaaacctgagaaaaacaagcaatggggaaaggattccctatttaataaatggtgctgggaaaactggctagccatatgtagaaagctgaaactggatcccttccttacaccttatacaaaaatcaattcaaggtggattaaagatttaaacgttaaacctaaaaccataaaaaccctagaagaaaacctaggcattaccattcaggacataggcgtgggcaaggacttcatgtccaaaacaccaaaagcaatggcaacaaaagccaaaattgacaaatgggatctaattaaactaaagagcttctgcacagcaaaagaaactaccatcagagtgaacaggcaacctacaacatgggagaaaattttcgcaacctactcatctgacaaagggctaatatccagaatctacaatgaactcaaacaaatttacaagaaaaaaacaaacaaccccatcaaaaagtgggcgaaggacatgaacagacacttctcaaaagaagacatttatgcagccaaaaaacacatgaaaaaatgctcatcatcactggccatcagaaaaattctttttaaaaaaataagttctacctttattttagattctggggttacattgcagcgtttggatttcaacattctcttgaatcttgttgatcttctttgtcaccctgattctgaattttatgtctgtcatttcagacatttcaatctggttaggatccaccagggagctaatgcaatttttgcagacttctcttgccagatggctgtgctcttccaggtgttcagagccatggggctgtctgggtaa

SEQ ID NO: 11869 - DNA, 4254 bp, Homo sapiens
  SIMILAR (1)..(1233): 981254mologous to Homo sapiens putative p150,accession number U93569,Smith-Waterman Score=2100.
atgggctgcctggggacccagagagctcccagggcctttctgctgcttcctctacccctgcactttgctcagctctctaacctgactcagctccaggcagcggcttccctttccatggtgacccaccggagctctggaggtggtggggagcgaggagcgacagcagcaggaaccgaacagggcggcgcctgcctggcagcgtcactcttgcggggcctgtgggacgcaggtgaagttactcccattagggttagggttaggccatatgatcctttcaccctggctccgcttcacgagcacagtgaagcccagtgtgtcgcatcaccctctctgactgtgactaaggagaaatcgctgcttcccaagagcctgctggcgggttctcgggaagtagcgcgcagccgtgccctttgccatggacaggcccgcccaccacccaggccccaggtcacgcaacagcgcacccagctccagggacaacgcatcctccaatggaggccggcgacagagggtccccacagtcccaggagggggtctgattctgcaaagggaacacatcctcctaccactgggacctgccctccgcgccgcaggcaaggagccggctacagccgctacaattccggagagtcccggaggcgactcggacgacagcaggacctagtagcgcgcagcgacgagcagcgagatccagcgcctgcgacaaggagagaagacaaaatgatagaagagctgcagccctttggggagcacagacctaggagatccccaagccagggctgtgacaccctctttcaggctctgtggttcctggcatctccaagcttccagcggggagggcagctccaggtgctggccctctgcaaggctgcggctggaccaggtgcaccacaggcagcttctacagctggcaccagggaacatgggtatgcctggaagcttggagacaccaggaaccacagagctctgaagaggaagtcacagacctggctcagacggttcccagctggttgtcctgatgtctgctctgctctggctgatctcagggcttttatgggcctcagaggggaggaagtgtgtgccgattggtccatgggtggccatgggagtggggagtgcaggagggggactggtgggcagagggctgtggttcctaaatctccagttcaagaaaaaggcaaagagcccttgagtcttctacagtatttcatggtggatgaaaaagaaagatttctcagaattacctcagaacatgaagacaatgataatagcaacaatagtagtaatcatagcagtatcaatgagacaaaagagacatgttttatccatgaacccaaaactccggcgccggtcacggactgggaaggcagccttcccttggtgtttaatcattgcagggatgcctctctgattatacactcatgtttcaagggtgtcagaccacacagggacgcctgccttggtccttcacccttagtggcaagtcccgctttcctggggcaggggcaagtacccctcaaccccttctccttcacccttagcggcaagtcccactttcctgggacaggggcaagaacttgttacaagtgccagaaatctgaccaccaggccaaggaatgcctgcggcccaggattcctcctaagccatgtcccatctgtgcgggaccccactggaaatcggactgttcaactcacctggcagccactcccagagcccctggaactctggcccaaggctgactgactccttcccagatcttctcggcttagcggctgaagactgacactgcttgatcgcctcggaagtcccctggaccatcacagaagccgagcttcgggtaactctcacagtggagggtaagtccatcccctgtttaatcgatacgggggctacccactccacgttgccttcttttcaagggcctgtttcccttgcccccataactgttgtgggtattgacggccaagcttcaaaacccctgaaaactcccccactctggtgccaacttggacaacactcttttatgcactcttttttagttatccccacctgcccacttcccttattaggccgaaatattttaaccaaattatctgcttccctgactattcctggagtacagctacatctcattgctgcccttcttcccaatccaaagcctcctttgtgtcctctaacatccccacaatatcagcccttaccacaagacctcccttcagcttaatctctcccactctaggttcccacgccgcccctaatcccacttgaagcagccctgagaaacatcgcccattctctctccataccaccccccaaaaattttcgccgctccaacacttcaacactattttgttttatttgtcttattaatatcagaaggcaggaatgtcaggcctctgagcccaggccaggccatcgcatcccctgtgacttgcacgtatacatccagatggcctgaagtaactgaagatccacaaaagaagtgaatatgccttgccccaccttaactgatgacattccaccacaaaagaagtgtaaatggccggtccttgccttaactgatgacattaccttgtgaaagtcctcttcctggctcatcctggctcaaaaagcacccccactgagcaccttgagacccccactcctgcccgccagagaacaaaccccctttgactgtaattttcctttacctacccaaatcctataaaacggccccacccttatctcccttcactgactctcttttcggactcagcccgcctgcacccaggtgaaataaacagctttattgctcacacaaagcctgtttggtggtctcttcacacggacgcacatgaaatttagttgtatccataaggcatatggaggagactaattcctcttccaaagacatgtaccagagtcctggagaggctgagggctggaggtggaagaaaggctctgacaggggtcagaatctgttcaggaaacatagcaaatgcctgatacttttaattagagaaaggtttgaatctccacattcatatatttgcagtccagtgacctttcagtttttttatgcccaaagtgtcaagcatgttaatgttaccattgactgcctccctgaaggtgcagctaccaggggaactgccaggacttcaaagcccacaaccaaaagccagaaaacactaccaagtacaagccccggacactggacccagagcacaccctgggcatctgctctgagatcctctccctggacagagacagctgctccttcagaaacagaggagaccctgaacacaggcaggcctcctgagcttccagccagggccacagccacatggttcagtgcctcccacactctcccagccttggctaccaggagggtggccagaactcagtggttgacagctgacagacagacgtgggcttccatatcgtccgtgccctgggctcagaccatcagtgagaaaaaacctggagggtctctctgggaaactcgttcttccccaccgactactgcagggaccgaggaagccatgaacactacaagccttttggcgcctgctgctgagataatggccacacctggcagcccatcccaggccagccctacctcgggagcattcacccatggcacacagactccgagtccaaccaaggcaacagcccccagatatccacaaacaggtgatctctctgcagagtggccattcactgctggtgaagagccagtcctggtcccaagaccccatcaagtttcaaggtgtcctcagccactcttcaaggtgggagctatggcagctgctcctctcaccctggctattcagaggctcaacccatgcctgatggagctgtgccaattcttccagcaatgcctctgcatgagccagaggagtcccaggacagaggacatgagatactgtcttgaatactattcctggtttctgaagaatgcaacatatatctgtcagagggtgaaaagggtgtcccactcgcacaccttaaagcaaaagtgccttgagaatatctgcaagtctgtgtgaggccttgaaaataacactagggcataacaattacttcaggggatacgccatccaccctggctcttgtcccaagtgggctacatttgaagaattcacccaggctccagctagatcatcagttaatttaaagtggttattcttggaagtagcattttttttccctctcctgtgaatctgtgcaaaacattgaaggtagaagttttcttgttaaaaaaaaaggaattc

SEQ ID NO: 11870 - DNA, 1479 bp, Homo sapiens
  SIMILAR (229)..(468): 541254mologous to Homo sapiens ribonuclease 6 precursor,accession number U85625,Smith-Waterman Score=210.
atgactgacgagctgagagaagaaggcttcagacgatcaaattactctgagctacgggaggacattcaaaccaaaggcaaagaagttgaaaactttgaaaaaaatttagaagaatgtataactagaataaccaatacagagaagtgcttaaaggagctgatggagctgaaaaccaaggctcgagaactacccaggaagctgctggtctgtcctgcgagcttccctggggtcttctccatgcgagcgcagcagtgcccctcccgtgctccgactgttgtcatcactgcaagcctcgtgtttagctttcataaagccatcctgacaaatccgttccgctctttccttaatcattcctgctgcgattctctaaacaacgcccgatttgttgacatctccagggatgttcagctaagagctgtacatagaatccaggactcttttggagtcttcttggaggcgacaaccaaagataaagccacctcttacatttggtcatctttgcagacaggtaaagtggagtcaaaaggcaagagagcaaggactgcccttgagttttttggtgtcagaagagggtcagacattaaggattgtggcacattgcctaggtatgcaagtgccctgagctccctggtgttgaaaggcagctgcgcctatcaggactgtgagaccaagaggaggaatcttgcctctgtcatcatcaggatgagagtgtccattgcccatccacctatgacctcaggtcctcagaccgaccagcccaagaaacatctcaccaatttcaaatccgagacaaaagagacatgttttatccatgaacccaaaactctggcgccggtcacggactgggaaggcagccttcccttggtgtttaatcattgcagggacggcctctctgatcattcagccacatttcaagggtgtcagaccatgcagggatgcctgccttggtccttcacccttagcggcaagtcccgctttcctggggcaggggcagcggcaagtcccgctttcctggggcaggggcaggtgcccctcgaccccttctccttcaccctcagcggcaagtcccgctttcctggggcaggggcagcggcaagtcccgctttcctggggcaggggcaggtgcccctcgaccccttctccttcaccctcagcggcaagtcccgctttcctggggcaggggcagcggcaagtcccgctttcctggggcaggggcaggtacccctcaaccccttctccttcaccctcagcggcaagtcccgctttcctggggcaggggcagcggcaagtcccgctttcctggggcaggggcaggtgcccctcaaccccttctccttcaccctcagcggcaagtcccgctttcctggggcagcggcaagtcccgctttcctggggcaggtacccctcgaccccttctccttcaccctcagcggcaagtcccactttcctggggcaggacttgccgctttcctggggtag

SEQ ID NO: 11871 - DNA, 2785 bp, Homo sapiens
  SIMILAR (325)..(1698): 981254mologous to Homo sapiens putative p150,accession number U93564,Smith-Waterman Score=2386.
atgcacacagccccgtttatttttccagtgaagcgcactgtccctgaccccggtgaatactgggatggtagtcctgtagccacgggaccggaaagtctgggagtctttatgaaactacatctcccagcaaccctggcgacctggggctccagtcccaccgcagactctggtgggacgtgggtggcgcaagcacatcttggccctgcgactcagcttgagggggcccaagctgtcccactgagcaagcgcccagcaggccgccgtgctgtgggtcctggtcctcctggcatttgttggggtgcggaggccaccgaggagtctgaggtgttggaagttctggccagggcaatcaggcaggagaaggaaataaagggtattcaattaggaaaagaggaagtcaaattgtccctgtttgcagacgacatgattgtttatctagaaaaccccatcgtctcagccgaaaatctccttaagctgataagcaacttcagcaaagtctcaggatacaaaatcaatgtacaaaaatcacaagcattcttatacaccaacaacagacaaacagagagccaaatcatgggtgaactcccattcacaattgcttcaaagagaataaaatacctaggaatccaacttacaagggatgtgaaggacctcttcaaggagaactacaaaccactgctcaaggaaataaaagaggacacaaacaaatggaagaacattccatgctcatgggtaggaagaatcaatatcgtgaaaatggccatactgcccaaggtaatttacagattcaatgccatccccatcaagctaccaatgactttcttcacagaattggaaaaaactactttaaagttcatatggaaccaaaaaagagcccgcattgccaagtcaatcctaagccaaaagaacaaagctggaggcatcacactacctgacttcaaactatactacaaggctacagtaaccaaaacagcatggtactggtaccaaaacagagatatagatcaatggaacagaacagagccctcagaaataatgccacatatctacaactatctgatctttggcaaacctgagaaaaacaagcaatggggaaaggattccctatttaataaatggtgctgggaaaactggctagccatatgtagaaagctgaaactggatcccttccttacaccttatacaaaaatcaattcaagatggattaaagatttaaacgttaaacctaaaaccataaaaaccctagaagaaaacctaggcattaccattcaggacataggcgtgggcaaggacttcatgtccaaaacaccaaaagcaatggcaacaaaagccaaaattgacaaatgggatctaattaaactaaagagcttctgcacagcaaaagaaactaccatcagagtgaacaggcaacctacaacatgggagaaaattttcgcaacctactcatctgacaaagggctaatatccagaatctacaatgaactcaaacaaatttacaagaaaaaaacaaacaaccccatcaaaaagtgggcgaaggacatgaacagacacttctcaaaagaagacatttatgcagccaaaaaacacatgaagaaatgctcatcatcactggccatcagagaaatgcaaatcaaaaccactatgagatatcatctcacaccagttagaatggcaatcattaaaaagtcaggaaacaacagtctaattgtcggcgccagcatggacacctccctcctctccgggccgattccgtatgatatacaacactttgatcgtttcggaagcgtgacagttcgacgcgggtgcgcgatcgagttttacaacacaatgtcacaactggatccaaaaattcctttggaaatgcaagggacccagaataaccaaaacaatcttggaaaagaatgaagttggagaatttacacttcttgatttcaaaacttaccacaaatttgcagtaatcaaaactatgtggtactggcataaggacagatacattgatcaacagaatgacattgaaagtccagaaataaattcatatgtttatggtcaactgatttttgacaaagactcagcccgcctgcacccaggtgaaataaacagtcttgttgctcacacaaagcctgtttggtggtctcttcatatggacgcgcatgaaatttggtgccgtgactcggattgggggacctcccttgggagatcaatcccctgtcctcctgctctttgctccatgagaaagatccacctacgacctcgggtcctcagaccgaccagcccaaggaacatctcaccaatttcaaatctgcatgctttgaaaggattaaagcctgctatcactcgcctgctacagcatggccttttaaagcctataaactctccttacaattcccccattttacctgtcctaaaaccagataagccttacaagttagttcaggatctatgccttatcaaccaaattgtttttcctatccaccccgtggtgccaaacccatatactctcctatcctcaatacctccctccacaatccattattctgttctggatctcaaacttgctttctttactattcctttgcatgcttcatcccagcctctctccgctttcacttgggctgaccctgacacccatcaggttcagcaaattacctgggctgtactgccacaaagcttcacagacagcccccattacttcagtcaagcccaaatttcttccttatctgttacctatctcagcataattctcataaaaacacacgtgctctccctgccgattgtgtctgactaa

SEQ ID NO: 11872 - DNA, 3847 bp, Homo sapiens
  SIMILAR (1579)..(2325): 741254mologous to Escherichia coli K12 formate dehydrogenase- O, major subunit,accession number AE000464,Smith-Waterman Score= 955.
atgacaggatcaaattcacacataacaatattaactttaaatataaatggactaaattctgcaattaaaagacacagactggcaagttggataaagagtcaagacccatcagtgtgctgtattcaggaaacccatctcatgtgcagagacacacataggctcaaaataaaaggatggaggaagatctaccaagcaaatggaaaacaaaaaaaggcaggggttgcaatcctagtctctgataaaacagactttaaaccaacaaagatcaaaagagacaaagaaggccattacataatggtaaagggatcaattcaacaagaggagctaactatcctaaatatttatgcacccaatacaggagcacccagattcataaagcaagtcctgagtgacctacaaagagacttagactcccacacattaataatgggagactttaacaccccactgtcaatattagacagatcaacgagacagaaagtcaacaaggatacccaggaattgaactcagctctgcaccaagcagacctaatagacatctacagaactctccaccccaaatcaacagaatatacatttttttcagcaccacaccacacctattccaaaatcgaccacatagttggaagtaaagctctcctcagcaaatgtaaaagaacagaaattataacaaactatctctcagaccacagtgcaatcaaactagaactcaggattaagaatctcactcaaagccgctcaactacatggaaactgaacaacctgctcctgaatgactactgggtacataacgaaatgaaggcagaaataaagatgttctttgaaaccaacgagaacaaagacaccacataccagaatctctgggacgcattcaaagcagtgtgtagagggaaatttatagcactaaatgcctacaagagaaagcaggaaagatccaaaattgacaccctaacatcacaattaaaagaactagaaaagcaagagcaaacacattcaaaagctagcagaaggcaagaaataactaaaatcagagcagaactgaaggaaatagagacacaaaaaacccttcaaaaaatcaatgaatccaggagctggttttttgaaaggatcaacaaaattgatagaccgctagcaagactaataaagaaaaaaagagagaagaatcaaatagacacaataaaaaatgataaaggggatatcaccaccgatcccacagaaatacaaactaccatcagagaatactacaaacacctctacgcaaataaactagaaaatctagaagaaatggatacattcctcgacacatacactctcccaagactaaaacaggaagaagttgaatctctgaatggaccaataacaggctctgaaattgtggcaataatcaatagtttaccaaccaaaaagagtccaggaccagatggattcacagccgaattctaccagaggtacaaggaggaactggtaccattccttctgaaactattccaatcaatagaaaaagagggaatcctccctaactcattttatgaggccagcatcattctgataccaaagccgggcagagacacaaccaaaaaagagaattttagaccaatatccttgatgaacattgatgcaaaaatcctcaataaaatactggcaaaccgaatccagcagcacatcaaaaagcttatccaccatgatcaagtgggcttcatccctgggatgcaaggctggttcaatatacgcaaatcaataaatgtaatccagcatataaacagagccaaagacaaaaaccacatgattatctcaatagatgcagaaaaagcctttgacaaaattcaacaacccttcatgctaaaaactctcaataaattaggtattgatgggacgtatttcaaaataataagagctatctatgacaaacccacagccaatatcatactgaatgggcaaaaactggaagcattccctttgaaaactggcacaagacagggatgccctctctcaccgctcctattcaacatagtgttggaagttctggccagggcaatcaggcaggagaaggaaataaagggtattcaattaggaaaagaggaagtcaaattgtccctgtttgcagacgacatgattgtttatctagaaaaccccattgtctcagcccaaaatctccttaagctgataagcaacttcagcaaagtctcaggatacaaaatcaatgtacaaaaatcacaagcattcttatacaccaacaacagacaaacagagagccaaatcatgggtgaactcccattcacaattgcttcaaagaggataaaatacctaggaatccaacttacaagggatgtgaaggacctcttcaaggagaactacaaaccactgctcaaggaaataaaagaggacacaaacaaatggaagaacattccatgctcatgggtaggaagaatcaatatcgtgaaaatggccatactgcccaaggtaatttacagattcaatgccatccccatcaagctaccaatgactttcttcacagaattggaaaaaaactactttaaagttcatatggaaccaaaaaagagcccgcattgccaagtcaatcctaagccaaaagaacaaagctggaggcatcatgctacctgacttcaaactatatactacaaggctacagtaaccaaaacagcatggtactggtaccaaaacacagatatagaccaatggaacagaacagagccctcagaaataatgctgcatatctacaactatctgatctttgacaaacctgagaaaaacaagcaatggggaaaggattccctatttaatatatggtgctgggaaaactggctagccatatgtagaaagctgaaactggatcccttccttacaccttatacaaaaattaattcaagatggattaaagacttaaatgttagatctaaaaccataaaaaccctagaagaaaacctaggcaataccattcaggacataggcatgggcaaggacttcatgtctaaaacaccaaaagcaatggcaacaaaagccaaaattgacaaatgggatctaattaaactaaagagcttctgcacagcaaaagagactaccatcagcgtgaacaggcaacctacagaatgggagaaaatttttgcaatctactcatctgacaaagggctaatatccagaatctacaatgaactcaaacaaatttacaagaaaaaaacaaaacaactgcatcaaaaagtgggcgaaggacatgaacagacacttctcaaaagaagacatttatgcagccaaaaaaacacatgaaaaaatgctcaccatcactggccatcagagacaatgcaaatcaaaaccacaaatcaaaaccacaatgagataccatctcacaccagttagaatggcaatcattaaaaagtcaggaaacaacaggtgctggagaggatgtggagaaataggaacacttttacactgttggtgggactgtaaactagttcaaccgttgtggaagtcagtgtggcgattcctcagggatctagaaccagaaataccatttgacccagccatcccattactgggtatatacccaaaggactctaaatcatgctgctataaagacacatgcacacgtatgtttattgcggcattattcacaatagcaaagacttggaaccaacccaaatgtccaacaatgatagactggattaagaaaatgtggcacatatacaccatggaatactatgcagccataaaaaatgatgagttcgtgtcctttgtagggacatggatgaaattggaaatcatcattcttagtaaactatcgcaagaacaaaaaaccaaacactgcatattctcactcataggtgggaattga

SEQ ID NO: 11873 - DNA, 795 bp, Homo sapiens
  SIMILAR (233)..(3): 531254mologous to Homo sapiens PRO2822,accession number AF119900,Smith-Waterman Score=182.
tttggtggctcatgcttgtaatcccagctactcaggaggcagagacaggagaatctcttgaacttaggagcaggaggttgcagtgagtcgagactgcaccactgcactccagcctaggcaacagaggaagactctcatctcaaaaaaaataataaattttaaaaaataaataaatgaaataaaacaaagtagaaaccatcagggctttgaggttgggactgtggcatgccgaggggaggctgcaggggtcactgggaaacatcagggtccttcttcggttgcctgagcagcaccggtgtcctcaagccacattcagctgcatggcgccaatgctaagcagaaagaggaatcggaggcgccgagctggggcaagggtgggagccaagggagtggacacagcaggtagggccgggagacttgggtgaagcagtggaagccagagttctgaccctgctggagaagtgtcatgagggcctcagacaggttcacccactgagcaggaggtcttgcagcctgacccaccctgcatcctgttcaggccgggatcatctccttcctgggcttcttctggcccctttctgcatctcttcttgacaacatggcacaaatgaccagggttcttcccacctcaggtctttctgtggcttcctgctgcctgccatctatgttagccccaccgaccttaccctccacatcactgttttcctgtctgtcacccgtaagactttcagtgcctggggccttttcacatgggagtctgctttggagactgctccccttgcctgcttagccccc

SEQ ID NO: 11874 - DNA, 588 bp, Homo sapiens
  SIMILAR (1)..(216): 1001254mologous to Homo sapiens R33729_1,accession number AC005339,Smith-Waterman Score=384.
caatggcagatgagtctggggaccagcgaagaccaccagcacttcacctgcaccatctggaggccccaggggaagtcctatctgtacttcacacagttcaaggcagaggtgcggggcgctgagattgagtacgccatggcctactctaaagccgcatttgaaagggaaagtgatgtccctctgaaaactgaggaatttgaagtgaccaaaacagcagcaccggtgtcctcaagccacattcagctgcatggcgccaatgctaagcagaaagaggaatcggaggcgccgagctggggcaagggtgggagccaagggagtggacacagcaggtctttctgtggcttcctgctgcctgccatctatgttagccccaccgaccttaccctccacatcactgttttcctgtctgtcacccaagatgagcacgacagggttgccagggcctcctgtgcagaaaaggccgtgggaaacagtgcctaccaccagtaccctggccaaggcacccaaaataaccttcctgacctgcagcagcattttgcaatctttgagaacccctgccccctgctgacaaacaaaaatggcaaatag

SEQ ID NO: 11875 - DNA, 1048 bp, Homo sapiens
  SIMILAR (87)..(566): 521254mologous to Homo sapiens Human breast tumour-associated protein 53,accession number Y48592,Smith-Waterman Score=302.
gcggccgccaacatggcggctctcagcggatgggtggaacggcgtcggcgcgagcttcgtcgggccgcctcgctcctaggggccgtggcgcttttgcttttcggaggcggtgtccgagcccacgacggtggcgtttgacgtgcggcccggcggctgtagagcattccttctgccataacgtgggcccgggggtacgtgccaccgccgacaaatatacgtgtatgttcacttacgcctctcaaggagggaccaatgagcaatggcagatgagtctggggaccagcgaagatcatcaggcacttcacctggcaccatctggaggcccccaaggggaaagtcctatcttgtacttcacacatgttcaaggcagaggttgcggggcgcttgagatttgagtaccgccatggccttacttttaaagccgcattttgaaaagggaaagtgatgtccctcttgaaaacttgaggaattttgaagtgaaccaaaacagcagtgggctcacaaggcccgggggcatttccaaagctgagctgtccaagctggtgattgttggccaaggcatccgcgcactgagctgtgaccagcagcccctgttgcgtggtggcaccttctcatctccggtgaagctgaagggggcctgtgtccctgaaagggcccagcacatcactggttttctaggagggactcttaagttttctacctgggctgacgttgccttgtcccggaggggcttttcagggtggctgaagccctggggcagagaacagagggtccagggccctcctggctcccaacagcttttcaggttcccacttccggtgaagcttttttggactcaggatcgcagatcccggggcacaaagagggtggggaacatgggggctatgctggggaaagcagccatgctccccccgacctccagccgagcatccttcatgagcctgcagaactgctttcctatgtttacccaggggacctcctttcagatgaactgggaagagatgaaatgttttttcatatttaaataaataagaacattaaaaagcaa

SEQ ID NO: 11876 - DNA, 1209 bp, Homo sapiens
  SIMILAR (1263)..(232): 771254mologous to Escherichia coli 37KD protein, similar to YI22-ECOLI,accession number D85613,Smith-Waterman Score=1327.
atggccctctcctcctggccagtggtcctccgcctgaacatggccgactttgtcttcagtttcctctgcctcggcattggaaccagcatcgtactgggtatcctgttctacctgctgcaggcccacaggtacctgcaggaaggcatgacctaccagctggcactcagcttctacctgacctgggccagtgtcttcctcttcctgatgactggtatgggagaggatgaggaaagtgcccttcagactctcttagatccccgaagctcctacctcctggtctccctggagatcctcccaacaaatcccagtcccctgtcaccttgtgctgtgtccgaggatgaaagcgagatgagggggctttctctgctccgtcgtcagtcccaggcaaccggcagacttgagcccacgttcaagcatgacagcaccctgctggccctccagggggccctgggcctctatgatggacacaccccgccatatgctgcctgcctcggctttgagttccggaagcacctggggaatcccgccaaagatggagggaatgtcaccgtctccctcttctaccgcaatgactccgcccacctgcccctgcctctcagcctccccgggtgcccggccccctgtccactaggccgcttctaccagctgactgccccggcacggcctcccgcccatggggtctcctgccatggcccatatgaggctgtcatccccccagggcctggagctatcataccaagcacagggccagctgtgggcatgcagagagagaggtctgaagtggggagtggcgtgcctgcaaggacggtttatgcatcagaacagcacgcctatatgtggcattcggcgctgattcctgactctggtctgcgtgggaaacctactctctcctccaggaagcccccccagacttcctgcgggccagagtttgccaatgtcctctccctggctctctgcggagcgctggtagtgtgcaaggccagagccatggaccaggcgaggcctcggcagctgattggaatagatgcattaagggatcccagggcaagtagtagaacaagggcaggaggcctgggcatgattcgacggcaggaggaagaaccagcggcccgcacggtgcttgccaggtgcgactcaagccccagcgagtgcccgagccatgcacgggcgccatacgacactggccccctttttaacgcgaagggctaa

SEQ ID NO: 11877 - DNA, 657 bp, Homo sapiens
  SIMILAR (445)..(654): 841254mologous to Homo sapiens hepatoma-derived GF,accession number D16431,Smith-Waterman Score=293.
atggggtttaaaaaggaggaagtggcctgccaaggctgtatagatacttccttcatggagctgccattgaaaccctggcctgttgagtgggttgtcaaggagagtgtggaacaggatatcaggggacatgggtctctactaaatggaatgaaaaagcctactgtgcattctgtgctgatatgtgacagtcttcagagaaaggactcctttcttagatggcatgacccattaaatattgctccaggtcaacagaagaaggaaattgctgtcccgcctcagaaatttcactccagggtcatggcatataaaaactggcaggcttctttaaagatgactttctcaaaggactctgagactggggactgtgggatcaacggaatgtttccaggacttcattctatgaagaattcaatgggcacagagggccacaagggaatgctgtttaaggaagcagaaaaccctgaaggggagaagaaggaggcagccaccttggaaggtgagaagacacttcttgtggaggtggaaaagaatagcaccctctctgagcccggctctggccgggggcctccccaagaggaagaagaggaggaggaagaggaagaggctgccaatgaagatgctgagaccccaggcatcagagatcatgagagtctgtag

SEQ ID NO: 11878 - DNA, 1089 bp, Homo sapiens
  SIMILAR (886)..(981): 591254mologous to Mus sp. fibulin gene homolog,accession number S61006,Smith-Waterman Score=76.
gctagcaggaagggtctgcccctggggtctgtagttatctccccagagctcttctcgccggtcggccggcgtagctcgctaagctcgcggggaacaccaacacgaatgttcccacaccactccataactgagtctgtgaactatgatgtgaaaacgtttggatcttctcttcctgttaaagtcatggaagccctaacattggctgaagtcgatgaccagctgaccattaacataaatgaaggtggatgggcttgtctggtgtgcaaagagaagctcattatttggaagattgctctgtcacctattactaagttatccgtttgcaaagaacttcagctgccacctagagatttccactggagtgccgacttagtggctctttcttactcttctccctcaggtgaagcacattctactcaggctgttgctgtcatggttgccaccagagaaggatctatccgctattggccaagccttgctggtgaagatacctacacagaggcttttgtagattcgggaggtgataagacttacagtttcctaacagcagtgcagggaggaagttttattttgtcttcatcaggaagccaactaattcggttgatacctgagagctcaggaaagattcatcagcatatcctgcctcaggggcaaggcatgctttcaggaattggtcgaaaagtttcttctctttttggaattttatctcctagtagtgatctcacactttcaagtgttctctgggatagagagagatcaagcttttatagcctgacgagttcaaacatcagtaaatgggaattagatgattcttcagaaaagcatgcatacagttgggatataaatagagccctgaaggaaaacattaccgatgctatttggtccatatgccaagtgacacagaacgctcctcactttgaatgcggcctagagcaggaaggagctctgcagaaggcccaggctgcaggcaaagaagccttgctttggaccatatggttcagcaggcccaaagatgctggaggtatcaatggtggaggagattcagtaaggagtttaatcaatggtggaggagattcagtgaggagttga

SEQ ID NO: 11879 - DNA, 1801 bp, Homo sapiens
  SIMILAR (5)..(304): 331254mologous to Mus musculus T2,accession number X67863,Smith-Waterman Score=118.
atgaagaggaggttcaggggaaaggatgaagaggaggttcaggggaaaggatgaagaggaggttcaggggaaaggatcaagaggaggttcaggggaaaggatcaagaggaggttcaggggaaaggatcaagaggaggttcaggggaaaggatcaagaggaggttcaggggaaaggatcaagaggaggttcaggggaaaggatcaagaggaggttcaggggaaaggatcaagaggaggttcaggggaaaggatcaagaggaggttcaggggaaaggatcaagagttcagttttgaacttcagcagcccgttaaacctctccagtttggattaggccttcagtcattgaaccagtacctgacaagggctttctgttctcatgacacagtttttacagccaaaggtcagtacatttcttttcaaaagtcccgtagatccgccttgctcctggcatcctttcaccttcttatgaatgatgaagtcgatgaccagctgcccattaacatagatcaaggtggatgggcttgtctggtgtgcaaagagaagctcattatttggaagattgctctgtcacctattactaagttatccgtttgcaaagaacttcagctgccacctagtgatttccactggagtgccgacttagtggctctttcttactcttctccctcaggtgaagcacattctactcaggctgttgctgtcatggttgccaccagagaaggatctatccgctattggccaagccttgctggtgaagatacctacacagaggcttttgtagattcgggaggtgataagacttacagtttcctaacagcagtgcagggaggaagttttattttgtcttcatcaggaagccaactaattcggttgatacctgagagctcaggaaagattcatcagcatatcctgcctcaggggcaaggcatgctttcaggaattggtcgaaaagtttcttctctttttggaattttatctcctagtagtgatctcacactttcaagtgttctctgggatagagagagatcaagcttttatagcctgacgagttcaaacatcagtaaatgggaattagatgattcttcagaaaagcatgcatacagttgggatataaatagagccctgaaggaaaacattaccgatgctatttggggatctgaaagtaactatgaagctattaaagaaggagtcaacattcgatatttggacttgaagcaaaactgtgatgggctggtgattttggcagcagcatggcactcagcagacaatccatgtctcatctattactctctgataacaatagaagataatggttgccaaatgtcagatgcagttactgtagaagtcactcaatataatccaccttttcaggtctgaagaccctgattttgtgtcagttgacggtcccaaacttttcaaaccagactgcctatctgtataacgaaagtgctgtctatgtgtgctccacaggaactgggaaattttctcttccccagggagaaaattgtctttaatgcacaaggtacagtagcagttttagaaagcatgattggcctgaagaggcacaaggagggggcagctactggaaacacagagaaagcagttggacaggaggcacagtccctgacagaggggcacagccaatgtaaagtgcgcacaggcaaggaagaaagctggcagaataactactccaacttctggccttatggcagggcctcacattcatctgacctggcagaagccggagggcaagggagcccattcaggaaggccaccttgctgtggcagagtcaagagtag

SEQ ID NO: 11880 - DNA, 278 bp, Homo sapiens
  SIMILAR (2)..(103): 881254mologous to Homo sapiens cytochrome c-like polypeptide,accession number S80864,Smith-Waterman Score=160.
cgtcccccagcccgacacccgtaaagggtctgtgctgaagtggattagtaaaagaggaaagcctcttgcagttgagatagaggaaagccactgtctgctgcctgcccctgagaactgaatgtctcggtataaaacctgattgtacatttgttcagttgtacacgtccagtcatagtaccttcccttgaacttaattatgacgtagattctattgctcacatgtttgttgctgaccttctccttatgatcaccctgccctcctacgacattccttttta

SEQ ID NO: 11881 - DNA, 267 bp, Homo sapiens
  SIMILAR (147)..(263): 741254mologous to Homo sapiens Human secreted protein, SEQ ID NO: 7083,accession number G03002,Smith-Waterman Score=143.
cccctccatgggctcctgtgcggcccgagcctccccaacaaggaccaccctctgctccagggcgcccaatcccatcgaccacccaagggctgaggagtgcggacgcagggcgcaggactggcacgcagctccaccggcagcccgcgaaggtctgcagcttcactcctgaagccagcgagaccacgagcccaccaggaggaacgaacaactccagacgcgccgccttaagagctgtaacactcaccgtgaagatctgcagcttcactc

SEQ ID NO: 11882 - DNA, 1341 bp, Homo sapiens
  SIMILAR (1009)..(1338): 791254mologous to unidentified cloning vector chloramphenicol acetyltransferase,accession number M37847,Smith-Waterman Score= 460.
atgggggaaagaaacggttcgggaaaggggagaatggaggggagaagagggaaggaagatggcaggagcctcggaggtcaggcttgcaagcaaagcaaacaccaggctccagaggggtttgcaggctacagaacaccgagtttcgagagaatcacatgtttatcttctcttaaaattctcatactgaacgatctggatgtgactcagctcacgcagtcgctagctgtggcaccgtattttaacagaaagaacactgtatttgccagctcagtacagcatatctctggctctgttttctccccagcaggaatccgagggtctgtctctgtatgtgttatcatcagactgctggcatacctttccctgctgtggtattcagacctaaatagtgtgtgcacctattacctctgcagagtaattactgtttggtaccatggtagagtttctgtgtccagatacggttgtgaatgcttggaatgtaacattgggaaagacagaactattgcttgtaagacgtgccttttgccttccaccttctgccgtgattgtgaggacccgccagccacgtggaactcttactgctttgagagagcatccaggtctgtgtatggagcagaaacacaaaaggagtccagaaatctcctcgtgctgaggaaagacagagctgaggctatggggagaccaaagcagaattggtgggttcttggtctcactgacttcaagaatgaagccgtggaccctcgcggagtgaagctgcagaccttcgcggtgagtgttacagctcataaaggcagtgtggaccgagtgagcagcagcaagatttattgcaaagagcaaaaaaacaaagcttccacagtgcagagggggaccccagcaggttaccactgctggttccggcagccttttattctcttctctggccccacccacatcctgctgattgctccattttacagagagccaattggtctgttttacagagagctgattggccgtaacacgcataagcacaagtattatccgaccgttattcacattcttgcccgcgtgatgaatgctcatcagaatgtacgtatggcaatgaaagacgggtttattgagaatatgtttttcgtctcagccaatccctgggtgagtttcaccagttttgatttaaacgtggccaatatggacgacttcttcgcccccgttttcaccatgggcaaatattatacgcaaggcgacaaggtgctgatgccgctggcgattcaggttcatcatgccgtttgtgatggcttccatgtcggcagaatgcttaatgaattacaacagtactgcgatgagtggcagggcggggcgtaa

SEQ ID NO: 11883 - DNA, 861 bp, Homo sapiens
  SIMILAR (1)..(1182): 991254mologous to Escherichia coli arginyl-tRNA-synthetase (AA 1-577),accession number X15320,Smith-Waterman Score=2035.
ctacacggttgtagggtcgttttcaggtgagatcagcaagctgctttctctctctgctttctgctggttgcagcaaacctgccccacacatctattttcagccatggaaaagcaccatgtcctctgggcagccagccccaggcagtggttgaggatgaaagtcccagaataaccaaggtcttttaccagtggtttgatgatggaacataggccccagatcagtctgggtaaaggactctggggtttcaaattagagcctgagaagtctaagcaagaacctggaatgtgccaaaagtatgtgttagaattaaagcaaacagccattctatatttacgggccttagctgccttcccgcggggcagggctcgggacctgcagcccgccatgcctgagcctccgaccccctccgtgggctcctgtgcggcccgagcctccttgacgagcgccaccccctgctccatggcgcccagtcccatcgaccacccaagggctgaggagtgcgggcgaacaacgcgggactggcaggcagctccatctatctgcagccccggtgcgggatccacgaggtgaagccatctgggctcctgagtcgggaaggtctgcagcttcaatcctgaagccagcgaggccaccagcccaccgggaggaacgaacaactccagacgcaccgccttaagagctgtaacactcaccgcgaaggtctgcagcttcactccgcgaggatccgtggcttcattcttgaagtcagtgagaccaagaacccaccaattccggacacactgtgagtcaggatcagtcttattatagctaattagagcaaccccattgctaaagagtttagagcctgggtcagacttcat

SEQ ID NO: 11884 - DNA, 389 bp, Homo sapiens
  SIMILAR (103)..(41): 1001254mologous to Homo sapiens Human secreted protein, SEQ ID NO: 7678,accession number G03597,Smith-Waterman Score=108.
cgctgataaccatgtcccaagcactgctctaagttcccaatgtgtccggaattggtgggttcttggtctcactgacttcaagaatgaagccacggaccctcgcgttttagactatgctaaaaacagcctcaggaccttcagcactgatcaacaatcctgggcatgggctgaccgacagttttcacccagagagtgaagatcatggaggagccatcttaaattcgcgcccagcgcaggctcccaggaatccttatgtcaccgatctcaattcagccaatgtgacaaacacagcagtaattaagtctagagagctaaacacacctcaaaaagaattgtctcttggtatgagtggaatggaataaaatacatggaaacccaaaaaaaaaaaa

SEQ ID NO: 11885 - DNA, 424 bp, Homo sapiens
  SIMILAR (337)..(996): 991254mologous to Escherichia coli 37KD protein, similar to YI22-ECOLI,accession number D85613,Smith-Waterman Score=1181.
ctacaaaaggagcagcaccagttcagtaaaattggtgcacgtccagtcatagtaccttcccttgaacttcattatgacatagattctattgctcacatgtttgttgctgaccttctccttattatcaccctgctctcctactacattcctttttacttgggcttccaaaatgctgggattacaggcataaaccaccgtgcctggttctattagtacttttataaacagcatcgcgaaggtctgcagcttcacttctgaagccagcgagaccatgagcccaccgggaggaacgaagaactccagatgcgctgccttaagagctctaacactcaccgcgaagatctgcagcttcactcctccagggtccgtggcttcattcttgaagtcagtgagaccaagaacccaccaattccggacccacaac

SEQ ID NO: 11886 - DNA, 633 bp, Homo sapiens
  SIMILAR (225)..(148): 881254mologous to Homo sapiens Human secreted protein, SEQ ID NO: 7678,accession number G03597,Smith-Waterman Score=118.
aaaacactatcagctgagctgtcattactaacaaaacccaaaaggaaagtgaaagctttgtttctctttacccacccctccaacactgacgtagctattcagttgttaaataaacctgttgtgttgcacatctgcactgtgctgataggaaggtatttctgtgtccggaattggtgggttcttggtctcactgacttcaagaatgaagccgcggaccctagcggagtgaagctgcagaccttcacgaaaacactatcagctgagctgtcattactaacaaaacccaaaaggaaagtgaaagctttgtttctctttacccacccctccaacactgacgtagctattcagttgttaaataaacctgttgtgttgcacatctgcactgtgctgataggaagaccttgtgtggtggatgggacttgggccgtcgagcaagaggcagatctcatcgtggaggctcgtgcggcacaagaagccattgagaggggtgggaggatcaaggcatggctgcagggtgacggaacgactctttggcgaccagatgtgagggaagaatcacggaaagagagtatcattagaccaaaaagtcgctgtatcttagatatagacatgatgacattcagcttggtctaa

SEQ ID NO: 11887 - DNA, 641 bp, Homo sapiens
  SIMILAR (307)..(444): 791254mologous to Homo sapiens cytochrome c-like polypeptide,accession number S80864,Smith-Waterman Score=189.
  misc_feature (1)...(641): n = a,t,c or g
ttccaggggaccggcactcagcacaccaaggacctgcacaggcaccggcctatgagttccctcagtttttattgaatatgattttcattatttcagcaaaaagaaatgtagtaggagagcagggtgataataaggagaaggtcaccaaaaaaaacatgtgagcaaaagaatctatatcataattaagttcaagggaaggtactatgcctggacgtgcacgtaggccagatttatgtttctctccacccaaacatctcagtggagtaaagaataacaaggcagcactactgccaacatgtctcgcctccactgagatgtttgggtggagagaaacataaatctggcctacgtgcacgtccaggcatagtaccttcccttgaacttaattatgatatagattcttttgctcacatgttttttttgttgaccttctacttattatcaccctgctctcctactacattcctttttgctgaagtaatgaaaatcataataaaaaaaactgagggaactcaaaggccggtgccggtgcaggtccttggtgtgctgagtgctggtcccctggacccaatgttgtttccctnnnnnnnnnnnnnnnnnnnnnnnnnnnnnnnnnnaaatagggcgggtggcgggggcct

SEQ ID NO: 11888 - DNA, 1420 bp, Homo sapiens
  SIMILAR (876)..(992): 741254mologous to Homo sapiens Human secreted protein, SEQ ID NO: 7083,accession number G03002,Smith-Waterman Score=145.
gttcaaacaattctcctacctcagcctcccgagtagctgggattacaggtgtacgccattgtgtccggaattggtgggttcttggtctcactgacttcaagaatgaagccgtggaccctcgcgcctggacaacaaagagcaaaaccccacctcaaaacaaaacaaaacaagaaaacaagaatgaagatgtagggagagatcagagggtggagtggcttgtcacagaggaggtctctgagttgagccttaaaggagagaaattacactggaaggagaaggaagtacagagcacaggcaaagaaacagatgcacggagcagcatgaggaattatttgatgttgctgggacctgaagtgcaagaaaaagagccagtgaagagaagactagcaagggggaaggcttttgttgaattagcagaacctaccagagctcctggaaattctgggtttccggtctctgggggcgtcttcactccaagcctcggtgcccttacttggatttgcaagtttagagttaaatcgtgggccatactcaattcccaactgctgcttgacaccatgaagaaagggattgtatataagaatggagacagaatccagggcaacaggtcagcagacaatcgtaataatggtgtgcctctcactggggctcgggacatgcagcccgccatgcctgagcctcccacccactccatggggtcctgtgcagcccgagccttcccgatgagcgccgcctcctgcttcagggcacccagtcccatcgaccacccaaaggctgaggagtgcgggcgcacggcgcgggactggcgggcagctccacctgcagccccggtgcggggatccactgggtgaaaccagctgggctcctgagtcgcgaaggtctgcagcttcactcctggagccagtgagaccccgagcccaccgggaggaccgaagaacttcagatgcgccgcgttaagagctgtaacactcaccgcgaaggtctgcagcttcactcctcgagggtccgcggcttcattcttgaagtcagggagaccaagaaccccccaattccggacacagggggacttggctgcttcctgtttcatggtagtgctcgggggatcccaaatgttcgagagcaatcggttttgtcttgctagtttccggtccgacatcaggggtgttcgcaatggcgtcgctctctttgtggacgccccaggattattacgaacggtagtccgcatgcctacactctccgtgtcctctctgcgctttcttctttcgtcatctctggaggctagaagtccaaaatcaaggtctttatagggctgtgctctctctaaagcctctgaaggagatccctcttcactttttccagcttctggtagcccaaggtgttccttggcttgtcgcaccacaactccaatctcagcctccat

SEQ ID NO: 11889 - DNA, 831 bp, Homo sapiens
  SIMILAR (182)..(3): 961254mologous to Homo sapiens Secreted protein encoded by gene 20 clone HGCAB62,accession number Y01447,Smith-Waterman Score= 329.
ttttttttttttttttagagaaacgatagttgggcccaggggcaccgacacacagcacaccaaggacctgacactggcaccggcctctgagttccctcagtttttattgattattattttcattatttcagcaaaaaggaatgtagtagcgagggcagggtgataataaggagaaggtcagcaaaaaaacatgtgagcagaagaatctatgtcataattaagttcaaggggaggtactatgactaggatgtgcacgtaagcccagatttatgtttctctccacccaaacatctcagtgggagtaaagggataacaagggcagcattgctgcaaaacatgtctcacctcccaccataggggcgggtttttctcccatctcagaactggaccaatggtacaatccgtgttttaatacccgggacattcaagttccccagggggcagttcagggagaccagtgggccttccctcttattctcaaatgcaagagtctttcctctttggactaattccaccttcaggcacagatcttttttggggtgttcacgttggggggaccgtcaggtctttctcatcccacgaggccatatttcagactatcacatggggagaaaccttggacaataccctgctttcaagggcagaggtccctgcagctttccgcagtgcattgtgcccctggtttattgagactagagaatggcgatgacttttaccaagcacactgcctgtaaacattttgttaacaagacacatcctgcacagccctagatcccttagaccttgatttcatacaacacatgtttttgtgagctcaaggttggggcaaag

SEQ ID NO: 11890 - DNA, 1404 bp, Homo sapiens
  SIMILAR (1)..(672): 841254mologous to Escherichia coli exonuclease V (AA 1- 1180),accession number X04581,Smith-Waterman Score=953.
atgcgtctcgaaagtgataacatctggtgcagtttgtcccgatccacaaatcgaaaggggctggaatatcccattggtccttggctgccgtttatcaccaattcccgcgtccaggagcaggcgttttatcacgatcgccactcgtttgaggcagttctggatcttaatgctgcgccagaaagcgtcgacctcgcggaggccgaacgtctggcggaagatctgcgtttgctttacgtggcgctgacactctcggcgtttgcaccgctggtgcgccgtcgtggcgataaaaaaggtgacaccgacgtccaccaaagtgcgctcgggcgtttgctgcaaaaaggggaaccgcaagatgcggcagggcttcgcacctgtattgaagcgttatgcgatgatgatattgcctggcaaacggcacaaactggtgataaccaaccctggcaggttaatgatgtttctacagcagagctgaatgcgaagacgttacaacgattgcccggcgataactggcgcgtcaccagctactctggtttgcaacagcgtggtcacggtatcgcccaggatttgatgcctcggctggatgtcgatgctgcaggcgttgccagcgtcgttgaagaaccgacgttaacaacaacaccagtttccggcgggggcgtcacgggggacgttctggcaacagtttgtttgaagacctggattttacccagccggttgacccgaactggaggttgtgagcgtacccactacacgtcgttcgccaatgcaccttgtaacaaggccaacgttgcctgccagttatcttcatgcacgccaattgctttgaagaccgggcgagaagctgttgaaagcgctcaggaaaatgctgacgatgatgatcactttaccagcacgcagaacgaagcctttcagacgctgccaggtctggataatcaggcttttaacgtgtggtacatgatagaccggcaactccatgacaaacggcgtcgcttcaccgcgcatgatggtgtacttgagcatcaggccagtcagcaccgccatcacaatacccagcatatacagcgagaagaccgccagcgcaccgttctgcccgaagaaggcagccgcgaatactgcgaagatagccagacgcgcgccgcaggacataaacggtgccatcatgatggtcatcagacgttcacgcggtgcatcaagcgtacgtgcacccattaccgacggtacgttacaaccgaaaccgacgatcagcggcacaaaggatttccccggcaagcccagcgcctgcatcagacggtccatcacaaacgccgcacgcgccatatacccggagtcctcaagggaggagaggaacaccgaattatatgcctcagcatcagacagtgtctaagattcatctttggcaggcactga

SEQ ID NO: 11891 - DNA, 1319 bp, Homo sapiens
  SIMILAR (156)..(866): 981254mologous to Escherichia coli exonuclease V (AA 1- 1180),accession number X04581,Smith-Waterman Score=1230.
atggtctgctgtttttctgaaaacatccagtacaaagagtgcgacttgaggctgaatgtggagctcgggccagcagctctgcagagtgcctactcccaccgccaccaatgcgccctggtcctcctatgcgaggaggagagtcagccggcacacaaactctcggcgttgcaccgctggtgcgccgtcgtggcgataaaaaaggtgacaccgacgtccaccaaagtgcgctcgggcgtttgctgcaaaaaggggaaccgcaagatgcggcagggcttcgcacctgtattgaagcgttatgcgatgatgatattgcctggcaaacggcacaaactggtgataaccaaccctggcaggttaatgatgtttctacagcagagctgaatgcgaagacgttacaacgattgcccggcgataactggcgcgtcaccagctactctggtttgcaacagcgtggtcacggtatcgcccaggatttgatgcctcggctggatgtcgatgctgcaggcgttgccagcgtcgttgaagaaccgacgttaacaccacatcaatttccgcgcggtgcgtcaccggggacgttcttgcacagtttgtttgaagacctggattttacccagccggttgacccgaactgggtgcgggaaaaactggaactcggcggctttgaatcgcagtgggaaccggtattgaccgagtggatcacggctgtcctccaggcacctctcaatgaaaccggcgtaagcctgagtcaactttccggccgcaataaacaggtggagatggagtcttatctgccgattagtgaaccgcttatcgccagtcagcttgatacgttaatccgccagtttgacccgctatccgcaggctgccgacgtggaattatgccggtacgggcctgttaaaggatcaacggtgctggacgcacaaagcacgtgggagcccacggtcctggcacaggtcattcacgagctccttctattcggggctagggagagagtggggctgagcttgctgtgggtggtccctgagtatcccggatggctcccggggaagaggagggcaaaactgctgggccgtggcaacaggggcgactgtacgcggaaaacaaggactaaacaccccgcgggggaaaagcacgctagttggaaccagccaaatttagcaggggacaaacacgaggaggagcacgagaaccctccgaaaaacgatcttagtcctgttgtcagctgtcactccgatcatattgtggcacactttggcttacacaacatttctgctcctctaaacctcatctctgtccacccctgtgcccttctctccag

SEQ ID NO: 11892 - DNA, 1965 bp, Homo sapiens; identical to SEQ ID NO: 7403
  SIMILAR (2257)..(989): 981254mologous to Homo sapiens glycosylphosphatidylinositol anchor attachment 1 (GPAA1),accession number AB002135,Smith- Waterman Score=2141.

SEQ ID NO: 11893 - DNA, 381 bp, Homo sapiens
  SIMILAR (382)..(477): 451254mologous to Homo sapiens Truncated pro-alpha1(III) chain,accession number W12842,Smith-Waterman Score=61.
atgaggttttacggacagctggctgaagacccagggcagcaaaaagctggggaaacaacaaggcatactgaagactatatttctcagctgcctttgcagagacaagggatccccgaacttgcccttcagaaagatctttttattaacaagatttatggaaaagagttcaatgtctgcaggtcgactctagaggatccccgagttcatgtcctttgtagggacatggatgaagctggaaaccatcattctgagcaaactattgcaaggacagaaaaccaaacaccgcatgttctcactcataggcgggaattgaacaatgagaacacttggacacagggtggggaacatcacacaccagagcctgtcatggggtgggggtag

SEQ ID NO: 11894 - DNA, 1953 bp, Homo sapiens; identical to SEQ ID NO: 7955
  SIMILAR (1183)..(1254): 751254mologous to Homo sapiens microtubule-associated proteins 1A/1B light chain 3,accession number AF183417,Smith- Waterman Score=88.

SEQ ID NO: 11895 - DNA, 411 bp, Homo sapiens
  SIMILAR (59)..(121): 801254mologous to Homo sapiens PRO1546,accession number AF116638,Smith-Waterman Score=88.
atggtggatcctggtgccattactccccagagccagggcttatataccactggaaaaggggacatggatgaagctagaaaccattattctgagcaaactattgcaaggacagaaaagcaaacacctcatgttctcactcggcacaaaaatgctctccacacggcacccgcactacctgtcattccagatgcttaccgctttagtgcctctttcagcaatatgaagttaaatccaggtactgtgagtgctgacttgacttttggttcttatgaaggtggggtggacctggagcctgtgtccactggagcaggtctagatcttgggttcatggtggccagcctgacagtaaggctcactgaagttgtcctaatggttgggtccacagggatagtcctgatcataagtccatag

SEQ ID NO: 11896 - DNA, 1038 bp, Homo sapiens
  SIMILAR (378)..(1151): 271254mologous to Leishmania major proteophosphoglycan,accession number AJ243460,Smith-Waterman Score= 190.
atggatgaagctagaaaccatcattctgagcaaactatcgcaaggacaggaaatcaaacaccacatgttctcactcataggggtccagtaccagcacctctcaccagtggtctacactattatacaactttagaagaactctggaaaagttttgatctttgtgaagactattttaaacctccatttggaccatatcctgaaaagaggcctgaaatctgccatgagagctgcattcttttaagacgttggccctcattaaaaggcaagatttatccaaaacgtaatggcttaaatatcagccattttcgtgtgatcaatttcagattctccaatgacagcaaatatggtggggatgaggcacagtgtgggaaggattccttggtttccatgaaatgttcattgtttcggttctgtccgtggtcaaaagaattgcctttccagcctccggaggggagcatttcttcacacctaggatcaggagccagtgacagtgagaccgaagagacccggaaagcggtctgggacaacgaccacatgctctttggaagaggctttggtgagatcccaaacacacatgtgaacatgcatgtccagaaagaggcagaatggccattgcacttttctctctgggctccgcggcagtgttcacaaataacactgagtaaagaccttgaacagggtggggaaaacaaaggactggaggtgaaaatgggaatgggagagaataatctgggtgtcaataggaaaggctcggtcacggaaggaccgatggtggtgtcattcacagaaagtcagccaggactgcggagagatcatcgccagtggatgctttctctgacctttccttcctgcatgctgttgggaagactggccccaaatccaacgggaaggatatcagagaccaccgagtttggggcacagagaaactcacaaaaatgtgggagaagcagaaatagctacaccatacccgttttggaagaggctacatctacattcaagggaagtttatgccccattccccttgaactgtccatgtaa

SEQ ID NO: 11897 - DNA, 6003 bp, Homo sapiens
  SIMILAR (1442)..(1263): 451254mologous to Homo sapiens Human high mobility group protein HMGI-C mutant fragment 9,accession number Y21425,Smith- Waterman Score=95.
atgaacatcgatgcaaaaatcctcaataaaatactggcaaaccgaatccagcagcacatcaaaaagcttatccaccatgatcaagtgggcttcatccctggggatgcaaggctggttcaatatacgcaaatcaataaatgtaatccagcatataaacagagccaaagacaaaaaccacatgattagctcaatagatgcagaaaaggcctttgacaaaattcaacaacgcttcatgctaaaaactctcaataaattaggtatcgatgggacatatctcaaaataataagagctatctatgacaaacccacagccaatatcatactgaatgggcaaaaactggaagcattccctttgaaaactggcacaagacagggatgccctctctcaccactcctattcaacacagtgttggaagttctggccagggcaattaggcaggagaaggaaataaagggtattcaattaggaaaagaggaagtcaaattgtccctgtttgcagacgacatgattgtatatctagaaaaccccattgtctcagcccaaaatctccttaagctgataagcaactccagcaaagtctcaggatacaaaatcaatgtacaaaaatcacaagcattcttatacaccaataacagacaaacagagagccaaatcatgagtgaactcccattcacaattgcttcaaagagaataaaatacttagcaatccaacttaaaagggacgtgaaggacctcttcaaggagaactacaaaccactgctcaatgaaataaaagaggatacaaacaaatggaagaacattccatgctcatgggtaggaagaatcaatatcgtgaaaatggccatactgcccaaggtaatttatagattcaatgccatccccatcaagctaccaatgcctttcttcacagaattggaaaaaactactttaaagttcatatggaaccaaaaaagagcccgcatcgccaagtcaatcctaatttatagattcaatgcccaagaattggaaaaaactactttaaagttcatatggaaccaaaaaggagcccgcattgccaagtcaatcctaagccaaaagaacaaagctggaggcatcacgctacctgacttcaaactatactacaaggctacagtaatcaaaacagcatggtactggtaccaaaacagagatatagaccaatggaacagaacagagccctcagaaataatgccacatatctacaaccatctgatctttgacaaacctgacaaaaacaagaaatggggaaatgattccctatttaataaatggtgctgggaaaactggctagccatatgtagaaagctgaaactggatcccttccttataccttatacaaaaattaattcaagatggattaaagacttaaatgttagacctaaaaccataaaaaccctagaagaaaacctaggcaataccattcaggacatagccatgggcaaggactttatgtctaaaacaccaaaagcaatggcaacaaaagccaaaattgacaaatgggatctaattaatctaaagagcttctgcacagcaaaagaaaccaccatcagagtgaacaggcaacctatagaatgggagaaaatttttgcaatctactcatctgacaaagggcgaatatccagaatctacaatgaactcaaacaaatttacaagaaaaaaacaaacaaccccatcaaaaagtgggcaaaggatatgaacagacacttctcaaaagaagacatttatgcagccaaaagacacatgaaaaaatgctcatcatcactggccattagagaaatgcatatcaaaaccacaatgagacaccatctcacatcagttagaatggcgatcattaaaaagttaggaaacgactggtgctggaggggatgtggagaaataggaagacttttacactgttggtgggactgtaaactagttcaaccattgtggaagtcagtgtggcgattcctcagggatctagaactagaaacaccatttgacccagccagcccattactgggtatacacccaaaggattatagatcatgctgctataaagacacatgcacacgtatgtttactgcagcactattcacaatagcaaagacttggaaccaacccaaatgtccatcaatgatagactggattaagaaaatgtggcacatatacaccatggaatactatgcagccataaaaaaggatgagttcatgtcctttgcagggacatggataaagctggaaaccatcattctcagcaaactatcgcaaggacaaaaaaccaaacaccacatgttctcactcatagatgggaattgaacaatgataacacatggacacaggaaggggaacatcacacactggggactgttgtggggtggggggaggggggagggatagcattaggagaaatacctaagggcactggcagagttctacttggtgctggccacactgagttccaatgcaaagtcccagaatggctgagctctccttcccccaagcatacagattctctctccgcaccatgtggccactgcctggagatgagggaagggtggtgttggcatttcaagactgtctttgctatcctcttcagtgcctctgtcagcgatatgaagttaaaaccagttgttgaaagtgatacactaacaattgagtctggaccacttgctagtgaagataaaccactttcgtgtggtacaaactctggaaaagaacaagaaataaatgagactctgcctatcacaactgtagctcagagttcagttctacttcatcctcaagaagcagcagccaggattagaatgtcagcaaggcagaaacagataatggaaatagaagagcagaagcaaaagcaattggaattacttgaacaaattgaacagcagaaattaagattagaaactgactgcttcagggctcagctggaagaagaaaaaagaaaaaaaactcaaccgactggggtaggatgcagaaaatctcatcactacataaatcatttgcattcttttagttctctgcctgttaaagttgagtcaggaaaaattcaagaacccttttcagccatgagcaaaagtacagtttccacaagccattctataatcagccaaatgcatgataggcctttgctgccgtcagagaatatcacagcccagcaaggtaatatgaaggccctccaagaacagttagacctacagaagaaagttcttcaggcaactcaggaagctcaggaacagttgcttttgtgcaaacagaaagaagtggaacagcaaacgggcctctcggtattccttcccttggtaactccagattcatctgctttattgccttctgccaaagcagatttggggagaatccaggaatcttcaccaaccaagaataatattgcagtttcctcagaccatcatgtgatctcacaacttcaggataagcgtttgagtctttcacagcctatcctatcacagcaaaataattttaaatttctccaagagcagttgaatattcagaaggatagccttcaggctaggcgagaagcccaggaagtattgtatgtacataaacagagtgaattggatagaagagtatgttccgaacaggctgagccctctttcccatttcaggtagctcagcatacatttacttcactaccatctgctgatacaaaatctggaaaaatacaggagcaacattcatctaagagcgagaaaggacttgtttcatgccaatctgacatccccatatctcaggatgggtctttgagtttcctacagcagttcctacctctacatgatagtttgaagttgctccaagaacagttgactaaacagagggatactcttcaggctaggcatgaagctcaggtggaattacttttacatagacaaagagatttgggggacagtaagtctgggctggtgagctcttcatcctcaccagtggttgttcagcattcagttgcttcacaagcttctgctaaagctgagcctaggagaattcaggagctttatttatctgagaaggagaatgtggatgaatctgagagattccaggaatgtatatcaatcaagagtgacagtaccattcccttaagccatcctaagatcccaagatgtcaggaaagacttttgagagtttcacaacatatgctacctctacaagataatttggaggaacaccaagcatggctagacactgagaaagaagcctttcatttcagccagaaaacccaagaaaatacatcttctgaacaaactggttcatcttcattcataccccagttggtacagctttcatttacttcgttagcttcagctgagtctggcacaatcctggaacctctttttacagagagtgaaagtaaaattttttcaagccaccttcagatcccacaattgcaggataggcttttgaggatatcgcaacttatccagcctcaacaagataatttgaaggcacttcaagaacagttagctacacagagagaagccatcattctagctagacaagaagctcgggaagaattacttttacatcagagtgaatgggagggaagaatatctcccgagcaggttgacacctcttccttacccctagtaccacagcattcattcgcctcattacctcttaatgaatctgaaagaaaccaagaaccatgttcaattaacagtgataatatagtatcctcaggtcactcagagataccaacattgcctgatgggctgttgggtttatcacatcttgttttacctcaacaagataatttgattgcacttgaagaacacttgcatgcacagacagatttccttccttctattgagaaaacccagaaagaattggttttgtcaaaaccatgtaaatttgaggaaaaggtatcttctgagcattttatccagtctcaccatggtgatttgcaggcacttcaacagcagttagatacacagaagaaagccattcgatctatacaggaagtccaagaagaattgcttttgcaaagattaagtgaattggagaaaagggtatcatctgaacaagtttgctcctcttcatttgtatcccagcaagataacttgggacttcagaaacagttggatctacaaagagaagttctgcattatagccagaaagcccaggaaaaattgcttgtacagagacaaacagcattgcagcagcagatacagaaacatgaagagactttgaaggatttctttaaagacagtcagataagtaagcccacagttgaaaatgatttaaaaacccagaagatggggcagctcagagactggtttcctaatacacaagacctagcaggaaatgatcaagaaaatattaggcatgcagataggaacaactctgatgataatcatttggcttcagaagatactagtgccaagcaaagtgggagacatgagacatcaatcaacacatgtacgataagcattggtttggttcggaaaagtttcctctttgtggcaaagctgaactctggacttagcaggcttccctatggtcagtgtgcatttagagtctgccgaagatcatgtactctccactatgtcaaaactgcccatattttgtacaagttaattgcagaggttacaaggggatttggccacctccttaactttttcccacagcacatggcaagcacaaccccccagctggattcagggcacaaaggaaaagattgggagggaagcagagggagatgtgacactgacaaaaaagaaggcaaggtggccacagaggcagagactagagtcacgcagctgcaagtcaaggaatgccagcagccaccagggctgaagcggcaaggaacgggttctcccctggagcctctggagggaggctggccctgccaacaccttgatctgcaacttctttccagcttccagaactgtgagagaagaagttctgttgttctaagccatcaacttgtggtaatttggtatagcagccataggaaaccctatgcaaacagtgaactaaataatgagcggtatttgtag

SEQ ID NO: 11898 - DNA, 1128 bp, Homo sapiens
  SIMILAR (1)..(225): 411254mologous to Homo sapiens Human secreted protein, SEQ ID NO: 8144,accession number G04063,Smith-Waterman Score=142.
atggcacatccactttggaagacagtttggcagtgtcttataaaactaaacgtacttttaccctatgatctagcaattgtacagcaagtgtacgagggttgcttcaaaagacattgccttttgaaaagacatgttgaaaattatgtccatgtaaaaacctgcacgcaaatgtttatagcagttttattcataattgccaaaacttggaagcaaccaagatgtccttcagccctatctctgacaattgacccacgttccagcttcttggacctcacccagacccacttcttcagtagcctgtcaggcaactgggagagcaaactgctgccttcctgcaaaagggagcaaaaccaggctcagagaccctcaataagaatgcctgcgtttttcaggaggacttggagagctgagctccatgctcatggcagtgaccttggtaatgcacctgcttcctccctgctggttcctgggatcacctctcgatcaatgagctgccccaagtctatgccccaggcttcactttcaagaaaatctgaaccaagacccagcatccctgtcactgagggaactttctacaaccccccttcagatggtcaccagtatttgctagaatctccagggatgacaggagtttgtatacctcaattaagtcttaccattgctggacaaaagagggggacaggaaaagggagcctggagctggctctgcatcaagtactttttctctgttgcaattcccctgtcttgataaattggctctgtctaggcagcaggcaaggtaaaccccttgggcagttacagaaagggcagtcagatgtggaggtctcccaccttctgctacccccaggtctaccagcagggtggaggatgggctcagaggcattggggaaagggagagagaaagatgggatgagggttgtggagagaaggaagagaggggagagagatgaaacaaacaggtccaagacattcatcactctggaaggaaacccctgtgcttcaccttccactgtgggcaaccgggagtcaccaaacattagaggaaaagcttctgacatgaatgacaaacgaaaaagacaacagacaggaggaatgcaaaggaaacagagagcgagaagagcagaatga

SEQ ID NO: 11899 - DNA, 363 bp, Homo sapiens
  SIMILAR (36)..(296): 681254mologous to Homo sapiens syntaxin 8,accession number AF036715,Smith-Waterman Score=256.
atggacatgagggtccctgctcagctcctggggctcctgctgctctggctctcaggtgccagatgtgacatccagatgacccagtctccatcctccctgtctgcatctgtaggagacagagtcaccatcacttgccaggcgagtcaggacattagcaactatttaaattggtatcagcagaaaccagggaaagcccctaagctcctgatctacgatgcatccaatttggaaacaggggtcccatcaaggttcagtggaagtggatctgggacagattttactttcaccatcagcagcctgcagcctgaagatattgcaacatattactgtcaacagtatgataatctccctcccacagtgtaa

SEQ ID NO: 11900 - DNA, 1240 bp, Homo sapiens
  SIMILAR (379)..(561): 371254mologous to Baboon endogenous virus strain M7 gag-pol precursor polyprotein,accession number D10032,Smith-Waterman Score= 96.
tgcagaattatccatgggctcaagcaagagatgaaaaatcatattctccccaaaatgggaaaatcagtgctaccaggggcccaaagggatgttcaggttacatctgtcaggattaataccataacagaggaccatctttggagcacagtggggctcacctccgattctggcctagtccaaaggcacaaagccccttgcaccagcagcgtgcgtcagcaagagagcggaagcaggaacagttggcaggaagacacataccccctgaagatccagagggaggccatctgggtacagcagctggacaaaagaagctcctcagcctccagtcgcctgtctgtgcatgcccctcggtcactgatctcacctaccagactcaaaaagggtgcccataaagcggtaaactatgaaaaactttcagaaatcacccaaggtcataacaaaaacccagccctttttctctcttgtttaactgacgccatgagaaagtataccaacgtagacccagctatcccagaaggaaccactaaacctttctccctctataccgatgaatgcaagctccttcaagctgccagactcctgcagaaagctaccgtcattcattgcagggaccatcaaaccccagacaatcctattttggtgggaaatctagcagatagagaagccaaacaagtagccctacaacctgtacaaggccagtttctgtgcctgtcctcgttctctcctctttactctccagaagaaaaggaggactaccaagcccaaaaccttcaaaaacaaggaccatgattctgagccattcaggaattacctcccctccttaatccagacatggtctttcattcgtgaagcagcaaatgaggccatgccccttcctgtcaacacctccttgtcctctcaacataactgtcttgcaggcacagatgtgtttatctgccaacccgagcctcacaaaaacctacaactgaagtggacaggcccctacactgtgatacgcagcatgccaactgcagtgagacaaggactcctcaactggattcatcgcactagggcacgtgagattatgaacaagtggcccagaaccctaagttggtggggagaacaggttgctgctgcagattcggtgtctggggaacaggaatatgccgggagactcgtagacacttttgaaggatttttgcaagaaatgctaaatcaaaaatgctgtggtgaagttcctgagggtggtgccttgtcctga

SEQ ID NO: 11901 - DNA, 479 bp, Homo sapiens
  SIMILAR (3)..(68): 1001254mologous to Homo sapiens syntaxin 8,accession number AF036715,Smith-Waterman Score=109.
  misc_feature (1)...(479): n = a,t,c or g
aaagagagagagacagcttatgccattatttctcctctctctctctgccttggctgccnnnnnnnnnnnnnnnnnnnnnnnnnnnnnnnnnnnnnnnnnnnnnnnnnnnnnnnnnnnnnnnnnnnnnnnnnnnnnnnnnnnnnnnnnnnnnnnnnnnnnnnnnnnnnnnnnnnnnnnnnnnnnnnncagcttatgccattatttctgcatatcagacttttagtactttcactaattttgctattgctatctagaaagcannnnnnnnnnnnnnnnnnnnnnnnnnnnnnnnnnnnnnnnnnnnnnnnnnnnnnnnnnnnnnnnnnnnnnnnnnnnnnnnnnnnnnnnnnnnnnnnnnnnnnnnnnnnnnnnnnnnnnnnnnnnnnnnnnnnnnnnnnnnnnnnnnnnnnnnnnnnnnnnnnnnnnnnnnnnnnnnnnnnnnnnnnnnnnnnnnnnnnnngttntccttgacactgagg

SEQ ID NO: 11902 - DNA, 477 bp, Homo sapiens
  SIMILAR (447)..(244): 381254mologous to Dictyostelium discoideum mkpA,accession number AB018543,Smith-Waterman Score=95.
ttaggcctccggataactgtgggcaagcctgactgatgtcaggccctccacaagaggtggaggagcagagtcttctctaaactcccccagggaaaaggagactccctttcccggtctgctaagtagcgggtattgttccttgacactttttgataccgctagaccacggtccacctggcaacgggcgtcttcccagatgctggcatcaccgcagtcagcttcatcaaatcttgacactttaccacatttatttttgaaaaaggaattaaagcattgctgattcatatcctctgataaagcaatgctatgcttggaattatccatctttttagttgtaaccattctagggcatgtgtgtatcgtagtagtagttgtcattgtcgttgtagtgtcacacttggtgtttattttcatttcctgggtgagtaatgatgtttggatatcttttgagaaataccagtaccatcttttggccat

SEQ ID NO: 11903 - DNA, 654 bp, Homo sapiens
  SIMILAR (1)..(711): 871254mologous to Homo sapiens syntaxin 8,accession number AF036715,Smith-Waterman Score=1008.
atggtgccctgcatcccagccactccagctccagctgtggctaaaaggagccaagagacgagagagtgtagaaataaagacacaagacaaagagataaaagaaaagacagctgggcccggggaaccactaccaccaagtcacggagaccggtagtggccctgaatgtctggctgcactgttatttattggatacaaagcaaaaggggcagggtaaagagtgcgagtcatctccaatgatactggccgccgccgacagcggcatcagccctcgggccgtgtggcagttccgcaaaatgatcaagtgcgtgatcccggggagtgaccccttcttggaatacaacaactacggctgctactgtggcttggggggctcaggcacccccgtggatgaactggacaagtgctgccagacacatgacaactgctatgaccaggccaagaagctggacagctgtaaatttctgctggacaacccgtacacccacacctattcatactcgtgctctggctcggcaatcacctgtagcagcaaaaacaaagagtgtgaggccttcatttgcaactgcgaccgcaacgctgccatctgcttttcaaaagctccatataacaaggcacacaagaacctggacaccaagaagtattgtcagagttga

SEQ ID NO: 11904 - DNA, 952 bp, Homo sapiens
  SIMILAR (1)..(936): 1001254mologous to Homo sapiens hypothetical protein,accession number AL035309,Smith-Waterman Score=1662.
gctctgtcccaggatctccacagacctcggcctctccatgtgagggggacacagtggtgctctgctgagttgtgagggcccagatcacagatcccatgtgagaaagagagagtttcagcgtcatccttgaacgcaggatccgggaccttcagacccagggaaagggtgagggagactggggcctggtctgctttcccgggcctgaaagcttccccgaggtttgcagggtcagggaggaggaacggtgggggtgggcagtcactgcctgttccccactgcctgtgttcgcaggagccacgggacagaagacggtggcctctgctgccgggccacgttagtccgcagctcacccgaacagaggacaaccctgaggtttggccatatgggccacctggacactgggaattcgggggagcacgtcccaggcgtggtgcatcctgggccagaaacgccatgggctccctcccccgcttctccttggcttcctgccctgttggggtcctcattccctttctgttcccccagtgccccggggcggcattttactgcctcagaatttggagggagggagcagtaccttcccggagtcccacgcatgtgagttgggtcaagtgcattggacctagggaaagagaaagaaagaataaaagctggagagagagtgaagtgaatgcaagatacaaagtgggatggaagaattaaatccagagttccaggcaatcaaaatgagtgcaggttgaaagaaaacaggtgaattttagtggcatatggatgataaagctgtaaataaaattcttttgatgaaactctccggttacgagacaaagactgtaactgaacaggagctggtgtgactgttaccagacagaggcaactgatgaaaaagccctgtgaaagataggatgtgaggtgagcatgagcttgagctgagagacagacacaacagtatctg

SEQ ID NO: 11905 - DNA, 2134 bp, Homo sapiens
  SIMILAR (1)..(1023): 1001254mologous to Homo sapiens hypothetical protein,accession number AL035307,Smith-Waterman Score=1804.
ggcctggccactgagcctgagtctgtctttgctctggatgttctgcgacagcgactgcatgagaagatccaggaggcccggggccagggcagtgccaaggagctgtcccctgccgccttggagaaaaggcggcggagaaagcaggaacgggaccggaagaagaggaagcgaaaggagctgcgggcgaaagagaaggccaggaaggctgaggaggccacggaggcccaggaggtggtggaggcaaccccagagggggcctgcacggagccgcgggagccgcccgggctgatcttcaataaggtggaggtgagcgaagacgagccggccagcaaggcgcagcgcagaaaagagaagaggcagagggtgaaggggaacctcacgccgctgaccgggaggaactaccggcagctgctggagcgcctgcaggcacggcagagccggctggacgagctgcgcggccaggatgaggggaaggcgcaggagctggaggcgaagatgaagtggaccaacctcctctacaaggcggagggcgtgaagatccgtgacgacgaacgcctgctgcaggaggccctgaagcgcaaggagaagcgcagggcgcagcggcagcgccggtgggagaagcgcacggccggcgtggtggagaagatgcagcagcgccaggaccggcggcggcagaacctgcgcaggaagaaggcggcccgcgccgagcgccgcctgctcagagcccgcaagaagggccgcatcctgccgcaggacctggagcgcgcaggcctggagccacgggacagaagacggtggcctctgctgccgggccacgttagtccgcagctcacccgaacagaggacaaccctgaggtgtggcatatgggcacctggcactgggagtcgggggagcacgtccaggcgtggtgcatcctggggcagaacgccatggctcctccccgctctcttggcttctgcctgttggggtctcattcctttctgttccccagtgccccggggcggcattttactgctcagaatttggagggagggagcagtaccttcccggagtccacgcatggccaccagagggctccttggtctagcggtgacgccagcgtctgggaagacgcccgttgccaggtggaccatggtctagcagtagcaaaaagtatcaaggaacaacacccgctacttaagcagaccgggaaagggagtgtccctttcccctgggggagtttagagaagactctgctcttccacctcttgtggagggcctgacatccggcaggcctgcccgcagtaatctggaaggcctaaaccgtctccctgtgatgctgtgcttcagtggtcacgctcctagtccgccttcatgttccatcctgtacacctggctctgcccttcctagatagcagtagcaaaattagtgaaagtactaaaagtctctgatatgcagaaataatggcgtaagctgtctttctctctgtctcctctctctctctctctgcctcggctgccaggcagggaagggcaccctgtccagtggacacgtgatccacgtgaccttacctatcattggagatgactcacactctttaccctgccccttttgctttgtatccaataagtaacaatgcagccagacattcggggccactaccggtctccgagcattggtagtagtggtctcccgggcccagctgccttttcttttatctctttgtcttgtgtctttatttctacactctctcattgctgcacacagggagggagagacccatggaccctgtagggctggtccattgcgccactctggtcatgttgagaaattgctcaatttctgtgacgaaaaagggatctgcacgcttacagccagtctctatcccagaatatcttattacaaaattgtgactgtcaatctcctttccacattcactgtctaacagaatgccagaatttccaacaactgcacaggtcttaaacctgcgattcttcattggtgaaacttcaggtaggaggctatgtagatcatgagaaatgtttagtgtccggcgcctgtcaagcacatagtgtatgacatcaccaggcttaaaactgctcttgaccactgacacatctcgttctgcatctaagaaacgaagtatgttcttc

SEQ ID NO: 11906 - DNA, 1000 bp, Homo sapiens
  SIMILAR (668)..(991): 871254mologous to Homo sapiens unnamed protein product,accession number AK022978,Smith-Waterman Score=477.
atggagactgaaccaaaggcaagttacgggaagataagaatatctgaagagaattccattcaacttgatgattttacagaagcatatgaaagtggacaaaaccaagcatattctcttgaacattttagtcctgtttttcctaaaacagaaaatagccacattcacataaactctgacaaaggtcctgaagaaaatacaggatctcaagaacttttcagttctgaagatgaactgccaccaaatgagatacgtattgagttgtgtagctcaggaattactgtgttcccaactaaataccttccacaaaagtgctattagaagaagctggtcctctgaagataaagtgggccagtctgaagctctatctagagtccttcaagtagctaagaaaatgaagttgatttctaatggaggagattctgctgtagaaatggatcggagaaatgtgtctgaatttaaggatgttgttattcatgaggaccaatgggttggcgagacagtactacaatcaacatttagcagtcagttattaaatcttgggagttattcatctattcagcctgaagaatattccagtgtagttagtgatgttgtacttcaagacctactggcacaggtgtcctcaaaacattcctacctcagagatcttcctccgaggcagcctcagaggaaaatatactataggccagctttaatgactgtagttgatggaagacatgatgtttacatccgtgtagactcaaagctgatagagaagattcttctcaacatttttgcagactgcctcaacagagtgatagttacttcctcagagatcacctatgggatggtcatggcagacctgttacactccttgtcggcagtcagcgcagaaccttgtgtatcaaagattcagagcctttttgtgttagatgaaagcagctatccattacaacaagatttctccctcctggatttttatcctgacactgtaaagcatggagccgatgcccttttctga

SEQ ID NO: 11907 - DNA, 1493 bp, Homo sapiens
  SIMILAR (86)..(835): 881254mologous to Homo sapiens dJ486I3.4 (TSPY-like (testis specific protein, Y-linked like)),accession number AL050331,Smith- Waterman Score=1088.
cctcgtgccataaatcttgggagttattcatctattcagcctgaagaatattccagtgtagttagtgaagttgtacttcaagacttactggcatatgtgtcctcaaaacattcctacctcagagatcttcctccgaggcagcctcagagggtgaacagtatagactttgtagaattggagcaccttcaacctgatgtattagtccacgcagtactaagagttgttgatttcactatactgacagaggcagtatacagttatagaggacagaagcagaaaaaagttatgttaacagtggaacaggcccaagatcaacattatgcgcttgtattatggggtcctggagcagcctggtaccctcaacttcaaaggaaaaaaggttatatttgggaatttaaatatctttttgttcagtgcaattacacactagaaaacctagaattgcatacaacgccttggtcatcctgtgagtgcttgtttgatgatgatataagggcaattacatttaaagcaaaatttcaaaaaagtgcaccctcctttgtgaagatatcagacttagcaacccacctagaggataagtgttcaggagtggttctgattaaagcccagatttcagagctggcatttcctattacagcatctcagaagatagcgctaaatgctcacagttctctgaagagtattttttcttctcttcccaacatcgtatatactggctgtgcaaaatgtggattggaactagaaacagatgagaacaggatctacaaacaatgttttagctgcttgccatttactatgaagaaaatatattataggccagcgttaatgactgccattgatggaagacatgatgtttgtatccgtgtagaatcaaagctgatagagaagattcttctcaacatttctgcagactgcctcaacagagtgatagttccttcctcagagatcacctatgggatggtcgtggcagacctgttccactccttgttggcagtcagcgcagaaccttgtgtattaaagattcagagcctttttgtgttagatgaaaacagctatccattacaacaagatttctccctcctggatttttatcctgacattgtaaagcatggagccaatgcccgtctctgaggccagaggaagaaattgcaggcatttcaaggaagaagtactgaaatgatttgtcttttgaaataaatgaatgacagggcttttgctttggattttttatgaaatatattttacaaagagaattgcactagatatataaattaaaacttttttcctaagaaaatcctgtgaggtttaaaaagattgtttttgtcttttggtttcttcctttctcctggagaaatgatctaccagtcaaggcaatatgtagcacatccctgggaattaaaggtttgcccatttgttcactgtatttagtccctgctacattccaggcattgtactaagtatggggaaccacagagaagacattccctcagaaa

SEQ ID NO: 11908 - DNA, 372 bp, Homo sapiens
  SIMILAR (10)..(369): 671254mologous to Homo sapiens dJ1028D15.2 (similar to RPL27A (ribosomal protein L27a)),accession number AL121886,Smith-Waterman Score=341.
atgccatccagactgaggaagacccagaaacttcggggccatgtgagccatggccatggccgcataggcaagctccaaaagcaccccagaggccacagtaatgctggtggaatgcatcaccacaggatcaacttcaacaaatactacccaggttactttgggaaagttggtatgagtgagcagacacaggtgaatgctgctaaaaacaagcctggggctgctcccctcattgatgtggtgcaatcgggctactacaaagttctgggaaaggaaaagctcccaaagcagcctgtcattgtgaaggccaaattcttcagcagaagagctgagaagattaagggtgtcaaggggacctgtgtcctggtggcttga

SEQ ID NO: 11909 - DNA, 303 bp, Homo sapiens
  SIMILAR (5)..(145): 1001254mologous to Homo sapiens SEQ ID NO 437 from WO9922243,accession number Y19719,Smith-Waterman Score=276.
atgacgaacgtgtactccttggatgggattctggtgtttggtttgctctttgtttgcacctgtgcctacttcaagaaagtacctcgtctcaaaacctggctgctatcagagaagaagggtgtttggggtgtgttttacaaagccccgccgggccgacccgaaatgaaaagctctcctcctgcgaagccccctcggggcgctgtgcagcgaggccccttaggcggcggccacgctgtggtccccgaggtcccggagctggccctgcggggcccggcgctcagaagtgatgaattgatcagatag

SEQ ID NO: 11910 - DNA, 451 bp, Homo sapiens
  SIMILAR (196)..(1659): 971254mologous to Homo sapiens Bruton's tyrosine kinase- associated protein-135; BAP-135,accession number U77948,Smith- Waterman Score=2479.
gtggcatggcaagacttctgtcagaagttggcagcaggctctcacttgattaagaaggcaccaagaagaagaacagaaaaagatgacttactattcttgaccgtgcagtttagcccatggggctgtcactgactttacatgctgctgcagctccttagtcagctggtccttgtcatgggacagaaactgtggggtcaggacaatcaatgccttcaccacccagaggcattgatagtgtcatgactcctccccaggaaccagatgtagccctcttcatccacagttgctctgtccccggtgtcgcagacgtccccacattccacttcggctgtgttctctgggttacccgccgaggcctgccacctcctccaccaacaaacggaagccaccacatcttctccgagactcgctctgaccacgccgccgatgctgcccgggcctcgcaacgaaa

SEQ ID NO: 11911 - DNA, 351 bp, Homo sapiens
  SIMILAR (154)..(345): 701254mologous to Homo sapiens Gene with similarity to rat kidney-specific (KS) gene,accession number AC003034,Smith-Waterman Score=221.
atgagcttcctgagtctccaccagaagcagatgctggccctatgcttcacgtacagcctgcagaactcccccagacttgctgttgctgccaccactagcactgacgccaatacaaccactgctgctgttaccctcaatgcaccagcccaccctgtcgtgaaggtgtttattgtcctgaccccacagtttctgtcccgtgacaaggaccagctgaccaaggagctgcagaagcatgtaaagtcagtgacagtctcatgcaagtccccaaggaagatggagtttgtcccggagctgcggaaaactgtcactggaaagattaaacaagccaggattgaccatgaggaaccctga

SEQ ID NO: 11912 - DNA, 469 bp, Homo sapiens
  SIMILAR (363)..(467): 941254mologous to Homo sapiens Human secreted protein fragment encoded from gene 33,accession number Y07776,Smith- Waterman Score=168.
gcggggaattcgggaaggtgaggagtttgatgtggacctggctgggatggaagtggctgtgggaggatggggcagaggcctctggttgcacaggcaccaggctggcattcgaggccagagcctgggatggaggtgtagaccatgggtgggggcagggggagtccaggcagcttctgagaggccagaccttgcagggtcaattatgggccctgaggtgggggccctgaggagggcctctccagtgattgtgatccagagccaggcaggggcgtttctgtcttccaacaccacctgccagcagttcagggatcctgggtttagggggaggtacccagcatcgcctcacaccctgtctctccccccagagactgctcatctatgattacttctatgccttcctgcggcgggagtactacctcacacatggcctctacttgaccgccaaggatggcacagaggccatgctcgt

SEQ ID NO: 11913 - DNA, 937 bp, Homo sapiens
  SIMILAR (471)..(148): 881254mologous to Escherichia coli dfp (CG Site No. 18430),accession number L10328,Smith-Waterman Score=468.
atggcggctcccttggtcctggtgctggtggtggctgtgacagtgcgggcggccttgttccgctccagtctggccgagttcatttccgagcgggtggaggtggtgtccccactgagctcttggaagagagtggttgaaggcctttcactgttggacttgggagtatctccgtattctggagcagtatttcatgaacggcagtacatacctgtgaaaatgaagagcaaagccttctggatcttttcttgggagtatgccatgatgtatgtgggaagcctagtggtaatcatttgcctctccttcttccttctcagctcttgggatttcatccccgcagtctatggctttatactttctgttccagatctcactccaaacattggtcattttctggtacttctttgcagagatgtttgagcacttcagcctcttctttgtatgtgtgtttcagatcaacgtcttcttctacaccatccccttagccataaagctaaaggagcaccccatcttcttcatgtttatccagatcgctgtcatcgccatctttaagtcctacccgacagtgggggacgtggcgctctacatggccttcttccccgtgtggaaccatctctacagattcctgagaaacatctttgtcctcacctgcatcatcatcgtctgttccctgctcttccctgtcctgtggcacctctggatttatgcaggaagtgccaactctaatttcttttaaggcatcacactgaccttcaacgttgggcagcggccgcacagactcaaagccccgcgggcgagctcagcagcccggagcgaccgcggccccgccgcctcccccgcgagtcccggcgatgcggcccggcctgtgagcggccggcgaccctgggacgccccgccgcacaactacctcaacgccgtgccgcccccctcccgcccccag

SEQ ID NO: 11914 - DNA, 701 bp, Homo sapiens
  SIMILAR (573)..(226): 911254mologous to Escherichia coli f445,accession number L10328,Smith-Waterman Score=542.
gtcatcgccatctttaagtcctacccgacagtggggcacgtggcgctctacatggctttcttccccgtgtggaaccatctctacagattcctgagaaacatctttgtcctcacctgcatcatcatcgtctgttccctgctcttccctgtcctgtggcacctctggatttatgcaggaagtgccaactctaatttcttttatgccatcacactgaccttcaacgttgggcagatcctgctcatctctgattacttctatgccttcctgcggcgggagtactacctcacacatggcctctacttgaccccccaagggattgcaccagaggccatgctcgtgcttcaaagtaggcctggctggcacagggctgcatggaccctcagggggcttgtggggccagaagctggggccaaagcctccaagcccagaagtttgccaagcaagcgagtgcttgggcagaagaggttcgagtccaagggtcacaagttctctggtaccaaaaagggacccatggctgactgacagcaaggcctatggggaagaactgggagctccccaacttggacccccaccttgtggctctgcacaccaaggagccccctcccagacaggaaggagaagaggcaggtgagcagggcttgttagattgtggctacttaataaatgttttttgttatgaagtctaaaaaaaaaaaaaaaaa

SEQ ID NO: 11915 - DNA, 210 bp, Homo sapiens
  SIMILAR (52)..(198): 401254mologous to Caenorhabditis elegans putative,accession number L12018,Smith-Waterman Score=87.
atgggaacactcactggcaaaacatttctaggggatagtttgatgaagggaaggcctggttgcagtatgcctgaaatttgggatgtagaagatcctgccaatgctgggaaaactcccttatgtaacctcttggtgaaggattccaaacctcacttcaccactgtattccagaacagtgtttacaaagtcctagaagttgtaaaagaatga

SEQ ID NO: 11916 - DNA, 870 bp, Homo sapiens
  SIMILAR (609)..(665): 571254mologous to Homo sapiens COL1A1 and PDGFB fusion transcript,accession number Y16346,Smith-Waterman Score=60.
atgggaggaggtgggagcagcgggaccttccgagtaaggcatcccggcaggaacgtcagtgccttctggacacctccagaagcagaagcacacagccccacagaaaaatcctgcaggctcaggacccgaggcatgacacgatccaaactcactgcttcatcagacaccagtgagtccctcgacgcttaccaaggccccctgccttacacctgggagccctgtgctttgattaaccctatactcaacgctgtactggcagccctgctgtctgtgctgagattcctccctgttctgcccctggaacacacggcccgtgagcatcccaagaaggcagagaaccagacccatgaacgagcgctgagcacccgccttataaggcagctctggagaaacttggctggtgtggctgaggagccggagggggagaaggaaaggccccagcaaacagtggtcatgtgggcctcctgcatgccactggtagccccccagctaggaccacctctcctttatccctggaagcacaagaacagagagaagggggcctcagctcagaccagaagcaccccatgcaccgggtctcggtccagcctggaagcacggcccacagacctacatgactacctgggcagtgatccccaaaaggtcccccgtcaccagctggggagctcccgaggggagggtggctttgcagagcatctggagacatcaatgggccatgccattaagaacacttgtgattcacaagaagaggttgaaatatcaacattaacaggagtttggaagaagttgattccaaccctcatggatgagcggtttaagacttcagcagaggaagtcactgcagatgtggtggaaatagcagagaactag

SEQ ID NO: 11917 - DNA, 225 bp, Homo sapiens
  SIMILAR (130)..(222): 731254mologous to Homo sapiens Neuron-associated protein,accession number B01398,Smith-Waterman Score=118.
atgggccaactgtatgaggtaatggttctggttgcacaatactggatgccgtccagtgcagtctggcatcctctagcccttgttctagatgcgttgataacacatctgagaagtggggcagaaggtgttatttatccggatcctcttacatatggcagtgacaatcatgaggaagactattttctgtatgtggcctacagtgatgagagtgtctatgggaaatga

SEQ ID NO: 11918 - DNA, 10386 bp, Homo sapiens
  SIMILAR (191)..(1084): 951254mologous to Escherichia coli glucose-specific enzyme II of phosphotransferase system,accession number J02618,Smith- Waterman Score=1447.
tcaagctgaaccatcgtaggaagttgaaagccttagaaagaggacttggtaaagtttttggattatcttgaaactctggcaagatggccaagtatggagaacatgaagccagtcctgacaatgggcagaacgaattcagtgatatcattaagtccagatctgatgaacacaatgacgtacagaagaaaacctttaccaaatggataaatgctcgattttcaaagagtgggaaaccacccatcaatgatatgttcacagacctcaaagatggaaggaagctattggatcttctagaaggcctcacaggaacatcactgccaaaggaacagtggttccacaccggtacatgccttatagaacggagacagagtgctgcaggttttacatcacaacaatgtggaattagtgaatatagggggaactgacattgtggatggaaatcacaaactgactttggggttactttggagcatcattttgcactggcaggtgaaagatgtcatgaaggatgtcatgtcggacctgcagcagacgaacagtgagaagatcctgctcagctgggtgcgtcagaccaccaggccctacagccaagtcaacgtcctcaacttcaccaccagctggacagatggactcgcctttaatgctgtcctccaccgacataaacctgatctcttcagctgggataaagttgtcaaaatgtcaccaattgagagacttgaacatgccttcagcaaggctcaaacttatttgggaattgaaaagctgttagatcctgaagatgttgccgttcggcttcctgacaagaaatccataattatgtatttaacatctttgtttgaggtgctacctcagcaagtcaccatagacgccatccgtgaggtagagacactcccaaggaaatataaaaaagaatgtgaagaagaggcaattaatatacagagtacagcgcctgaggaggagcatgagagtccccgagctgaaactcccagcactgtcactgaggtcgacatggatctggacagctatcagattgcgttggaggaagtgctgacctggttgctttctgctgaggacactttccaggagcaggatgatatttctgatgatgttgaagaagtcaaagaccagtttgcaacccatgaagcttttatgatggaactgactgcacaccagagcagtgtgggcagcgtcctgcaggcaggcaaccaactgataacacaaggaactctgtcagacgaagaagaatttgagattcaggaacagatgaccctgctgaatgctagatgggaggctcttagggtggagagtatggacagacagtcccggctgcacgatgtgctgatggaactgcagaagaagcaactgcagcagctctccgcctggttaacactcacagaggagcgcattcagaagatggaaacttgccccctggatgatgatgtaaaatctctacaaaagctgctagaagaacataaaagtttgcaaagtgatcttgaggctgaacaggtgaaagtaaattcactaactcacatggtggtcattgttgatgaaaacagtggtgagagcgctacagctatcctagaagaccagttacagaaacttggtgagcgctggacagcagtatgccgttggactgaagaacgctggaataggttacaagaaatcaatatattgtggcaggaattattggaagaacagtgcttgttgaaagcttggttaaccgaaaaagaagaggctttaaataaagtccagacaagcaacttcaaagaccaaaaggaactaagtgtcagtgttcgacgtctggctattttgaaggaagacatggaaatgaagcgtcaaacattggatcagctgagtgagattggccaggatgtgggacaattacttgataattccaaggcatctaagaagatcaacagtgactcagaggaactgactcaaagatgggattctttggttcagagactagaagattcctccaaccaggtgactcaggctgtagcaaagctggggatgtctcagattcctcagaaggaccttttggagactgttcgtgtaagagaacaagcaattacaaaaaaatctaagcaggaactgcctcctcctcctcccccaaagaagagacagatccatgtggatattgaagctaagaaaaagtttgatgctataagtgcagagctgttgaactggattttgaaatggaaaactgccattcagaccacagagataaaagagtatatgaagatgcaagacacttccgaaatgaaaaagaagttgaaggcattagaaaaagaacagagagaaagaatccccagagcagatgaattaaaccaaactggacaaatccttgtggagcaaatgggaaaagaaggccttcctactgaagaaataaaaaatgttctggagaaggtttcatcagaatggaagaatgtatctcaacatttggaagatctagaaagaaagattcagctacaggaagatataaatgcttatttcaagcagcttgatgagcttgaaaaggtcatcaagacaaaggaggagtgggtaaaacacacttccatttctgaatcttcccggcagtccttgccaagcttgaaggattcctgtcagcgggaattgacaaatcttcttggccttcaccccaaaattgaaatggctcgtgcaagctgctcggccctgatgtctcagccttctgccccagattttgtccagcggggcttcgatagctttctgggccgctaccaagctgtacaagaggctgtagaggatcgtcaacaacatctagagaatgaactgaagggccaacctggacatgcatatctggaaacattgaaaacactgaaagatgtgctaaatgattcagaaaataaggcccaggtgtctctgaatgtccttaatgatcttgccaaggtggagaaggccctgcaagaaaaaaagacccttgatgaaatccttgagaatcagaaacctgcattacataaacttgcagaagaaacaaaggctctggagaaaaatgttcatcctgatgtagaaaaattatataagcaagaatttgatgatgtgcaaggaaagtggaacaagctaaaggtcttggtttccaaagatctacatttgcttgaggaaattgctctcacactcagagcttttgaggccgattcaacagtcattgagaagtggatggatggcgtgaaagacttcttaatgaaacagcaggctgcccaaggagacgacgcaggtctacagaggcagttagaccagtgctctgcatttgttaatgaaatagaaacaattgaatcatctctgaaaaacatgaaggaaatagagactaatcttcgaagtggtccagttgctggaataaaaacttgggtgcagacaagactaggtgactaccaaactcaactggagaaacttagcaaggagatcgctactcaaaaaagtaggttgtctgaaagtcaagaaaaagctgcgaacctgaagaaagacttggcagagatgcaggaatggatgacccaggccgaggaagaatatttggagcgggattttgagtacaagtcaccagaagagcttgagagtgctgtggaagagatgaagagggcaaaagaggatgtgttgcagaaggaggtgagagtgaagattctcaaggacaacatcaagttattagctgccaaggtgccctctggtggccaggagttgacgtctgagctgaatgttgtgctggagaattaccaacttctttgtaatagaattcgaggaaagtgccacacgctagaggaggtctggtcttgttggattgaactgcttcactatttggatcttgaaactacctggttaaacactttggaagagcggatgaagagcacagaggtcctgcctgagaagacggatgctgtcaacgaagccctggagtctctggaatctgttctgcgccacccggcagataatcgcacccagattcgagagcttggccagactctgattgatggggggatcctggatgatataatcagtgagaaactggaggctttcaacagccgatatgaagatctaagtcacctggcagagagcaagcagatttctttggaaaagcaactccaggtgctgcgggaaactgaccagatgcttcaagtcttgcaagagagcttgggggagctggacaaacagctcaccacatacctgactgacaggatagatgctttccaagttccacaggaagctcagaaaatccaagcagagatctcagcccatgagctaaccctagaggagttgagaagaaatatgcgttctcagcccctgacctccccagagagtaggactgccagaggaggaagtcagatggatgtgctacagaggaaactccgagaggtgtccacaaagttccagcttttccagaagccagctaacttcgagcagcgcatgctggactgcaagcgtgtgctggatggcgtgaaagcagaacttcacgttctggatgtgaaggacgtagaccctgacgtcatacagacgcacctggacaagtgtatgaaactgtataaaactttgagtgaagtcaaacttgaagtggaaactgtgattaaaacaggaagacatattgtccagaaacagcaaacggacaacccaaaagggatggatgagcagctgacttccctgaaggttctttacaatgacctgggcgcacaggtgacagaaggaaaacaggatctggaaagagcatcacagttggcccggaaaatgaagaaagaggctgcttctctctctgaatggctttctgctactgaaactgaattggtacagaagtccacttcagaaggtctgcttggtgacttggatacagaaatttcctgggctaaaaatgttctgaaggatctggaaaagagaaaagctgatttaaataccatcacagagagtagtgctgccctgcaaaacttgattgagggcagtgagcctattttagaagagaggctctgcgtccttaacgctgggtggagccgagttcgtacctggactgaagattggtgcaataccttgatgaaccatcagaaccagctagaaatatttgatgggaacgtggctcacataagtacctggctttatcaagctgaagctctattggatgaaattgaaaagaaaccaacaagtaaacaggaagaaattgtgaagcgtttagtatctgagctggatgatgccaacctccaggttgaaaatgtccgcgatcaagcccttattttgatgaatgcccgtggaagctcaagcagggagcttgtagaaccaaagttagctgagctgaataggaactttgaaaaggtgtctcaacatatcaaaagtgccaaattgctaattgctcaggaaccattataccaatgtttggtcaccactgaaacatttgaaactggtgtgcctttctctgacttggaaaaattagaaaatgacatagaaaatatgttaaaatttgtggaaaaacacttggaatccagtgatgaagatgaaaagatggatgaggagagtgcccagattgaggaagttctacaaagaggagaagaaatgttacatcaacctatggaagataataaaaaagaaaagatccgtttgcaattattacttttgcatactagatacaacaaaattaaggcaatccctattcaacagaggaaaatgggtcaacttgcttctggaattagatcatcacttcttcctacagattatctggttgaaattaacaaaattttactttgcatggatgatgttgaattatcgcttaatgttccagagctcaacactgctatttacgaagacttctcttttcaggaagactctctgaagaatatcaaagaccaactggacaaacttggagagcagattgcagtcattcatgaaaaacagccagatgtcatccttgaagcctctggacctgaagccattcagatcagagatacacttactcagctgaatgcaaaatgggacagaattaatagaatgtacagtgatcggaaaggttgttttgacagggcaatggaagaatggagacagttccattgtgaccttaatgacctcacacagtggataacagaggctgaagaattactggttgatacctgtgctccaggtggcagcctggacttagagaaagccaggatacatcagcaggaacttgaggtgggcatcagcagccaccagcccagttttgcagcactaaaccgaactggggatgggattgtgcagaaactctcccaggcagatggaagcttcttgaaagaaaaactggcaggtttaaaccaacgctgggatgcaattgttgcagaagtgaaggataggcagccaaggctaaaaggagaaagtaagcaggtgatgaagtacaggcatcagctagatgagattatctgttggttaacaaaggctgagcatgctatgcaaaagagatcaaccaccgaattgggagaaaacctgcaagaattaagagacttaactcaagaaatggaagtacatgctgaaaaactcaaatggctgaatagaactgaattggagatgctttcagataaaagtctgagtttacctgaaagggataaaatttcagaaagcttaaggactgtaaatatgacatggaataagatttgcagagaggtgcctaccaccctgaaggaatgcatccaggagcccagttctgtttcacagacaaggattgctgctcatcctaatgtccaaaaggtggtgctagtatcatctgcgtcagatattcctgttcagtctcatcgtacttcggaaatttcaattcctgctgatcttgataaaactataacagaactagccgactggctggtattaatcgaccagatgctgaagtccaacattgtcactgttggggatgtagaagagatcaataagaccgtttcccgaatgaaaattacaaaggctgacttagaacagcgccatcctcagctggattatgtttttacattggcacagaatttgaaaaataaagcttccagttcagatatgagaacagcaattacagaaaaattggaaagggtcaagaaccagtgggatggcacccagcatggcgttgagctaagacagcagcagcttgaggacatgattattgacagtcttcagtgggatgaccatagggaggagactgaagaactgatgagaaaatatgaggctcgactctatattcttcagcaagcccgacgggatccactcaccaaacaaatttctgataaccaaatactgcttcaagaactgggtcctggagatggtatcgtcatggcgttcgataacgtcctgcagaaactcctggaggaatatgggagtgatgacacaaggaatgtgaaagaaaccacagagtacttaaaaacatcatggatcaatctcaaacaaagtattgctgacagacagaacgccttggaggctgagtggaggacggtgcaggcctctcgcagagatctggaaaacttcctgaagtggatccaagaagcagagaccacagtgaatgtgcttgtggatgcctctcatcgggagaatgctcttcaggatagtatcttggccagggaactcaaacagcagatgcaggacatccaggcagaaattgatgcccacaatgacatatttaaaagcattgacggaaacaggcagaagatggtaaaagctttgggaaattctgaagaggctactatgcttcaacatcgactggatgatatgaaccaaagatggaatgacttaaaagcaaaatctgctagcatcagggcccatttggaggccagcgctgagaagtggaacaggttgctgatgtccttagaagaactgatcaaatggctgaatatgaaagatgaagagcttaagaaacaaatgcctattggaggagatgttccagccttacagctccagtatgaccattgtaaggccctgagacgggagttaaaggagaaagaatattctgtcctgaatgctgtcgaccaggcccgagttttcttggctgatcagccaattgaggcccctgaagagccaagaagaaacctacaatcaaaaacagaattaactcctgaggagagagcccaaaagattgccaaagccatgcgcaaacagtcttctgaagtcaaagaaaaatgggaaagtctaaatgctgtaactagcaattggcaaaagcaagtggacaaggcattggagaaactcagagacctgcagggagctatggatgacctggacgctgacatgaaggaggcagagtccgtgcggaatggctggaagcccgtgggagacttactcattgactcgctgcaggatcacattgaaaaaatcatggcatttagagaagaaattgcaccaatcaactttaaagttaaaacggtgaatgatttatccagtcagctgtctccacttgacctgcatccctctctaaagatgtctcgccagctagatgaccttaatatgcgatggaaacttttacaggtttctgtggatgatcgccttaaacagcttcaggaagcccacagagattttggaccatcctctcagcattttctctctacgtcagtccagctgccgtggcaaagatccatttcacataataaagtgccctattacatcaaccatcaaacacagaccacctgttgggaccatcctaaaatgaccgaactctttcaatcccttgctgacctgaataatgtacgtttttctgcctaccgtacagcaatcaaaatccgaagactacaaaaagcactatgtttggatctcttagagttgagtacaacaaatgaaattttcaaacagcacaagttgaaccaaaatgaccagctcctcagtgttccagatgtcatcaactgtctgacaacaacttatgatggacttgagcaaatgcataaggacctggtcaacgttccactctgtgttgatatgtgtctcaattggttgctcaatgtctatgacacgggtcgaactggaaaaattagagtgcagagtctgaagattggattaatgtctctctccaaaggtctcttggaagaaaaatacagatatctctttaaggaagttgcggggccgacagaaatgtgtgaccagaggcagctgggcctgttacttcatgatgccatccagatcccccggcagctaggtgaagtagcagcttttggaggcagtaatattgagcctagtgttcgcagctgcttccaacagaataacaataaaccagaaataagtgtgaaagagtttatagattggatgcatttggaaccacagtccatggtttggctcccagttttacatcgagtggcagcagcggagactgcaaaacatcaggccaaatgcaacatctgtaaagaatgtccaattgtcgggttcaggtatagaagccttaagcattttaactatgatgtctgccagagttgtttcttttcgggtcgaacagcaaaaggtcacaaattacattacccaatggtggaatattgtatacctacaacatctggggaagatgtacgagacttcacaaaggtacttaagaacaagttcaggtcgaagaagtactttgccaaacaccctcgacttggttacctgcctgtccagacagttcttgaaggtgacaacttagagactcctatcacactcatcagtatgtggccagagcactatgacccctcacaatctcctcaactgtttcatgatgacacccattcaagaatagaacaatatgccacacgactggcccagatggaaaggactaatgggtcttttctcactgatagcagctccaccacaggaagtgtggaagacgagcacgccctcatccagcagtattgccaaacactcggaggagagtccccagtgagccagccgcagagcccagctcagatcctgaagtcagtagagagggaagaacgtggagaactggagaggatcattgctgacctggaggaagaacaaagaaatctacaggtggagtatgagcagctgaaggaccagcacctccgaagggggctccctgtcggttcaccgccagagtcgattatatctccccatcacacgtctgaggattcagaacttatagcagaagcaaaactcctcaggcagcacaaaggtcggctggaggctaggatgcagattttagaagatcacaataaacagctggagtctcagctccaccgcctccgacagctgctggagcagcctgaatctgattcccgaatcaatggtgtttccccatgggcttctcctcagcattctgcactgagctactcgcttgatccagatgcctccggcccacagttccaccaggcagcgggagaggacctgctggccccaccgcacgacaccagcacggatctcacggaggtcatggagcagattcacagcacgtttccatcttgctgcccaaatgttcccagcaggccacaggcaatgtga

SEQ ID NO: 11919 - DNA, 414 bp, Homo sapiens
  SIMILAR (1)..(78): 1001254mologous to Homo sapiens dJ91J24.2 (utrophin (dystrophin-related protein)),accession number AL024474,Smith- Waterman Score=136.
atggccaagtatggagaacatgaagccagtcctgacaatgggcagaacgaattcagtgatatcattaagtccagatctgcactctctggtaccttttctggtactgtgtgttcattaatagccttcccactagaacagggctccccaactcccagggcctggactggtaccagtccgttgcctgttagggaccaggtggcacagcaggaggtctctcctactacaggagagagagataatggccctttgctcctcattccgcattcagaccagattccccagctggcaatctcctgccatcggattgcatcaccaactcaacctaattggtcacctggacctgaaggacagttctgactttccttcaaatctcatgccgttgttgatgctcgtctggtggatttgtacctgaga

SEQ ID NO: 11920 - DNA, 938 bp, Homo sapiens
  SIMILAR (245)..(640): 881254mologous to Cloning vector pSacBII SacB,accession number U09128,Smith-Waterman Score=628.
ctaaacaaagagtcctctttccagccatctaatcgggtaatttattttttcaaccatcacataaatcgaaacacagctgtaaccaatgacttgcagatccagttcccagccagctggaatcagttctgctgaaacagcaagatttttacattgttcacttctgtacatctgccaaacacatccttgttcttcctgcacgagactggactcacctctgctactactaggtaaaaggtgctcagaggcaggtggaataatgattaatcgtaataaataatatacatgaagttctggagagatatccacagatattatgggtgaaacacagctagaccactggacactcagttcctgttcttgggaagttgtctctccagcgaaatgacgccaggtaaacagcccacagcattcgatgtgctgattatattgtgacaaaggctgacaaagtacagactctaaggggcgcactggaccatccttcccacagacaccgggagtctgaaatggttttctcctatgatcactttcttcacttttcatatccattttaagtttttcccaaccgactaccacttcttcaagcatcttgacaactttttgcagggaaaacgcttccacaaccagcaggatgcagaaagtgctttccaaaagttcctcgaatctcaaagcacggatttttatgctacaggagtaaacaaacttatttcttgttggcaaaattgtgttgattgtaatggttcttactttgattaatacagatgtgtttgagcctagttttaatgattcaaaattcatggtccaaaatggcaagcacttttgcaccaacctagtacacagtgacctggtgaggtatattctagggatgcaaagccagtttaatattcaaatatcaatcagtacaattcaccacatcaacaggctaaaaaagaaacatcaca

SEQ ID NO: 11921 - DNA, 475 bp, Homo sapiens
  SIMILAR (92)..(376): 561254mologous to Homo sapiens Neural thread protein,accession number R95913,Smith-Waterman Score=232.
  misc_feature (1)...(475): n = a,t,c or g
gatgggtcccgatcgagaccctagttagagagcggtaattccaagntgaaaatccttctatttatatatattataaggtctcaaactcttgacctcaaaaaaaatatatacatatatttttagacagtcttgctctgttgcccaggctggagtgcagtggtgcaatctcggctcactgcaagctccacctcctggtttcaagtgattctcctgcctcagcctcccaagtagctgggattacaggtgcacgccaccatgcctggctaatttttgtatttttagtagagatggggtttcaccatgtggccaggctggtctcgaactcctgacttcaggtgatccgcctgccttggcctcccaaagagctggggtttctatatttatttatttatttattttttgagatggagtctcgctctgtcgcccaggctggagtgcagtggtgggatcttggctcactgcaagctccgcctcn

SEQ ID NO: 11922 - DNA, 315 bp, Homo sapiens
  SIMILAR (556)..(1290): 931254mologous to unidentified cloning vector 29kD protein essential for the replication of mini F plasmid,accession number AB015619,Smith-Waterman Score=1206.
tttttttttttttttgagactgagtctgactctgtcgctcaggctggagtgcagtggctcgcggcaacaaggcctgggttcaagggattgtcacgcctcagcctcccgtgtagctgggattacaggcacaagccaccaaacccggctaatttttgtatttttagtagcgacggggtttcgctatgttggccagggtggtctcaaactcctgacctcaagtgatctgcccgcctcggcctcccaaaatgctgggagtacaggcgtgacaccacgcgcggaccagttactttttaaagtggctctaggtccctttag

SEQ ID NO: 11923 - DNA, 3869 bp, Homo sapiens
  SIMILAR (163)..(1932): 951254mologous to Homo sapiens putative p150,accession number U93563,Smith-Waterman Score=2945.
tttttttttttattaggaaattgtagataattttaatgaagtcaacgtcaagaatataatctggttgtaataccaatacaatgtgttctaaaataatttttctattgagttaaatattcatctgtagatcctataacagcatgttcatattcacaaaatctgaatgaaaagtaaacacaacttggcatttctgacgcagggtaacacaaagttcacttcggaggggactgagatttttgtttaattttgcttttgaaaccaagcacagttatagtcaaaatgagggacattattcagaatgaggttatgtatttatttaacaaaatactgcttctctgaagtacatttcattagggagagtgacagtaatgctaaaaaaaagaacatgaaaatgcacacagcatttctgaaaggttataataatttatttaatttttttttgagacagagtctcactctgtcacccaggctggagtgcagtggctcctgtgatcttggctcactgcaacctccacctcctgggttcaagcaattctcgtgcctcagcctctcaagtagctgggattccaggcatgcaccccaaacctggctattttgttttgtatttaaattagtttaatttttttttgaggcagagtcttgctctgttgcccaggctggagtgcagtggcatgatctcagctcactgcaacctccatctcccaggctcaagcaattctcctgccttggcccccagagtagctgggattataagcacctgccaccatgcccaggtaatttttgcatgtttagtagagatggggtttcaccatgttggccaggctggtctcaaactcttgacctcaggtgatttgcccgccttggcctctgaaaagtgctgggattacaggcgtgagcaaccgcgcccagccctatttttttggtattttagtagggaccagcgtttcaccacgttgggccaggctggtctcgaactcctggcctcaagcaatccacccgcctcagcctccaaaagtgctgggattacagatgtgagccatggcacccatgccaaaaggctatattcctggctctgtgtttccgagactgcttttaatcccaacttctctacatttagattaaaaaatattttattcatggtcaatctggaacataattactgcatcttaagtttccactgatgtatatagaaggctaaaggcacaatttttatcaaatctagtagagtaaccaaacataaaatcattaattactttcaacttaataactaattgacattcctcaaaagagctgttttcaatcctgatagttctttattttttcaaaatatatttgccatgggatgctaatttgcaataggtgtcataatgagaataacccaaactggataaatgtgacaaatgattgacaaagcatttcacacccttcaattacaccacatcaagaatgaggggaaagcgttgtaaaagtagactactgcaatgctacttgtattcttgcaataaaaccagcaagcatccatatcaagagagttatcatctcacttccaactttttcccctcaagaacaatttgaatctctttggcatccaaagtctcataggtcaataaagcttctgcgagattcttatgctcctttgcatgagttttcaagatatgttttgctcgttcatatgagtcccttagaaggattcttatttcttgttcgatggcagattgggtttctggacttagtttccctgtatcactgtaggtcataactccaagcttttcactcattccaaatttggtaaccatccgctttgctattttagtggcattatcaaaatcactggaagcacctgttgtaatatggtcggttccaaatataagctcctctgccactcttcctcccatactaacatccatttgtgcaagcagctgggctctagtttcattccatctgtcattctcaggtaacagggacacatgtccaagtgttggcccccgtggcatgattgtagctttgttgataggcattgcatcttttgtgtaatatgcaataatggcatgaccagattcatgatatgctgtgatggttttgtttttgttatcaatttccacacttcttctttcaggccccattagaattttgtctttggaaaactccagctccttcatggtaaccatttcttttccatcaacagctgcttttaatgcagcctggttcacaagattctccaactctgctccggaaaagccaacagtacctcgagctataatttctggatcaacggattgatcaaactttattttattgagataccatttcaaaatttctgttcgaccttttacatctggccttggaactgtaacttgcatgtcaaaacgaccaggacgtattaaggcattatctaatgcctctgggaagtttgtggctcctattatgataactccttcattgggtttaaaaccatccatttcagcaagaagttgatttatggtctgccttgaatatggatgcattggagattcaattctcttcccaccaacagaatctaattcatcaataaatataacacaaggagcattcgcctttgcttccctaaaaagatttctgatacggctggctcccacacccacaaacatctcatcaaattcggatccagaagcataataaaaaggaacatcagcttctcccgccacagctcgggcaagaagtgtctttccagtccctgggggtccaactaaaagaattccttttggaagtttacctccaagaatagtaaatttttgtggatttttcaagaattcaacaacttcctgtaattcttgtttagcttcctccacccctttaacatgttcaaaggtgacatttttcatctggacaggatctactgcagaatcaagccctgttgttgtccggaagcggacagataaaaatgggttttttagaagtccataaatgccgaatagcagcagaacgaagagaatcagacgggttcgccttagggaatcattggttttttgtgtgagtgcttgagctttcagaaaaccttccgcaaaaccagttttaaatgcatcttggtgagcttcaggtatatttttggttttcatgagtttgtccaaactctcaacatctgatcctctgtcccgcaaaagaaaccccttcacgaatgatggcgctatattctgtgtttcagctaatctctcggaggtagactggagacgtcgtgtccttgatttcaaagttttaaaaccccgagactgtatgaaaactggccagtactgaagatctgaacaaatgctttgaagagctcttgaatgatgtcgatacaagcaagaggaacgtaatgtactaaatatatctaagttaccatatttattttcaaagaaggattgtgcagagacatgggatgtatgccaatgggaagaaatgtttttgcctttacaaaatccaggaagtagattttctaccagctgatcaatctgtccaatttttagttcagataatccaaggtcccttaagttaagtgaaggctcactgctgggagcctcatgctcaggaactacatctcgatgctggttttgagaaactgacactccactgagagaaacagaagtgttttttggtgtatggaaggcattgatgagatgactcagaggaactgtaacctggggttgcaccgtgctcgacaaggaaaacatctccggcgggccctcagcgacctcacccgcctgccgaaactgtgcccctctgtccacggcccggcggggaggcgctgagcccttcttttttcctttttctccgacccgttgcccctcactcctcccagaaacggaaaatggcctccccttcctacagctactgcaacgacagacaatccgcct

SEQ ID NO: 11924 - DNA, 437 bp, Homo sapiens
  SIMILAR (3)..(182): 701254mologous to Homo sapiens PRO2550,accession number AF130089,Smith-Waterman Score=200.
caccacacccggctaattttgtatttttagtagagatggggttttgccatgttggccaggctggtctcgaactcctgacctcaagtgatctgcctgccttggcctcccaaagtgctgggattccaggtgtaagccaccgtgcccagccctaaaacgtatttaaaatgttattttgttcccttaaaaatacttattatttttgcttagtgcaaagataatgtgtgtttatgatgaaaaccctgaaaatgtagacaggtataagaaatagtccattaactaatcacccagaaataaccattgctatgcattttcttttggccttttttctaagtacatatatttaaaaaataaaattagaatgctattgtattttttaacttcatgttttgtatcatgagcaaattccctcctaataaaagttatacatattttaacat

SEQ ID NO: 11925 - DNA, 7268 bp, Homo sapiens
  SIMILAR (4717)..(1967): 991254mologous to Homo sapiens Human ZGGBP1 protein,accession number W93167,Smith-Waterman Score=4925.
tgcagcctgagttgcacctggctacagagtggagccttgcttctgaaaagatataaagtttattgggcaaacctagaatcatcagtattattacataaattagacagcggtaaaattttcctagggcatatgtacaaatcacagtgatttccattgcgcaacaaacaagattaaaaataggcactcccctccctgaccccccatgagaaggtggggtcactccgcggggttcccagttctggctcgccaaggggtgcacaaacctgccaaggcactctgcctgtgtgcacagcatccggcagcagtcacaggggccccagaagcacgttggcaacaaggcgaggctgcccagtgttcagcacaaaaaaagaattcagctgtgacagctgagcagagctcaacagccatctcagagcacaaggactgtggaaaagcttcaaatcccacctgctaaaacacagatgtaatgctttttatatacagaacagacatgtccaccatggaagatcaaactaagcctcaacagaacttcccaacacacaacaatttacagagaaacatgacagagcatccccgttattaggaaggactgtactgctgggggcaaggcagatggtttgcaaagcaaacttgattatgaaaaggcttggtgaaaatacagcccaccttcaccaagacacacacacagacaggcacacaccccaaagtatccaaatgcattaagacacctgttcatgtgcttttcttcttgcttttaagtcaatcccgtccatttaagttatactaattagaaggcgttcttgcctccatcagcaagagaaaaacagtgcatcgactcctccaatgtgtgtaaaatgcatgctaggtagattgaaggaaaaacgagaggaacccgggcaccccatttcaaatctgtacaactggagaaatcaaaggctgcaaggactgtgtagacctgatgcaaagttaactggctgcaaaaataaaacccaagccagtgctgtcttgcactctgttcactcagcagctggagcaatgaatgattgtgacattctggtggggtatttgtgcagcctgagttgcacctggctacagagtggagccttggagtctttaacagtgttaagccatagtttcacagttacaattgtccaaagaactagagaccatgtaggtcaaacacagaaatggcgaacaacacatcccaaaccactcaactgtttagttccactggtggaatttttttttaaaattggggggttaaggttggaatttcaaatgatttggtgttttgttgcttttgctttttcttcaaagcaaacaaataaaaaggtcttgaatatggacagaaaagaaacaaaacgctgaatgagaaattcagtaacaagtgattttgcagttgtttgatgggcatggagagggagtggggctgaactgcattttgaggggatgaagcgtgcaatcttacccactgctggggggtttctgtttcttattccatcatgctgacagcaaatataatttgcccatcgctggctatagatatgtttaggctaagcaggatttagacttctgttgtgaaggaattagaagaattcagtagatacagtgtatactattcggttgtgactttatttccttcctggctttatcaatgcctatgaaagcaggccggtggcatttcccttcagaaaaacaacctcttgttacttcttgttttaacatttccatttcctaaagatattctcttactgtatcccaatttaagaaaatactgccaattcataaaattacatggagcaaagtaaatttgtaatgtttttctgatacaaattttgtgattatcgtaagaattttcctctacattttgcacagtgattgtttcacgatcatctatgggaacattttggaatgcccacccgggtcaactatttttatttatttttttttttattttttgagatgggagtctcactccttcgccctggctggagtgcagtggcgcaatcttggttgactgcagcctccgcctcctgagttccatattctcctgcctcagcctcccgactaactgggattacaggcatgtgccaccacatctggctaatttttgtgtttttaatagagacaagggtttcatcatgttggccaggctggtctcaaactcctgacctcaggtgatctgcctgccttggcctcccaaagtgctgggattgcaggcatgacacactctgccaggtaaactctttttaaattattcagtgattgttccatgttttagctcattttgattaaattaacctctatatgacattgggacatttaaattatgaccccgccatgggcagtttccaggtagcctgtgtctcttcaaatgctgaaatgtgtgtgacggtcaaaagtgggttcacaccatcacacgttcttggaattgcttctaatttctcatttgttctgtatggctggaggctgatcatgatgtctgtaaagaacaaggtcaccaatgtgcttacatatttcattttcctgcgtatcagttcacaattaaggcatttcaggctttcctgatgctaatgctcatctgagtatgaaatcctggataataaaacagacaacataaaattacacatatggactcatgggtttatgtactttttaaagtgtgctcaagtgtttcatttatggttttattaataatttttaaagtagaatgttcaataatattattactatgatttatttttatagtcagcaaacatgagacttcatgcttttccttctagctccacgtcggtgcacagtgtaacctttttttaaaaaaatatggaatgctgcatgaatctgcggatcttcctcgcgcagggggccatgctaatctcctctgtgtcattccaattttagtatacctgctaccgaagtcagcaacagtttcaccttttcacattcacagtaaaactgatgggaaaccgcacgctaaatgtttaggcagcgatggccctcaactgttaatcccaacaggatggtgagtgagaagcacaggctgaaaatagagttgtctaaaacatttccacatttcaccatctgaacatcattttccactgagttattaattgtaaagagtttattctgctgaacctactaattattctcacctactgagttgaccgtcacgtgaagaaaaggtcactgatgaaacagggtggctatgttctgtttctgtaatttcactgttttaacatctttttttttatatagagatggggtctcgctatgctgcccaggccagtctcaaactcccaggctcaagcaatctttctgcttcagcttccccaaatcctaggattataaaagtgagccctacaaccagcttcactgtcttttaaagccttaaagtggacgttctcttcataccaccttcaaaagcaaaaagccattgaggttttttgggtttttttttttttttggaacagggtctcactctgtcacccaggctggagggcaatggtgtgatctcagatcactgtggcctggacctcctcaggctcaagtgatcctctcatctcagcctcctgagtagctgagactacaggcatgctccaccatgcccagttaacttttttgtattttgtagagatgaggtgtttcccagacaggtattgaactcctgggctcaagcaatcctctcgccccagcctcccaaagtgttacttaggattacaggtgtgagcctggccccagtgccttcttatctgtaggcgaactctggcccaaatctgattacatttcccttgacattttgcctacatttttaaaaatgtatggcttttcctaacagaaactctccacagtactgatgtgtgatatgtgtgcagaagagaggtagcaagtgctagagggagaaatctcttcccagatattgcttggaaaaacagctccaatagcaaggaatgcaccggatggctccagagaacctgagctactgagttttgagaagagattaggagccgaggggacccaactggcttctcactgcacacattttcactaacacatggcaagggtatactccacccctactctgggtgcagaaggagacagatgaaggcagggcatgagaaaaagaagaggtggagaagaaagtcttggaggtctgtgtgagtgtacccctgttgtcaacaaggaattcctggaaggctccaaaacctacttcttcaatgcactcacccctgccacagctgggccctgtgacctcatacacagcagatttgagcaatgccatatttgaggtgagtcacagtaaagagaaaaggtgcaccctcttcagatgtctacagccaagtttccagccaggatggtccagagaaaaagcaagggagaaaatgagttatgtacaaagccagaccccacaccctcagtttatgctgtgtctagcatgacccacatttagcaagagatgtttcagaacaaactcactgtatggctgtcatgccatcaacacccagggaagaacatctgggggttgctcctttcaggtgtctccccagtcatttcccaagagaacactctcacgcctggattattctgcataaaacagcatgacttgtcgaggagagtattaggcacactcaacatgaatatttaaaaggagaaattaggaacaggtgaggttccttttgactctgccacccactcacatcctatagatcatctgtttctcgcttttcccaaaactaaaggtgaaataaaatctctgcatgaaggtcagccttatagatgagctgatcttaaaagttatttgtgaactgtgggaggtgtattttttcaaaaaatttcaactgggactttaataggtagccatttccctgtgcaggatgaattttttttttaatacagggtcttgctctgtcgtccagcctggagtgcactggcacaatcagggctcactgcagcctcaacctcttgagctcaggcaatctctcctacaacagctcctgaatagctgggactacaggtatgcacaatgacacccgactaatttttataatttgtgtaaattccatacagacagggttcactatgttgcccaagctggtctcaaactcctggccttaagcaatcctcccaacccaggttcccagagtgctgggactacaggaacaagccactgcacctagcctagatgaaattttttaatgtgacacaggttttctgaatacaatgcattgctccaacaacttcaaagtcattgtggattcctgcaataaattcgctcccacatcttctccatgtttcrtcttttaaagtcrcaagttactaggtaggaagaactaaagatactgaatgtagacacccccggcccccggatatcttattcccccaaactatacaatgcatatgagatgatttttttaaaaatgcatgcaacatacccttcagatgttgtccccaagagaagggaagataatttgagaaactgaattgaaaaataaaaataataggctctgtgaagtatgtatatttacatcactgcacaatttgtgcatctgccataatgacttctatatatacacacacacacacacacacaatttgtggttataatcaaataagtccagttcaaacttataaagtctatgagaaaaaccaagacaacaccaaaagataagataaaatctataacgaaacaattttcaaaaccttcctacagtgtggaattctggttgcttaaataatgccagttccatgaatttcaactgtgctctgatctatttctatacacacaggtacagagaaaactggaaatgtcctcaggccgtgaagaagacattttgcttctggtctgcttaggtgcagttctttgttccaggcagattccaatcttcctgtttcttccagatgtgagctcgtcctcagaaattcttgaagatttctaaatccttctgcggcacgggcgcggctgtgtcccagtcatgctcagggtaagtttcgaagttggaagtgtcgccgttgccagctatcgtgggcacgatgggaggcttcagttttctctgcggaacagctttccagtccacggagcggaaccaccgatggtggttcacatcattcgccccgtttttacatggaaatccaaatgtctggggaaatatagtttgcctgcaagaattttctgataaatgccaaacgggttgtcatcaaaaaatggaggaaaccccgaaagcatctcgaatatcaggatgccgagggcccaccagtccacggcccttccgtggcccttgctctgaatgacttcgggggctaggtactcgggtgttccacagagggtccaagtcctgtctaccagcttcttggcaaacccaaagtccgtgagcttgatgtgaccatccctatccagcaggatgttctccggcttcaaatccctgtagacgatctccttggagtgcaggtactcaatggcacagatgatctccgcagagtagaagagccccgtggtgctggagaagtgcccccggttgcgcaggtagctgaagagctcgccacccggcacatactccatgagcatgtagaggaagcgctcctcatgccacgtccagaacagcctgatgaggaacgggtggctgacttccttcaggacagacttctcattgtgcacgtgctgctcctgcttccggcggatgacgtcgggaatgctcatcaccttgagggcgaagaaatgcttggctgtcttctccttcaccaggtgcacccgcccgaacgtcccagtgcccatggtgaccagcgcgtcgcagtcctgcaggcggtaggcaggcgcctccggcgaccgcgcctcggggctggggcagagcgcgggcgcccagtcggcggcatcctccgtcacctctcgggagttgctctccgccgcggccgcctgggccggcccgggcgcctccatggggaggcactcaggtccggggcgccgggccaggccggagcgctcgggaagccggactccccgggacgcagcctcggagggcggcgcggcagccgcggcagcatcaacggaggctccccatgcgcgccctcgcctctgggtgcgcggctcggcacggctgacggagacacagagacaatggctgggcggtgctcacggcactagcagcaatagccccgggagggagcagccgctggcctcgcggggcgtgcaccgagtgctggatggctgcgaggaaggcgggggcccaagcattcccggtctcacgcccgccgcttcctccagctcggtggccgcgtgc

SEQ ID NO: 11926 - DNA, 768 bp, Homo sapiens
  SIMILAR (104)..(3): 791254mologous to Homo sapiens Human secreted protein, SEQ ID NO: 6613,accession number G02532,Smith-Waterman Score=167.
atggggtttcgccatgtaggccaggctggtctcgaactcctggcctcatgtgatctgcccaccttggcctcccaaagtgctggaattacaggagtgagccaccatggccgacacaaaaaatatttcttaaatgatgatgatgatgtgatagaaatctacacgattactcagacagatcaagagcaggctggagtaccacaacaatgccgcccggggctccaacttaccactagcgtccgggaggaagaccaggcagcggtcgccgcggcggcagctagacgagaaacggactcggctgcaatcgcccagcggagcccgcggcagtcgcatctctgcactaatcgcgtcttctttcttcttcgttggcccctaactaactacactactctaaacggacgaaggccatcacacgagcgccacgacgatcgcgacgactccgacgacaacgatgtacagacagaagaagagttcatatgcaatcggcagggccttgggcccacagccagtcggttgcccagtcgttgtgggggagggaggggtgctgtcaatgcaaggtcaaggcagcaagaggtgaaccacaaaggctctcttttggcaactgctgggatgccgagctgcaaccggtcaggcagagctctaaccggtcaggcagagctctttttcacaggctcccaggcgcaaccgggcaggtgcctgcggtgtcctggcggcagcgcagagaagggtgaacggggcccccttggctcagaggcaccaaaaccaagctga

SEQ ID NO: 11927 - DNA, 1191 bp, Homo sapiens
  SIMILAR (531)..(611): 511254mologous to Hepatitis C virus core protein,accession number AF233721,Smith-Waterman Score=62.
atgcctatttgtgaagaacttggcacagttcatgacagcctgcttctgatcagggtggtttatggagaaataggactcggagatgggcagagacttcgtgggggccacacatcagtggcagctgggcaccctgatgaactcatcttcagaatgcagactgtgacttcatcctggacgaaggccaggtctgactcatctcggggtccccagccccggcccagggcctacagagaagctggcaccaggaaagccctcgtccgcggcctgcgcaccctcccctccggccctggactgacacatcgcttttggggtcgatgcactgtgtccaacattcggcctgaattgattaagcacttgctgtatgccgagcctgaggcagccactgtccgggcgctggaggggggaagcatggatcagggattccaaggcgggggcggtgaacttgaccggggggccggaaggaaggagacccccggccaggcctccagctgtgctctcaccgcatcagcccgtggcagatgggcgttggctcagtgggccgcccacctgtcccgtggtcacagtggacactcgagggctctgtgtgggcagctcatcttccacggggctcagaacattattgacagtcgggaaaatggtcgttcccttcacattgtagttggcaagattgcagacagccagcagaaactggcttccagccctgaccctgtcctgaagatgccggcaaacattgaggaagcctcttctacacaccaggcactgagcgaggcaccgatcaagacagacacaggcttgccccatgaggagcaagcagaaaaggaggacaagcacgaaaggacaagtgctgacctgcagtcacgggaatcggactcccggctccaagctgcccagaaacagaactccaggcccaaaggcgcccgtgagaagaatcaggcttcttgtgtgttggctgtagtgggagaaagaatggaaggagagggtctagaccactatgatgatgatgacgatgaagctttggcctgtcttcttctaatggactcctacctattcctcaaggttcagctcaaactccacttcttaccagaacttctgattcctcaccttccacgaaggccctcgctgctggccgtgcagagaggcaagtccagaggccaggacgcaggcagcgatgaccaggccttcctggaatga

SEQ ID NO: 11928 - DNA, 792 bp, Homo sapiens
  SIMILAR (74)..(3): 831254mologous to Homo sapiens Human secreted protein, SEQ ID NO: 6574,accession number G02493,Smith-Waterman Score=116.
atggggtttcgccatgttggccaggctggtctcaaactcctgacctcaagtgatctgcccgccttggcctcccaggtccagtgtaaactcgtggtccctgcatctgcagaaaggcacatttcccctctgcagcgcggactgattgcgttctcgctgcgtccagatccagggctcgccggcgacagagccagtctcggggtcccactgtgcggataccggattggtaatccgaggcggagccctaagcgcacacgccattgcgcccggacagcggctgtctcatgctctgcatacagcaagtgcttatatcaattcaggccgaatgtgggacacagtgcatctaccccaaaagcgatgtgtcagaccacggccgcaggggagggtgcgcacgccgcggacgagggctacacacaaagagtagtgggagcgaggcgagggacacctcaacgctacacgggcggggcagagactaagaaccgagcctttcgcagctaccccaaaatggagacctcttggccgcgcggcggagggagcaccccgcctgtagcactggatgcacaagtggagcgcgagtgcgctctagggtctggcgcgcagggcaagcactcgtgcctggctgtgcgggttgtgcttatattttgcattaacgaacattacccccaaacactcacctaccgattacctttcgtgcttcctctccgctcagggggaaccccaacctcctggagagctctgttctttcccagttccagcgactctaactgtaagctctgtgggggcacgagctcatag

SEQ ID NO: 11929 - DNA, 529 bp, Homo sapiens
  SIMILAR (8)..(127): 771254mologous to Homo sapiens Human secreted protein, SEQ ID NO: 4478,accession number G00397,Smith-Waterman Score=161.
  misc_feature (1)...(529): n = a,t,c or g
ttttttttttttttttttagtagagatggggtttcaccatgttggccaggctggtctcaaactcctaacctcaagtgatccgtccgccttggcctcccaaagtgctgggattacaggcgcgagccactcntgcccagcctacaatcatgatttctaattccaaaaatcagactttctaattctcaggtagatggccaaagctgattttcaagttttgtgtctttttaaacagaagaaaatgaaccttattaaagctgaatgactcattcaaggccatatagctggtaggtggcagaagtggggtttgaacccgtttttcttgctataccacacaccaattactgtatagaaaaatagctgaattgctcctattagccaaatttcatttttaaaacccccacatgtggtttattattctgttatggcaatgtctatgttgcatattaataaaaaagaaaatccttgtgtttagaaaacagtgttatcacagataacaataagctattcttgttcctggttccaatgattt

SEQ ID NO: 11930 - DNA, 1371 bp, Homo sapiens
  SIMILAR (1084)..(2460): 931254mologous to Homo sapiens putative p150,accession number U93564,Smith-Waterman Score=2255.
gcaagtctcattacatttaaaacccttttttaaacttggtcccttttctgtgccaactttatgtttgtttttgttcttgtttttgtttgagatggagtctcgctctgttgcccaggctggagtgcggtggcgcaatctcagctcaccccaacctctgcctcctgggttcaagtgattctcctgccttagcctcccgagtagctgggatcacaggcgtgcaccaccacgcctggataattttttttgtaattttagtagagatggggtttcaccatattggtctgaaactcctgacctcgtgatctgcccgccttggcctcccaaagtgctggcattacaggtatgagccactgtgcctggcccctattttttattttctgagatgaagtctcgctctgtcaccctaggctggagtgcagtgtggcacaatctcagctcactgcaacctccacctcccaggttcaagggatcttcccgccctcccacctcagcctccggagtagctagaattacaggccaccatgcccagcaaatctttgttttgttgttgttgttgttgttttgctttttgtgttttggtagagatggggtttcgccatgttggccaggctggtctcaaactcctgacctccagtgatccacccaccttggcctcccaaaagtgctggggattacagggcatgagggcaccgtgcccagccttgtttgcttttttaacagataacagtgtgctcatagaaactgctttgacatgactgcaatcatgtgcttcatagaaacttaattagattataccactagagtcttcagatttttatacttttttttttgaaacggagtctcactctgtcacccaggctggagtgctgtggtgcaatctcggctcactgcaacctctgcttcccgggttcaagcatttctcctgtctcagcctccccagtagctgggattacaggcacccaccaccatgcccagctaattttttgtatttttcagtagagacgggctttcaccatgttggctaggatagtttcaccaggatctcttggcctcatgatcagcctgcctcggcctcccaaagtgctgggattacaggtgtgagccaccgtgcccggccaccagaatcctttggtatagccaagccttttggttaccgcctcatgaagaatatgcttcccgcattgtcctagtcccagtagtattctcacaggtgttatgtgcaggacacaatccaaatcataaacctggctcatgcccaacacatttctgctaatagggagagggacccaccacacacccacacatgccagaggtccctcctcacagaggagagggcctgtgtctgtagaaggttaaagctgacaacatgtg

SEQ ID NO: 11931 - DNA, 1476 bp, Homo sapiens
  SIMILAR (1)..(657): 901254mologous to Homo sapiens putative p150,accession number U93563,Smith-Waterman Score=1076.
atggccatactgcccaaggtaatttatagattcaatgccatccccatcaagctaccagtgactttcttcacagaattgggaaaaactactttaaggttcatatggaaccaaaaaagagcctgcattggcaagtcagtcctaagccaaaagaacaaagctggaggcatcacactacctgacttcaaactatactacaaggctacagtaaccaaaacagcatggtactggtaccaaaacagagatatagaccaatggaacagaacagagtcctcagaaataatgctgcatatctacaaccatctgatctttgacaaacctgacaaaaacaagaaatggggaaaggattccctatttaataaatggtgctgggaaaactggctagccatatgtagaaagctgaaactggatcccttccttacatctcatacaaaaattaattcaagatggattaaagacttaaatgttagacctaaaaccataaaaaccctagaagaaaacctaggcaataccattcaggccataggcatgggcaaggacttcatgactaaaacaccaaaagcaatggcaacaaaagccaaaattgacaaatgggatctaattaaactaaagagcttctgcacagcaaaagaaactaccatcagactgctaggcaggcctcctgcgctcttcactgcctctagcagcgtcttgaaacagctggctctggaaggcatcctgattctggattcaagagctttgcttggatttctgtatgaagctcggcacagtcacagcaactctccaaatcatgacgctcaaaatgccacatctaaaaagaacatccgggatggctatgataaaatctacagacaagaacaagtgttagcaaggatggaggaaaaaaccctcatcactgctggtgggaatgtgaaatggtgcagccactttagaaaacagattggcggccagtggctaacactggagacgaagaccaagacaccacagcctttctccagtacctctcaaatcagcacagacaaggacaaaggcctcaatccacaactgctgaagatggaccctggccacatgggatggtgtccacctggtatgggcatcccgtggcagctctcctctgatgaccgagtgtgggtcttggcagcagccggctctggaaggcatcccggctctgggttcaagagcttgctgggcttctacatgaaggcagttatggacattgatgataatgatcatgaatatgaggtggcaattcctaaggtagttctggtggacctcagtgcatcagtggggaagagagagtttttagggtggtacaaagtatataaggaagaaactcctgagccacttaaggatgagtctgaatgtgtggtgttggctagatgtgggaagagctgcaaacacagtgaagtgaatgctgcaaggactggtcatactgaccacccagctgtgcaaggagaagagcaaccctggttgatgtga

SEQ ID NO: 11932 - DNA, 786 bp, Homo sapiens
  SIMILAR (736)..(3006): 961254mologous to Homo sapiens putative p150,accession number U93563,Smith-Waterman Score=3773.
ctagactctagactgagctgccttggtcactctgggacagttggcagagtattcgtggtcagggaggtgacccgcgggcatcaggatcatgccacccagggacaaagggtgcttctgcgccaggccccggatgttctttttagatgtggcgttttgagcatcatgatttggagagtcgttgtgaccgtgcttcagtgggaacagcagatgcaactggcggggctgaaggtcagtgggaacttcagggccccagagaaggcctgcctcgtgcatcatgggatcaggccatcccatgtggccagggtccatcttcagcagttgtggattgaggcctttgtccttgcctgtgctgatttgagtggtactggagaaaggcggtggtgtcttggtcttcgtctccagtgttagccacaggtagccaggcagaagccccatgtgagaacccctcccatgcgggccactggtgctgatggccatggtactgatgacccactggtgctgatggccatggtgctgatggccactggtgctgatgatcactggtgctgatggccactggtgctgatgatcactggtgctgatggccactggtgcttcagcatttagtgttatggaggaggttttcttccccggtgtagacatgtgcttcagaagacgcccaggggttgattcctggagtgatttagcagaatggctgcacttccttggggtttggagctcctgagaccatcttcctctgaattcttctagagtaactctgtagcagtcatcgacagtaggtcccat

SEQ ID NO: 11933 - DNA, 861 bp, Homo sapiens
  SIMILAR (121)..(360): 411254mologous to Arabidopsis thaliana Glycine-rich protein,accession number Z11867,Smith-Waterman Score=112.
atggccatcagcaccagtgggtcatcagtaccatggccatcagcaccagtggcccgcatgggaggggttctcacatggggcttctgcctggctacctgttggcagagtattcgtggtcagggaggtgacccgtggtcagcaggatcaggccacccagggacaaagggtgcttctgcgccaggccctggagaaggacagagcggtggggactcggggtcggccgcagataggggagtcaccacctgccggggccggcctccttcagagctggctcgggacaagcctgggatggaaaggggaagtagaaagagctcagggcacagggattggggccgatcctggggtctgagctgtgggtggctaacactggagacgaagaccaagacaccacagcctttcgtccagtacctctcaaatcagcacagacaaggacaaaggcctcaatccacaactgctgaagatggaccctggccacatgggatggtcagacacgcctgcccagctatctgcaggcgaagaggctcagaagaggtttaggggcctgaaggacatcttgcttccatgtccatatgagcaggctatttctgctccatgagtcaattttgccatataaaatacttaatttcagccattccagggtgctgtaggatgcacagcttcccatcagcccacctgaactccagccatgccattttaataccaggaataaggtcacctgctttcctgccccttaggtggccagagccatggaagcaaaatggcacttctgtttacctgttatattatttttttgtcatccttatatgcttggaaaatgcaattatatgaaaaaagtttagtaattacagacataacagcaaa

SEQ ID NO: 11934 - DNA, 594 bp, Homo sapiens
  SIMILAR (121)..(360): 411254mologous to Arabidopsis thaliana Glycine-rich protein,accession number Z11867,Smith-Waterman Score=112.
atggccatcagcaccagtgggtcatcagtaccatggccatcagcaccagtggcccgcatgggaggggttctcacatggggcttctgcctggctacctgttggcagagtattcgtggtcagggaggtgacccgtggtcagcaggatcaggccacccagggacaaagggtgcttctgcgccaggccctggagaaggacagagcggtggggactcggggtcggccgcagataggggagtcaccacctgccggggccggcctccttcagagctggctcgggacaagcctgggatggaaaggggaagtagaaagagctcagggcacagggattggggccgatcctggggtctgagctgtgggtggctaacactggagacgaagaccaagacaccaccgcctttctccagtaccactcaaatcagcacaggcaaggacaaaggcctcaatccacaactgctgaagatggaccctggccacatgggatggtcagacacgcctgcccagctatctgcaggcgaagaggctcagaagaggtttaggggcctgaaggacatcttgcttccatgtccatatgagcaggctatttctgctccatga

SEQ ID NO: 11935 - DNA, 355 bp, Homo sapiens
  SIMILAR (8)..(352): 561254mologous to Homo sapiens LBP-32,accession number AF198489,Smith-Waterman Score=302.
gctgcctctgaagcgtacctgctcgcccttcactgaggagtttgagcctctgccctccaagcaggccaaggaaggcgaccttcagagagttctgctgtatgtgcggagggagactgaggaggtgtttgacgcgctcatgttgaagaccccagacctgaaggggctgaggaatgcgatctctgagaagtatgggttccctgaagagaacatttacaaagtctacaagaaatgcaagcgaggaatcttagtcaacatggacaacaacatcattcagcattacagcaaccacgtcgccttcctgctggacatgggggagctggacggcaaaattcagatcatccttaaggagctgtaa

SEQ ID NO: 11936 - DNA, 1926 bp, Homo sapiens
  SIMILAR (1111)..(1239): 931254mologous to Mus musculus SPAF,accession number AF049099,Smith-Waterman Score=196.
atgaaggggccgctggccccatgcaagtctgaaatccagcggggcagtcaaattgtaaagctccaaaatgatctccttttactccatgtctcacatccaggtgacgctgatgcaagagcaagagagaagaaggagacagacgaaataaaagccacaacaagaacaggacaacacaatgctcgcagaacaactacacgacaacaacaacaagcgaagagagacgaatcagctggtcccctacatgattatgaacatacgttgtatattctagcgctgtcaattgctgtgtattgtaacgccagctacgtgcattacatgagacgcagagtctcgcacaatgttatcccatcatcagatatagacagcgggcttatttgcagttgcagtattgcgttcacataccatgcaggtatctcagttgttcgcatatggccacctagctgggatcatagcaggcagcaccagattatagtatcagtcacatattcttggtatcgtgtattagcgatgtatagcctagcagagcagatagcctatagcacatatccccacacgtcattggttgcgttcgaagttgttagcgcacattcagctgtgcacagaggacccgtgaaagtggaagaggacccgtggatccgtaccggaacccgatatgaacaggaactgctagggagaggttatgctaaggctgatggtaccttttgttgtgaacttccatttaaagctcagggttacacatacagattgctggcatctgaaggaaaaactgcctatggtcctcatctaattagaacaatgtgcgcgatacggtccccgatagacattctgtctgaatccattgttctcatgtcatgtctggatgctaagaactatcttcagtgggataaatgctcttctcatttaccccagaatgatggatccaccaatagcttgcaccatgcacctggaaaagctacaggcagtaagcaccagtctgtgaaagctgctgtgggggctgtaccctgcagatccatagggccagagctgctcaaagccatgggagcctactccttgcatcagtgtcacctggatgtgagacatggagtcaaaagaaattattgtggagccttaagttctttaggtgctgggaatgtagccgatcgtgttttggctcagctcttaacagaaatggatgggattgaacagctaaaggatgtgaccattttggcagctactaaccgtccagataggatagacaaggtcaaggaccttaaacacaacccggttaagcaaaccggttccccctctggcgggaacgtgttcgatacagggcgaagtaacaaccgagggggccaagttaccagcctgcgcacgtacagctgggcggccacccggatacatcatattagtaaggtcacagggcaaatcactgcccccaaaattggagagacagacagcccaggtacagaaaatcacaactttctggagcggaaacccacaaagagaaacctccatgagagccagtgccaggatagcgcaagcatcgcaaataggacagaagcagacagaggagaccgaagtagtttggagagacagacatttcagcgtgaggacatttcccccgaaaatttacatgtcgagcatactacattccacggcacagtcccagcaaagacagagagagcgaacaaagacgaacaaaaagatagaagaaacaaaaaaaggataacgaagaggaaacgaagcaagagaagagcagagaaacagaggaaagacacagagaaaaagaaaacaagaaaagaaagaagaagaacaacaagaagcagaacaagacaaagagaagaaaaggcgatcctcagaccccccctcacgagagggtgctcccccccccggtgtcgcactttcggtcccatagccgcgttaatatggcgctcccgcgcgcagtag

SEQ ID NO: 11937 - DNA, 468 bp, Homo sapiens
  SIMILAR (1)..(1755): 911254mologous to Homo sapiens putative p150,accession number U93563,Smith-Waterman Score=2724.
atgaacggatgctctgccctccctgcctttgcccatgctgactctcgctcctacatccgtaaacttagctattgcatcttccagaaggccattgctacaccctcaaaaccaggctctgggccaggcacagtggctcgcatctgtaatcctggcactttgggaggccgaggctacatccagaagatcaagtcgggagaggaggactttgagtctctggcctcacagttcagcgactgcagctcagccaaggccaggggagacctgggtgccttcagcagagtcctcggggtctacagaaaaacatcagggagaggccaggatgggttgcagggtgtggtgtgcaggtgtcttagtggggtggggcggcagcatggggccagcagctgcccacctcctccgaggaggctgctgggccgccgctcagcactggcaataaacatggtgacggatgagtgtggacgagtgtga

SEQ ID NO: 11938 - DNA, 1045 bp, Homo sapiens
  SIMILAR (46)..(507): 531254mologous to Homo sapiens Human prostate cancer- associated protein 74,accession number Y48377,Smith-Waterman Score= 323.
cccggctgggagaagcgcatgagccgcagctcagtagtaaacactcaggaagcgttacccactgctgccattcccagagatgcaaaaggccgagtgtactacttcaaccacatcactaacgccagccagtgggagcggcccagcggcaacagcatgcagtggtggcaaaaacgggcagggggagcctgccagcggtccgctgctcgcacctgctggtgaagcacagccagtcacggcgggccctcgtcctggcggcaggagaagatcacccggaccaaggaggaggccctggagctgatcaacggctacatccagaagatccagtcgggagaggaggactttggagtctctggcctcacagttcagcgactgcaagcatcagccaaaggccagggggagacctgggtgcctttcagcagaaggtcagattgcagaagccattttgaagaacgcctcgttttgcgcttgcggacggggggagatgagcgggcccgtgtttcacggatttccggcatccacatcatccttccgcacttgagtgagggttggggagcccaggcctggcctcggggcagggcagggcggctaggccggccagctcccccttgcccgccagccagtggccgaaccccccactccctgccaccgtcacacagtatttattgttcccacaatggctgggagggggcccttccagactgggggcccttccagactgggggccctggggttccccactccctgtcagtccccagttggggctgcgacctccagactctccattaaggagttgacttcagcatgggagggaggctcgcagacccagggcaatgtggtgggaggagtgttccaaagagaagatctggtcagcagagccgccccatgtcccaccaggtcctggaggcagatgcgagggcccagagttgtttgtagttaggccacgcttctctgttcagtagcaaaagcaaacactcgtgggcccagctgtgggccctctgagcaactttgcagcaccctttcacccccaattaaatccggaaccact

SEQ ID NO: 11939 - DNA, 512 bp, Homo sapiens
  SIMILAR (1018)..(2418): 981254mologous to Homo sapiens putative p150,accession number U93563,Smith-Waterman Score=2380.
ccccgggagagggcgccgagaggctcggtgggcgcgggcggcgagatatgccacacttctgtctgctgttgtcaaccctcctggactaggctgctcttgttaatcacatggatgttgctgattactctgagtgcaaaccttttcactgttccagagaggagcctgacaaccacattctccttctcaagatataagagttcggaccgcccagcacacaaggtcagcatgctgctcctctgtcacgctctcgctatagctgttgtccagatcgttatcttctcagaaagctgggcatttgccaagaacatcaacttctataatgtgaggcctcctctcgaccctacaccatttccaaatagcttcaagtgctttacttgtgaaaacgcaggggataattataactgcaatcgatgggcacaagacaaatggtgtccacaaaatacacagtactgtttgacagttcatcacttcaccagccacggaagaagcacatccatcaccaaaaagtgtgc

SEQ ID NO: 11940 - DNA, 1622 bp, Homo sapiens
  SIMILAR (667)..(1020): 1001254mologous to Homo sapiens Human secreted protein encoded by gene No. 7,accession number Y27573,Smith-Waterman Score= 686.
atggtatggcagcaagattatggaaccaggagagagcaccatggctgccgtctggaattctgccgtgtatctgcagggtgcccttgcctaagccccttgacctctttggttatagtttcctcatctgctgagagaggtgaggaagctgcagaagaagactttgaaactagcagaggtgggttcatgaggatgaaggaaagaagccatgcccataacataaaagtgcaaggtgaagcaggaggtgctgatgaagaagctgcagcaagtgatccagaagatctagctaagatcattgatgaagatgtgaaaggcattgtacagaagaagatgagaatcacagtaaaccaaacaaaggaaatgcagaagagatattttcagctgaatattggaaatgtaaaatgccacacgttggatgagatgattatccgagctcagacttgggaaatagtcatgcttctggaccaagtgccaggtcctggccctacacaacaggtagatggttggatatatttggataatggagctttccaaacagaagcaaaacacaaacccactgatgtaaaatataaagaaactgaaccagtgtgtcttttcaccatagatataagagttcggaccgcccagcacacaagaataaaacagaaagtctccattacttctatggctacaccatttccaaatagcttcaagtgctttacttgtgaaaacgcaggggataattataactgcaatcgatgggcagaagacaaatggtgtccacaaaatacacagtactgtttgacagttcatcacttcaccagccacggaagaagcacatccatcaccaaaaagtgtgcctccagaagtgaatgtcattttgtcggttgccaccacagccgagattctgaacatacggagtgtaggtcttgctgtgaaggaatgatctgcaatgtagaattacccaccaatcacactaatgcagtgtttgccgtaatgcacgctcagagaacatctggcagcagtgcccccacactctacctaccagtgcttgcctgggtctttgtgcttccattgctgtgatgccaccattcctaggagaggcagagaccagcctctaaagcacaagccaaaaactgtgtgaacggtgaactttggagtgaagatcaatcttgcacttggtgaagagtgcacattgggacctcaaggcgaaagccagttggtttgcttggataaaatgttccccgcatggaggccacgggactgaggatgggaaatttggcagggcctgagaagatggtctgacttccaggcttcctggtcaaagagagctacggtttgggcaggttctgcagagaggatcctggcaactaggtcccaccgagctaggccttaagttgaaaggatttcttgacctccttgactgcctcagaggctgccaggtcaaaccctcttgtttatgtgattagctcagagcatctctatgaaatctaacccttcccctcatgagaaagcagttttccccaccaacagcatagtcaatgagaaaggcaactgtacgaagaaaacttccagtggaactaatatgaaatctatttgccacactatggggggaaataaagcttttaaaaaatacaatgtaaaaa

SEQ ID NO: 11941 - DNA, 861 bp, Homo sapiens
  SIMILAR (1)..(861): 891254mologous to Homo sapiens SELENOPHOSPHATE SYNTHETASE ; Human selenium donor protein,accession number BC000941,Smith- Waterman Score=1320.
atgtctaagcgggagtcctttaacctggaaagttatgaattggacaaaagcttctggctaaccagattcactgaactgaagggcacaggttgcaaagtgccccaagatgtcttgcaaaaattgctggaatctttacaggagaaccacttccaagaagatgagcagtttctgggagccgttatgccaaggcttcgcattggaatggatacttgtgccatttctttgaggcatggtgggctttccttggttcaaaccacagattacatttacccgatcgtagacgacccttacatgatgggcaggatagcatgtgccaatgtcctcagtgacctctatgcaatgggggtcacagaatgtgacaatatgctgatgctccttggagtcagtaataaaatgaccgacagggaaagggataaagtgatgcctctgattatccaaagttttaaagatgcagctgaggaagcaggaatgtctgtaatggtcagccaaacagtactaaatccctggattgtcctgggaggagtcactaccactgtcttccagcccaatgaatttatcatgccagacaatgcagtgccaggggacgtgctggtgttgacaaaacccctggggacacagaaatggaataagattaagctagtggtcaccgaagatgtagagctggccaaccaggaggcgatgatgaacatggtgaggctcaacaggacagctgcaggactcatgcacacgttcaatgcccacatggccactgacatcacgggcttcgggattttgggccacgtgcagaacctagccaagcagcagaggaacgaggtgtcgtttgtaattcacaacctcctggtgctggccaagatggctgcg

SEQ ID NO: 11942 - DNA, 628 bp, Homo sapiens
  SIMILAR (1)..(255): 931254mologous to Homo sapiens SELENOPHOSPHATE SYNTHETASE ; Human selenium donor protein,accession number BC000941,Smith- Waterman Score=398.
attgtcctgggaggagtggctaccactgtctgccaactcaatgaatttatcatgacagacaatgcagtgccagcggacgtgctggtgctgacaaaacccctggggacacaggtggcagtggctgtgcaccagtggctggatatccctgagaaatggaataagattaaactagtggtcacccaagaagatgtagagctggcctaccaggaggcgatgatgaacatggcgaggctcaacaggacaggcggccttctgatctgtttaccacgtgagcaagcagctcggttctgtgcagagataaagtcccccaaatatggtgaaggccaccaagcatggattattgggattgtagagaagggcaaccgcacagccagaatcatagacaaaccccggatcatggaggtcgcaccacaagtggccactcaaaatgtgaatcccacacccggggccacctcttaatctagacagaaatagctgtttggttttgtttttaaatagatctatttcccttatcacttcaattaaagactataaacaacaaaaatctcattgtgtctacacatcggggtgaccttaggtcggtttgtaagtggatacaattaataaaataaaatccattgccttttaa

SEQ ID NO: 11943 - DNA, 1023 bp, Homo sapiens
  SIMILAR (1)..(291): 921254mologous to Homo sapiens SELENOPHOSPHATE SYNTHETASE ; Human selenium donor protein,accession number BC000941,Smith- Waterman Score=461.
atggctgtgcaccagtggctggatattcctaagaaatggaataagattaaactagtggtcacccaagaagatgtagagctggcctaccaggaggcgatgatgaacatggcaaggctcaacgggacagctgccggactcatgcacacgttcaatgcccacgcggccactgacatcaagggctttgggatctggggccacgtgcagaacctggccaagcagcagaggaacgaggtgtcatttgtaattcacaacctcccggtgctggccaagatggctgcagcgagcaaggcgaagtcccgatgtaccatcaggtatgaaaaccctaagagggagcaggtgtcagagcaggaggtcacagggcagccactgaaggaaagctgcattctgaggctggaagaaggaagaatgtcactgagtagacaaaataatggtcatcagggaattggtaaagtaaagaggaaaagaagaatcaagacagtacaatgccatgacagctcaagtgagaagacttttcataaggagaggggagacaaccccatgaatgagccatgtaggtcaagaagaatgaaggctgagatcagtgctgcagaaatcacaggtagcacaaggcaatctggagctcagcagtccggagctggtataatgactccatcgtccttctgtcttggtccttttgagtgtggctccatcatcctcagtgcccagagggcaaggtctgggcccactttaattgtgggtgcaatccataatatagagccagtggcctatgtgtgcttaacaaataccatcaggtatatccatgggtcttatcacccaacacaggaagctgggcatcatcccagatgcctacctgtttttgatctaccacctttagctgaaaaggatgaaatgatagatgtagaattcagaatctggatagcaatgaagattattgagattcaggagaaagttgaaacccaatccaagaaacctaaagaatccagtaaaataattccagagctgaaagccaaaatagccatttga

SEQ ID NO: 11944 - DNA, 1640 bp, Homo sapiens
  SIMILAR (1)..(1104): 891254mologous to Homo sapiens putative p150,accession number U93563,Smith-Waterman Score=1682.
ggcggcggccggctcccgcaggcgccgaggcaggcgagcccccggccccaggcgcccgggccccgccgccgcccgcgcgcggcgcggcattttattcaggcgacgcttaagggagccggccgcgcccggtgcattgtgggaggcccgcggccgttttcgggaggaaggcggaggggccaaagcgagccggtggatccataaagaacccagccaacccgcagagggaggggaggggctgagctgtgaggagagcggggcccaagaaccatgtctacgcgggagtcctttaacccggaaagttacgaattggacaaaagcttccggctaaccagattcactgaactgaagggcacaggctgcaaagtgccccaagatgtcctgcaaaaattgctggaatctttacaggagaaccacttccaagaagatgagcagtttctgggagccgttatgccaaggcttggcattggaatggatacttgtgtcattcctttgaggcacggtgggctttccttggttcaaaccacagattacatttacccgatcgtagacgacccttacatgatgggcaggatagcgtgtgccaatgtcctcagtgacctctatgcaatgggggtcacggaatgtgacaatatgctgatgctccttggagtcagtaataaaatgaccgacagggaaagggataaagtgatgcctctgattatccaaggttttaaagacgcagctgaggaagcaggaacgtctgtaacaggcggccaaacagtactaaacccctggattgtcctgggaggagtggctaccactgtctgccaacccaatgaatttatcatgccagacaatgcagtgccaggggacgtgctggtgctgacaaaacccctggggacacaggtggcagtggctgtgcaccagtggctggatatccctgagaaatgggaataagattaaactagtggtcacccaagaagatgtagagcttggcctaccagggaggcgattgatgaacatggcgaggctcaacaggacagctgcaggactcatgcacactgttcaatgcccacgccgccacttgacatcaccgggctttgtgtattttgggccatgcgcagaaccttggccaagccagcagaaggaacgatgtgtcgtttgtaattcacaacctccccggtgcttggccaagatggcttgcggtgagcaaggcctgcgggaaacatgttcggcctcatgcacgtgacctgcccggagacttcaggcgggccttctgatctgtttaccacggtgagcaagcagctcggttctgtgcagagataaagtcccccaaatatggtgaaggccaccaagcatggattattgggattgtagagaagggcaaccgcacagccagaatcatagacaaaccccggatcatcgaggtcgcaccacaagtggccactcaaaatgtgaatcccacacccggggccacctcttaatctagacagaaatagctgtttggttttgtttttaaatagatctatttcccttatcacttcaattaaagactataaacaacaaaaatctcattgtgtctacacatcggggtgaccttaggtcggttagtaagtgagatacaattaataaaataaaatccattgcctttttaaaatatt

SEQ ID NO: 11945 - DNA, 501 bp, Homo sapiens
  SIMILAR (281)..(3): 971254mologous to Homo sapiens phospholipid scramblase 3,accession number AF159442,Smith-Waterman Score=499.
ttagtgctctaccatcaccgtcttaacatccttagtcttatctgtgaacttgtgttttacgagtgaaatcatcaccagtccccaagcacggacctcacccctggccagccttccggcatgccaggcctcctcctccctcaagcccatgcggaagcagggaagtgggtcacacagggagcccatgctatgggtggacgtacccttcatcacctctttaaagacctcttcaaatacgttcacactctgagttactgggggtttggactccaacatctgaattttaagaggacacaactcagtccgtgacagcgggtcttctcgaagtctcgtggggaagagtggttctttgcagtaagtcatttcctgccttacagtcttgacctctcccctaattcccacgtactttcttccttcccccatcttgatggcactgatggaagaaactctggaccacttgcgccagggacaccaagtctgcatccttagccttgatcgggccat

SEQ ID NO: 11946 - DNA, 519 bp, Homo sapiens
  SIMILAR (11)..(55): 1001254mologous to Homo sapiens Protein sequence encoded by clone p199-7 (PL mutet.rsT4),accession number P93371,Smith-Waterman Score=82.
atgacggtgaaaacctctgacacatgcagctcccggagacggtcacagcttgtctactcctcccacgtctttgcccagaccccagcagcagctggaacaggagggactccctctcactcagcccatcgggtggatcaggtggactggtcatgcccggaaatgacttactgcaaagaaccactcttccccacgagacttcgagaagacccgctgtcacggactgagttgtgtcctcttaaaattcagatgttggagtccaaacccccagtaactcagagtgtgaacgtatttgaagaggtctttaaagaggtgatgaagggtacgtccacccatagcatgggctccctgtgtgacccacttccctgcttccgcatgggcttgagggaggaggaggcctggcatgccggaaggctggccaggggtgaggtccgtgcttggggactggtgatgatttcactcgtaaaacacaagttcacagataagactaaggatgttaagacggtgatggtagagcactaa

SEQ ID NO: 11947 - DNA, 312 bp, Homo sapiens
  SIMILAR (1)..(201): 1001254mologous to Homo sapiens dJ483K16.1.2 (novel protein (isoform 2)),accession number AL034374,Smith-Waterman Score=344.
ggtatcagcagctctgtcctcagaatgggtcccccacttcacacagttgtaggatggctacagcagctccaagcagcacattcagaggaagaagaaaaaatgtttcatttgtgtggttttaagcataaagaagttgtttcccagagctctttgccagctgtcatccctcaaaactcactggccacaattgcttcacatgcccgggaagcactgtgcggtgtgggaggatgaatatgtgccaatttggaaagatgagtatttgtgggaaaatgaataaagcaaagtgtaaatcagaaaaaaaaaaaaaaaaaa

SEQ ID NO: 11948 - DNA, 711 bp, Homo sapiens
  SIMILAR (23)..(337): 651254mologous to Homo sapiens RPS16,accession number M60854,Smith-Waterman Score=311.
atgccatctaaggactcgttggctgcagtctgtgcagatcttcacatacaaggagatggccatagctgtggtgctctgcagatgtggcagtggcttcatcaggatgaacgaggggcccctggagatgatcaagctgctcacactgcaatacaagctactggaattaggtctgcttctggacaaggaacagcttgctggaatggacatccatgttcgtgtgaagggtagtggtcatgtggttcagatttatgctgtccttcagtacatctccaaagccctggtaccctgttacccaaaatatgtagatgaggcttccgaggagatcaaagacaccctcaccagaccttgctggtggttcacccctgttgctatgagccattgcctcctgtttccttctgcctaaataaattctgcttcagaagtcaaattaggttcatgaaaatgattgctggcagccttcatgcaggtaaatgatccaaatgcagaaccgtggatggtgatggtatgatgtaaccaaggatccttgttcttgtcattttctactttgccacttccaggtatcagcagctctgtcctcagaatgggtcccccacttcacacagttgtaggatggctacagcagctccaagcagcacattcagaggaagaagaaaaaatgtttcatttgtgtggttttaagcataaagaagttgtttcccagagctctttgcc

SEQ ID NO: 11949 - DNA, 488 bp, Homo sapiens
  SIMILAR (130)..(486): 971254mologous to Homo sapiens dJ483K16.1.1 (novel protein (isoform 1)),accession number AL034374,Smith-Waterman Score=625.
cagtggcggaattctagccaccggtgtctccttctacatccgcctctgcgccggctgccacccgcgctccctccgccgccgccgccttgctgctgctcaaagctgctgccgccccttgggctaaaaggttttcaaatggaacattttgatgcatcacttagtacctatttcaaggcattgctaggccctcgagatactagagtaaaaggatggtttcttctggacaattatatacccacatttatctgctctgtcatatatttactaattgtatggctgggaccaaaatacatgaggaataaacagccattctcttgccgggggattttagtggtgtataaccttggactcacactgctgtctctgtatatgttctgtgagttagtaacaggagtatgggaaggcaaatacaacttcttctgtcagggcacacgcaccgcaggagaatcacatatgaagattatccgtgtcctctggagggactactt

SEQ ID NO: 11950 - DNA, 624 bp, Homo sapiens
  SIMILAR (291)..(1037): 911254mologous to Rattus norvegicus neuroligin 2,accession number U41662,Smith-Waterman Score=1225.
  misc_feature (1)...(624): n = a,t,c or g
gtcctagccaccggtgtctccttctacatccgcctctgcgccggctgccacccgcgctccctccgccgccgccgccttgctgctgctcaaagctgctgccgccccttggcgtaaaaggttttcaaatggaacattttgatgcatcacttagtacctatttcaaggcattgctaggccctcgaggtatcagcagctctgtcctcagaatgggtcccccacttccacagtgggtttttgtaagggaaganaattttggggggggnctcacacagcagctccaagcagcacattcagaggaagaagaaaaaatgtttcatttgtgtggttttaagcataaagaagttgtttcccagagctctttgccagctgtcatccctcaaaactcactggccacaattgcttcacatgcacctgcctgaaccagccaccagagggggttaggacccccccagattgactagatcctaaggattctctacctggggctggagttcgggtcaggtgcccgggaagccctgtgcggtgtgggaggatgaatatgtgccaatttggaaagatgagtatttgtgggaaaatgaataaagcaaagtgtaaatcagaggtttaagttaaaaaaaaaaaaaa

SEQ ID NO: 11951 - DNA, 1311 bp, Homo sapiens
gtgataacttcaggtgggataacattttgtgaccagctatggcataaagagtgttttctgtgtagtggctgtaggaaagatctctgtgaagaacagttcatgtccagagacgactatccattctgcgtggactgctacaaccatctttatgccaacaagtgtgtagcctgttccaaacccattagtggtctcacaggtgccaagtttatctgctttcaagacagccagtggcatagcgaatgctttaactgcgggaaatgctctgtctccttggtgggtaaaggcttcctgacccagaacaaggaaatcttctgccaaaaatgtggctccggaatggacactgacatctaggagacagtccttgcccacctaaaatccattttgccttcgttgtcactaaagccagaactcagttgcggtcttatttttgacttaagttttagaaaatattcatgtagtttagagtggaaaagtttttgcacacattttgatcgaactatattctaagcacacaaaaagcacagtagaacagaaatgaatatatgctaaatcacaaagacaactctccttgcaaaatactgcactctgctgttagaagcagaggaaaatatctcttcataatcaaatatatgacatatacctaggagctgtggatgtaattactgaagaatgaggtttttcatacctgaagagtaaaagaaaaactaagagatcaaactgagaggtatacatgaggctagtgtttgcattcctggttatatgtaatgtgataaattagctatgaatggtaaaagaacaaaactgatcagagtaaattcattagcaattatcacatttaagaattgttatcatttaaaaatcatcctttttttcacacatactgactgtagaattaaaaaacaaagctacaatttgccctcatacacactgcttccacagcttgctagttctgtgtttactcaatggaatatgagaactgaggacattatggctctcataatctgcataggtataaagaggatcatttctacctagggatagccaaagcatgggtttcaacacgttttgtattaaatatattttcaaagtccacagtgatttttctaaacgcttacagattccatgaaataaaagtctattctttcaagtggagctaaccaggataatctttgtccccaaaggcaaacctttaaaataaatagatcattaaatcttcacttgtggaaatgagttttagggaagggattgagtcttggaacatgactttcatccagatatctaacgacataatagaatgcataattagctctg

SEQ ID NO: 11952 - DNA, 711 bp, Homo sapiens
  SIMILAR (367)..(705): 751254mologous to Homo sapiens putative p150,accession number U93563,Smith-Waterman Score=423.
atggaatactatgcagccataaaaaatgatgagttcatgtcctttgtagggacgtggatgaagctggaaaccatcattctcagcaaactattgcaaggacaaaaaaccaaacaccgcatgttctcactcatagaaatacaaactaccatcagagaatactataaacacctctacgcaaataaactagaaaatctagaagaaatggataaattcctcaacacatacaccctcccaagactaaaccaggaagaagttgaatctctgaatagaccaataacaggctctgaaattgtggcaataatcaatagtttaccaaccaaaaggagtccaggaccagatggattcacagccaaattctaccagagaaaaattaactcaagatggattaaagacttaaatgtaagacctaaaaccataaaaaacctagaagaaaacctaggcaataccattcaggacataggcatgggcaaaggcttcataactaaaacactgaaagaaatggcaacaaaagccaaaattgacaaatgggatctaattaaactaaagcgcttcttcacagcaaaagacactatcatcgtagtgaacagacaacctacagaatgggacaaatgtttttcaatgtatccatccgacaaagggctaatatccagaagctacaaggaacttaaacaaatttccgagaataaaacaaccccatcaaaaagtgtgtga

SEQ ID NO: 11953 - DNA, 384 bp, Homo sapiens
  SIMILAR (270)..(28): 381254mologous to Homo sapiens Human normal ovarian tissue derived protein 12,accession number Y59735,Smith-Waterman Score=87.
gcctccgaccacgcgggctcctgatcgcgggcgcccacatcgcggacatggagggctggtggccggcgttgtcgcgcacggcccggcgccacccgtggcccaccaacgtgctgctctacgttgctcgagcaacgtagctcgtacgctctacgagcgtgccgtagctcgctcgtctccgccggggacgtgctgcagcaacggctgcagggccgctaggccgactggcgccagacgcggcgcgtggccacgttggtggtgaccttccacgccaacttcaactacgtgtggctgggcctgctggagcgcgcgctcccggggccgagcgccgcgcgcaatgcttggccaaagtttgcttgtgcgaccaaggtggtcgggttgcgccca

SEQ ID NO: 11954 - DNA, 1165 bp, Homo sapiens
  SIMILAR (924)..(160): 721254mologous to Homo sapiens phospholipid scramblase 3,accession number AF159442,Smith-Waterman Score=878.
atggaacactatgcagccataaaaattgatgagttcatgtcctttgtagggacatggatgaagctggaaaccatcattctcagcaaactgtcacaaggacgaaaaaccaaacaccgcatgttctcactcataggaaaggatcctccccatctctgcagaagcctgaccatccccctagagggcctgggaggaagtgggttttgcatacagtccctgttgactctagtgccccctgctggccccagacgcgagttccggcgaggcttcaggcaacttcgcggtgtggtgaactctctgaggaaaaacggttccattcagagccgatacatcagcatgagtgtgtggacaagcccacggagacttgtggagctggcagggcagagcctgctgaaggatgaggccctggccattgccgccctggagttgctgcccagggagctcttcccgccactcttcatggcagcctttgacgggagacacagccagaccctgaaggcaatggtgcaggcctggcccttcacctgcctccctctgggagtgctgatgaagggacaacatcttcacctggagaccttcaaagctgtgcttgatggacttgatgtgctccttgcccaggaggttcgccccaggaggtggaaacttcaagtgctggatttacggaagaactctcatcaggacttctggactgtatggtctggaaacagggccagtctgtactcatttccagagccagaagcagctcagcccatgacaaagaagcgaaaagtagatggtttgagcacagaggcagagcagcccttcattccagtagaggtgctcgtagacctgttcctcaaggaaggtgcctgtgatgaattgttctcctacctcattgagaaagtgaagcgaaagaaaaatgtactacgcctgtgctgtaagaagctgaagatttttgcaatgcccatgcaggatatcaagatgatcctgaaaatggtgcagctggactctattgaagatttggaagtgacttgtacctggaagctacccaccttggcgaaattttctccttacctgggccagatgattaatctgcgtagactcctcctctcccacatccatgcatcttcctacatttccccggagaaggaagagcagtatatcgcccagttcacctctcagttcctca

SEQ ID NO: 11955 - DNA, 414 bp, Homo sapiens; identical to SEQ ID NO: 11375
  SIMILAR (350)..(174): 811254mologous to Homo sapiens Human secreted protein encoded by gene 31 clone HTLAV68,accession number W78156,Smith-Waterman Score=250.

SEQ ID NO: 11956 - DNA, 999 bp, Homo sapiens
  SIMILAR (1455)..(142): 851254mologous to Homo sapiens putative p150,accession number U93572,Smith-Waterman Score=1905.
atgatagactggattaagaaaatatggcacatatacactgtggaatactatgcagccataaaaaaggatgagttcatgtcctttgtagggacatgggtgaagctggaaacaatcattctgagcaaactattacaaggacagaaaaccaaacaccgcatgttctcactcttaggtgagagtgatgagatcacttggacacaggaaggggaacatcacacactggggcctgtcgaaacgctggtgaaagtaaaagatgctgaagatcagttgggtgcacgagtgggttacatcgaactggatctcaacagcggtaagatccttgagagttttcgccccgaagaacgttttccaatgatgagcacttttaaagttctgctatgtggcgcggtattatcccgtattgacgccgggcaagagcaactcggtcgccgcatacactattctcagaatgacttggttgagtactcaccagtcacagaaaagcatcttacggatggcatgacagtaagagaattatgcagtgctgccataaccatgagtgataacactgcggccaacttacttctgacaacgatcggaggaccgaaggagctaaccgcttttttgcacaacatgggggatcatgtaactcgccttgatcgttgggaaccggagctgaatgaagccataccaaacgacgagcgtgacaccacgatgcctgtagcaatggcaacaacgttgcgcaaactattaactggcgaactacttactctagcttcccggcaacaattaatagactggatggaggcggataaagttgcaggaccacttctgcgctcggcccttccggctggctggtttattgctgataaatctggagccggggggcggagcctatggaaaaacgccagcaacgcggcctttttacggttcctggccttttgctggccttttgctcacatgttctttcctgcgttatcccctgattctgtggataaccgtattaccgcctttgagtga

SEQ ID NO: 11957 - DNA, 744 bp, Homo sapiens
  SIMILAR (1)..(114): 891254mologous to Homo sapiens Human secreted protein, SEQ ID NO: 6720,accession number G02639,Smith-Waterman Score=174.
atggaatactatgcagccatgaaaaaggatgagttcatgtcctttgtagggacatggaagaagctggaaaccatcattctgagcaaactatcgcaaggacagaaaaccaaacaccacgtgttttcactcatagatgggaattcaataatgagaacacttggacacagggactggaccagtagcaggctggtggaaagcatgagcagctccattcaggaaggggaagcagcagctgtttccccaggagacagtgtctgggagcagctgcaagctgggaagagcctgatggcaagggagctgccgactgatcagcgagaaagagatttcacagagatttcacagggcatcaacagctcaggggatgttggctacaggcggggaaagcacctatatgcccttctacctgccgcacccacggaggaggctcagctggaaggacagggaaggaaccataagcacgggcagggtgggaggcgaacactcggggttgcagctgtcactgattatggaagggtgtgtaagatccccaagcacacgcgctttgcctcagttgctgaatgcagatttgaaaaccacagcaagagtgaagaccagaaaggacagttgctgggtggggcagaaggtgccatcgagggagttgatgtttgccatgacaaggaccaaaaggttcggcatcaggagcccaagagccaggacatccaccaaaggctgttggtcaagctgttcaggtttccggccagatga

SEQ ID NO: 11958 - DNA, 447 bp, Homo sapiens
  SIMILAR (1)..(111): 861254mologous to Homo sapiens PRO1546,accession number AF116638,Smith-Waterman Score=166.
atggaatactatgcagccataaaaaaggatgagttcatgtcctttgcagggacatggatgaagctggaaaccatcattctcagcaaactatcacaaggacaaaaaaccaaacaccgcatgttctcactcacaggtattttagtgcaaaatcagaagagtctgcatcagaggctacagtcatactatacatactcgctgttgaaagtgaatggtccttttggagactcctgggccatatatatgaatcctattcctaaaaccagtcttgaggaagaacagaacctcagggctactgacagcgcctcctctctcattgctcttggaacactaaatagcaatgaaaatggaagacgcacagctacacataactggcagagatccttacaccttatacaaaaattaattcaagatggattaaagacttacatgttagacctaaaaccataa

SEQ ID NO: 11959 - DNA, 558 bp, Homo sapiens
  SIMILAR (1)..(111): 811254mologous to Homo sapiens PRO1546,accession number AF116638,Smith-Waterman Score=158.
atggaatactatgcagccataaaaaaggatgatttcgtgtcctttgtagggacatggatgaagctggaaaccatcattctcagcaaactattgcaaggacagaaaaccgaacaccgcatgttctcactcatagggctggtcaccaggccagcagcagtaccagcagcatttgggagcttgttagaaatgcatagccccgagctgcacaccacgccgtgtgaatcagaaactttggaggtggtgttagggatatgtggggtacgagctcgaattcgtaatcatggtcatagctgtgtcctgtgtgagattgtgatcgctcacatttcacacacatacgagctggagcataagtgtaaagctgtggatctccccatcgtttttatgggacacatcaaagctcctaataccctcttaactctgttgatgctgaagattttcccacatgtgtctagggacccttcaatcaccactgattccacaaacacccataaacttgaagaatcagaaacgctcaaatctcaggatctagatgggctcagagattgttcaagactctga

SEQ ID NO: 11960 - DNA, 2244 bp, Homo sapiens
  SIMILAR (130)..(648): 991254mologous to Homo sapiens cone photoreceptor cyclic nucleotide-gated channel beta subunit,accession number AF272900,Smith-Waterman Score=917.
atggaatactatgcagccataaaaaaggatgagttcatgtcctttgtagagacatggatgaagctggaaaccatcatgctcagcaaactatcacaaggacagaaaaccaaacaccgcatgttctcacacaacagcccacaaaacaaaccgcctgcagctcctgttataaatgagtatgccgatgcccagctacacaacctggtgaaaagaatgcgtcaaagaacagccctctacaagaaaaagttggtagagggagatctctcctcacccgaagccagcccacaaactgcaaagcccacggctgtaccaccagtaaaagaaagcgatgataagccaacagaacattactacaggctgttgtggttcaaagtcaaaaagatgcctttaacagagtacttaaagcgaattaaacttccaaacagcatagattcatacacagatcgactctatctcctgtggctcttgcttgtcactcttgcctataactggaactgctgttttataccactgcgcctcgtcttcccatatcaaaccgcagacaacatacactactggcttattgcggacatcatatgtgatatcatctacctttatgatatgctatttatccagcccagactccagtttgtaagaggaggagacataataagattccaagaatcctatccatctttttcaccaatatggtttgtggactgtgatgacccaaatctgacatcagttctggaacgtccagaagatactgagaacaacaattaccttcgtcagcaattgaagtgcacctggatgtttgagatgctagatcaaccactacccatgggtcagaatgggaaaatagaagtgacttcagaagaagaggaagaagagatggctggagatataaaatacttaaatcactgtaagatgaagaaagaagaacttattagtgggaaaaagttggaggatgaaggaattgaaaaagaaaatttggcaacattagagaaaattaggaagactcaaagtcaaggccatttaaatgtgatgtggtgtttgggatctggagaaacaacaaaaccaagaaattctggatcaactggaagaagaaaagaaagcaagcaactgaaagcagggagccaaagggagtggttacaggttcaaattcagaccatagggatcctcatgtccgagaaggcagagttatggacagctctgtattacactcagcatgctgccaggcagtttgaaggagagtcaaaggatctggccagctgcctgcagtattcctggcgcgtgcaagacaatgagggcttgagtctcctgaaccgagagcaggaggagaggctgctggagctagagcagaaggctgagctctgggaggagcaggtggaggtgcacaggcaaaccctggagaccatgcagaatgacctcaccaccatcagtcatgcagtcttccagaatggtgagctcaaagagcagctggccaagttgcagactggcttcatgaagctgaacaatgagaacatggagatcaccagcacaccacagtcggagcagcacatcaagaaagagccgagcgagaagctgggagatggactggacagtgaggaggaggcgcttccgctcatgccaagcatcccggaggaactggagagtcgggaggccatggtggcatttttaaactcagctgtggccagtgccgaggaggagcaggcatggccacgtgggcagctgaaggagcaaaggggggccatggagaagctgcagagccactttatggagctcatgcaggagaaggtggacctgaaggagcagatggaaaaactggaacgtcgctgcatccagctgtctggagagacagacgtcatcatacatcacactgtaccagagctagaggtcagtgctgaagacgtggcaccagaaggaatacatcagcagcctggcccaggacaaggaggagatgaaggtgaagctgctggagctgctggagctgcaggagctgcaggagctggaggcattccagaagaaggcattgttattataggaaatgacagctccacccatgttatggagcctgaagaccttccagtggggcaagatgtggatgtggaagacagtgatattgatgatcctgaccctgtagttattcgaacaactggatacttgctgtttattctgcacattaatgcctgtgtttattactgggcttcaaactatgaaggaattggcactactagatgggtgtatgatggggaaggaaacgagtaa

SEQ ID NO: 11961 - DNA, 411 bp, Homo sapiens
  SIMILAR (1)..(111): 781254mologous to Homo sapiens PRO1546,accession number AF116638,Smith-Waterman Score=151.
atggaatactatgcagccataaaaaaggatgagctcatgtcctttgcagggacatgggtgaagctggaaaccatcattctcagcaaactatcacatggacagaaaaccaaacaccgcatgttctcactcatagacacagtggtagtgggcagtgatgatttcccattgttgcgagtccctggctgctgtgctagctcccttaatgccgcccatacctctgtaaacattaaacttgagcttactccggtaaggaaaacactgcgcatgcgggaagcccaccctacgcgaagaatcatgggaaagaggcaagcccatgaagtcctagcaacaagtcgaattctttcttctgagcaggcaaaggctgaatttgctccagacacctatggatttgccgtcggtaaatcagggtaa

SEQ ID NO: 11962 - DNA, 423 bp, Homo sapiens
  SIMILAR (1)..(132): 781254mologous to Homo sapiens PRO1546,accession number AF116638,Smith-Waterman Score=182.
atggaatactatgcagccatgaaaaatgatgagttcatgtcctttgtagggacatggatgaagctggaaaccatcattctcagcaaactatcccaaggacaaaaaccaaacaccgcatgttctcactcgtggatggatccacagcgaagggggaagcggcagtcactatctatcagtgaggcaggagccaaccagttcccgaagagtgttttccgcttctttgggctgggagacagcaaggttggtagtaaatggtctgcgacatgtgcttgtgagcctatccacacgagtgagtactgtggcgatcgcgtgatatgcaagacgacttcgtcgttgcgcggcgcgagttttgcttggtgctcgagtggcaatggggagcgttctcgcatggcctatatcatcatgatagtggcgtcagtgtga

SEQ ID NO: 11963 - DNA, 507 bp, Homo sapiens
  SIMILAR (121)..(276): 961254mologous to Homo sapiens bK415G2.1 (synapsin III),accession number Z83846,Smith-Waterman Score=245.
atggaatactatgcagccataaaaaaggatgagttcgtgtcctttgtagggacatcgatgaagctggaaaccatcattctcagcaaactatcacaaggacagaaaaccaaacaccgcatgttctcactcataggatccagcctttttagctccctctccagtgccatgaagcaggcccctcaggccacctcaggactgatggagcctccaggtccctccacgcccattgttcaaagacccaggatcctgttggtgatcgatgatgcccatacagactgcccttctcaggaagacagacgtttctctgtcttcccattcctggtccagggccttccagtagaatcaggttttgttgtggacagacacacacatccagatcctgctgcactcatctttgcagccctggcaaagactaggtaccaaacattggatggatgggtggacggtgacctcaggaaggtgacccctgaccttcagactgagttggctgctttttctgtgggctga

SEQ ID NO: 11964 - DNA, 529 bp, Homo sapiens
  SIMILAR (99)..(269): 821254mologous to Homo sapiens Human secreted protein, SEQ ID NO: 6834,accession number G02753,Smith-Waterman Score=248.
aacgttttctgaatttaaagactgtacaactcaacactaaaacaaaaaccaatcacctaagcagaaagccaaatttgtcaaaatgtcaacaattgttaaatatggacaatggaccaacaacgacagactggattaagaaaatgtggcacatatacaccatggaatactatgcagccataaaaaatgatgagttcatgtcctttgtagggacatggatgaaactggtaaccatcattctcagcaaactatcgcaaggacaaaaaaccaaacaccgcatgttctcactcacagaaatacaaaaaaccctcagagactattatgaacacctctatgcacacaaactagaaaacctagaaaaactagaaatggacaaattcttggaaacatgcaacctcccaagattgacccaggaagaaattgaatccctgaacagatcaataacaagttctgaaactgaatcagtaataaaaagcctaccaaccagaaaaggcccaggaccaggtggattcacagccaaattctaccagag

SEQ ID NO: 11965 - DNA, 744 bp, Homo sapiens
  SIMILAR (577)..(344): 861254mologous to Cloning vector pCMVLacI lac repressor,accession number U64448,Smith-Waterman Score=307.
atggggagaaaccagagaagaaatgctgaaaattccaaaaaccagaatgcctcttttcctccaaaggaacacaactccttgccagcaagtgaacaaaactgggtggagaatgagtttgacaagttgacagaagtagccttcagaaggtcggtaataacaaacttctccgagctaaagaagcatgttctaaaccattgcaaggaagctaaaaaccttgaaaaaagggacatggatgaagctggaaaccatcattctgagcaaactatcacaaggacagaaaaccaaacaccgcatgttctcactcataagtgggaattgaacaaggagaacacatggcacatgaaggggggcataacacaccggggactgatggtcgggaaacctgtcgtgccagctgcattaatgaatcggccaacgcgcggggagaggcggtttgcgtattgggcgccagggtggtttttcttttcaccagtgagacgggcaacagctgattgcccttcaccgcctggccctgagagagttgcaccaagcggtccacgctggtttgccccagcaggcgacaatcctgttcggaggtgggttcctaattcggcaaacgcccttattaatgaaaagaatagccccaagatagggtttgaatggttgttccaggtcgggaacaagagtcccctattacggaaacggggaactccaacgtgcgaagggcggaaaacccgcttttcaggccaagggcccactacgtga

SEQ ID NO: 11966 - DNA, 663 bp, Homo sapiens; identical to SEQ ID NO: 6318
  SIMILAR (883)..(3225): 911254mologous to Homo sapiens putative p150,accession number U93572,Smith-Waterman Score=3638.

SEQ ID NO: 11967 - DNA, 582 bp, Homo sapiens
  SIMILAR (308)..(147): 351254mologous to Homo sapiens Human secreted protein, SEQ ID NO: 4690,accession number G00609,Smith-Waterman Score=62.
atggaatactatgcagccataaaaatggatgagttcatgtcctttgtaggaacatggatgaagctggaaaccatcattctgagcaaactatcgccaggacagaaaatcaaacaccgcatgttctcactcataggtgcccctgtagacaatggccctcgtgtctgccgattcccgcattgcagaacttctcacagagctccatcagctgatcaaacaaacccagcacgtccccggcggagacgagcgagctacggcacgctcgtagagcgtacagctacgttgctcgagcaacgtagagcagcacgttggtgggccacgggtggcgccgggccgtgcgcgacaacgccggccaccagcccgccatgtccgcgctgtgggcgcccgcgatcaggagcccgcgtggtcgaaggcttcctgcaccgcctccgggcctcgccagcctccagcagttactgcgttgcagcagccggcacttgcacctgcctactccccgagctcatgagcggttgggcgccccgagcacacccagctcgtgccgtccaatccggaggccacgggctgtcgtgggggctgaacgtttga

SEQ ID NO: 11968 - DNA, 2943 bp, Homo sapiens
  SIMILAR (496)..(1164): 741254mologous to Homo sapiens very large G-protein coupled receptor-1,accession number AF055084,Smith-Waterman Score=822.
atgaacatcgatgcaaaaatcctcaataaaatactggcaaaccgaatccagcagcacatcaaaaagcttatccaccatgatcaagtgggcttcatccctgggatgcaaggctggttcaacatacgaaaatcaataaacatagtccagcatataaacagaaccaatgacaaaaaccacatgattatctcaatagatgcagaaaaggcctttgacaaaattcaacaacgcttcatgctaaaaactctcaataaattaggtattgatgggacgtatctcaaaataataagagctatctatgacaaatccacagccaatattgtactgaatgggcaaaaactggaagcattccctttgaaaactggcacaagacagggatgccctctctcaccacttctattcaacatagtgttggaagttctggccagggcaatcaggcaggagaaggaaataaagggtattcaattacgaaaagaggaaatcaaattgtccctgtttgcagatgacatgattgtacatctagaaaaccccattgtctcagcccaaaatctccttaagctgatagacaatttcagcaaagtctcaggatacaaaatcaatgtgcaaaaatcacaagcattcttatacaccaataacagacaaacagagagccaaatcatgagtgaactcccattcacaattgcttcagagagaataaaatacctaggaatacaacttacaagggacgtgaaggacctcttcaaggagaactacaaaccactgctcaatgacataaaagaggatacaaacaaatggaagaacactccacgctcatgggtaggaagaatcaatatcatgaaaatggccatactgcccaaggtaatttatagattcaatgccatccccatcaagctaccaatgactttcttcacagaattggaaaaaactactttaaagttcatatggaaccaaaaaggagcccgcattgccaagtcaatcctaatttatagattcaatgcccaagaattggaaaaaactactttaaagttcatatggaaccaaaaaggagcccgcattgccaagtcaatcctaagccaaaagaacaaagctggaggcatcacgctacctgacttcaaactatactacaaggctacagtaatcaaaacagcatggtactggtaccaaaacagagatatagaccaatggaacagaacagagccctcagaaataatgccacatatctacaaccatctgatctttgacaaacctgacaaaaacaagaaatggggaaatgattccctatttaataaatggtgctgggaaaactggctagccatatgtagaaagctgaaactggatcccttccttataccttatacaaaaattaattcaagatggattaaagacttaaatgttagacctaaaaccataaaaaccctagaagaaaacctaggcaataccattcaggacatagccatgggcaaggactttatgtctaaaacaccaaaagcaatggcaacaaaagccaaaattgacaaatgggatctaattaatctaaagagcttctgcacagcaaaagaaaccaccatcagagtgaacaggcaacctatagaatgggagaaaatttttgcaatctactcatctgacaaagggcgaatatccagaatctacaatgaactcaaacaaatttacaagaaaaaaacaaacaaccccatcaaaaagtgggcaaaggatatgaacagacacttctcaaaagaagacatttatgcagccaaaagacacatgaaaaaatgctcatcatcactggccattagagaaatgcatatcaaaaccacaatgagacaccatctcacatcagttagaatggcgatcattaaaaagttaggaaacgactggtgctggaggggatgtggagaaataggaagacttttacactgttggtgggactgtaaactagttcaaccattgtggaagtcagtgtggcgattcctcagggatctagaactagaaacaccatttgacccagccagcccattactgggtatacacccaaaggattatagatcatgctgctataaagacacatgcacacgtatgtttactgcagcactattcacaatagcaaagacttggaaccaacccaaatgtccatcaatgatagactggattaagaaaatgtggcacatatacaccatggaatactatgcagccataaaaaaggatgagttcatgtcctttgcagggacatggataaagctggaaaccatcattctcagcaaactatcgcaaggacaaaaaaccaaacaccacatgttctcactcataggccttgcagtattaaaacatgtgctaacaccacgaataaaggcaactcacgttgcttttgattgcatgaagaattatttagatgcaatttatgatgttacggtggtttatgaagggaaagacgatggagggcagcgaagagagtcaccgaccatgacggttgactggattgttgctgacatcttggccatcaggcagaatgcgctaggacatgtgcgctacgtgctgaaagaagggttaaaatggctgccattgtatgggtgttactttgctcagcatggaggaatctatgtaaagcgcagtgccaaatttaacgagaaagagatgcgaaacaagttgcagagctacgtggacgcaggaactccatgctatagacagcccaggaataagaagctggagcctgcttctaagtccatactcacctctctgaaaggacccgcaaatgcctaccaccaccagccccatcctaatgggtcacctgtcaccatggtgactgctgcctccccaccagactgcgagctccacaggggccctaaaggaaacctggtctggctcaacgaaggcacctcccctgacctggcacaaaagctgggcaactcaccaaggcgcctgaaaattcctaaactttgcttggtcgcctga

SEQ ID NO: 11969 - DNA, 4282 bp, Homo sapiens
  SIMILAR (159)..(392): 1001254mologous to Homo sapiens Human secreted protein encoded by gene No. 118,accession number Y27684,Smith-Waterman Score=393.
atggaatactatgcagccataaaaaaggatgagttcatgtcctttgtagggacgtggatgatgctggaaaccatcattctcagcaaactatcgcaaggacgaaaacccaaacgccgcatgttgtcactcataggatcacaactcctcaccaacaagggaacaagctggatggagaatgagtttgacgaattgacagaagtaggcttcagaagaactctccaccccaaatcaacaacagaatatacattcttctcagcacctcactgtacttatttgaaaattgaccacataattgcaagtaaaacactcctcagcaaatgcaaaagaacagaaatcataacaaacggtctctcagaccacagcgtaatcaaattagaactcaagattaagaaattcactcaaaactgcacaactacatggaaactgaaaaacctgctcctgaatgactactgggtaaataacgaaattaaggcagaaataaagatgttctttgaaaccagtgagaatgaagacacaatgtaccagaacctctgggacacatttaaaccactgtgtagagggaaatttatagcactaaatgcccacaagagaaagcagagaagatctaaaatcgacatccaaacagcacaattaaaagaactagagaaggaacagcaaacaaattcaaaggctagcagaagacaagaaattactaagatcagagcagaactgaaggtgacagagacacgaaaaacccttcaaaaaatcaatgaatccaggagctggttttttgaaaggatcaacaaaattgatagactgctagcaagactaataaagaaaaaaagagagaagaatcaaatagacacaataaaaaatgataaaggggatatcaccaccgatcccacagaaatacaaactaccatcagagaatactacaaacacctctacgcaaataaactagaaaatctagaagaaatggataaattcctcaacacatacactctcccaagactaaaccaggaagaagttgaatctctgaatagaccaataacaggagctgaaattgtggcaataatcaatagtttaccaaccaaaaagagtccaggaccagatggattcacagccgaattctaccagaggtacaaggaggaactggtaccattccttctgaaactattccaatcaatagaaaaagagggaatcctccctaactcattttatgaggccagcatcattctgataccaaagccgggcagagacacaaccaaaaaagagaattttagaccaatatccttgatgaacattgatgcaaaaatcctcaataaaatactggcaaaccgaatccagcagcacatcaaaaagcttatccaccatgatcaagtgggcttcatccctgggatgcaaggctggttcaatatacgcaaatcaataaatgtaatccagcatataaacagagccaaagacaaaaaccacatgattatctcaatagatgcagaaaaagcctttgacaaaattcaacaactcttcatgctaaaaactctcaataaattaggtattgatgggacgtatttcaaaataataagagctatctatgacaaacccacagccaatatcatactgaatgggcaaaaactagaagcattccctttgaaaactggcacaagacagggatgccctctctcaccgctcctattcaacatagtgttggaagttctggccagggcaatcaggcaggagaaggaaataaagggtattcaattaggaaaagaggaagtcaaattgtccctgtttgcagacgacatgattgtttatctagaaaaccccatcgtctcagcccaaaatctccttaagctgataagcaacttcagcaaagtctcaggatacaaaatcaatgtacaaaaatcacaagcattcttatacaccaataacacagacaaacaagagagccaaatcatgagtgaactcccattcacaactgcttcaaagagaataaaatacctaggaatccaacttacaagggatgtgaaggacctcttcaaggagaactacaaaccactgctcaatgaaataaaagaggatacaaacaaatggaagaacgttccatgttcatgggtaggaggaagaatcaatctcgtgaaaatggccatactgcccaaggtaatttacagattcaatgccatccccatcaagctaccaatgactttcttcacagaattggaaaaaactactttaaagttcatatggaaccaaaagagagccctcattgccaagtcatccctaagccaaaagaacaaaactggaggcatcacgctacctgacttcaaactatactacaaggctacagtaaccaaaacatcatggtactggtaccaaaacagagatatagatcaatggaacagaacagagccctcagaaataatgccacatatctacaactatctgatctttgacaaacctgacaaaaacaagcaatggggaaaggattccctatttaataaatggtgctgggaaaactggctagccatatgtagaaagctaaaactggatcccttccttacgccttatacaaaaattgattcaagatggattaaagacttacatgttagacctaaaaccataaaaaccctagaagaaaacctaggcaataccattcaggacataggcatgggcaaggacttcatgtctaaaacacaaaaagcaatggcaacaaaagccaaaattgacaaatgggatctaattaaactaaagagcttccgcacagcaaaagaaactaccatcagagtgaacaggcaacctacaacatgggagaaaatttttgcaatctactcatctgacaaagggctaatatccagagtctacaatgaactcaaacaaatttacaagaaaaaaacaaacaaccccatcaaaaagtgggcaaaggatatgaacagacacttctccaaagaagacatttatgcagccaaaaaacacatgaaaaaatgctcatcatcactggccatcagagaaatgcaaatcaaaaccacaatgagatactatctcacaccagttagaatggcgatcattaaaaagtcaagaaacaacagatgccggaggggatgtggagaaataggaacacttttacactgttggtgggactgtaaactagttcaaccattgtggaagacagtgtggcgattcctcaaggatctagaactagaaaaaccatttgacccagccatcccaatactgggtatatacccaaaggattataaatcatgctgctataaagacacatgcacatgtatgtttactgaggcactattcacaacagcaaagacttggaaccaacccaaatgtccaaaaatgatagactggattaagaaaatgtggcacatatacaccatggaatactctgcagccataaaaaaggatgagttcacgtcctttgtagggacatggatgaagctggaaaaccatcattctcagcaaactatcacaaggacaaaaaaccaaacaccgcatgttctcactcatagtattggaagttctggccagggcaatcaggcaagagaaagaaataaagggtattcaattaggaaaagaggaagtcaaattgtccctgtttgcagatgacatgattgtatatttagaaaaccccatcatgtcagccccaaatctccttaagctgataagcaacttcagcaaagtctcaggatacaaaatcaacgtgcaaaaatcacaagcattcctatataccaatatcagacaaatagagagccaaatcatgagtgaactcccattcacaattgctacaaagagaataaaatacctaggaatccaactttcaaggaatgtgaaagagctcttcaaggagaactacaaaccactgctcaaggaaataaaagaggacacaaacgattggaagaacattccatgctcatggataggaagagtcaacattgtgaaaatggccatgctgcccaaagtaatttatagattcagtgctatccccatcaagttaccaatgactttcttcacagaattggaaaaaactactttaaagttcatatggaaccaaaaaagagcctgcattgccaagacaatcctaagcaaaaagaacaaagctggaggcatcacgctacctgacttcaaactatactgcaaggctacagtaaccaaaacagcatggtactgggtaccaaaacagatatatagaccaatggaacagaacagagacctcagaaataataccacacatctacaaccatctgatctttcacaaacccgacaaaaacaagcaacgaggaaaggattccctatttaa

SEQ ID NO: 11970 - DNA, 648 bp, Homo sapiens
  SIMILAR (352)..(645): 861254mologous to Homo sapiens capping protein alpha subunit isoform 1,accession number U56637,Smith-Waterman Score=423.
atgaagacagaaataaaggtgttctttgaaaccaatgagaacaaagacacaacataccagaatctctgggacacatttaaagcagtgcgtagagggaaatttatagcactaaataccctcaagggaaaggaggaaagatctaaaatcaacaccctaacatcaggattaaaagatctagagaagcaagagcaaacaaattcaaaagccagcagaaggctgtacaagcatggcatccacatctgtttggcttctggtgagagcctcaggaagcttactttcatgcgcgtctgtgtgaagagaccaccaaacaggctttgtgtgagcaataaagctgtttatttcacctgggtgcaggtggctggagtgcttaagattcactattatgaatatggcaatgttcagtcggttagtcataaagatgtacaggattcactaactgtttcgaatgaagtccaaactgccaaggagtttattaaaatcatagggaatgcagaaaatgaccatcagacagcaaccagtgaaaactatcaaacaatgtcagataccacattccaggccttgcgccggcagcttccagttacccgcaggaaaatcgactggaacaagatactcatctaccagattggcaaagaaatgcagaatgcttaa

SEQ ID NO: 11971 - DNA, 395 bp, Homo sapiens
  SIMILAR (35)..(328): 811254mologous to Homo sapiens rig-analog protein (putative); putative,accession number J02984,Smith-Waterman Score=411.
  misc_feature (1)...(395): n = a,t,c or g
acctcgaccagctgctggacatgtcctacgagcactgatgcagctgtacagttgcgcccagcggcggcggctgaacccggggctgcggcggaagcagcactccctgctgaaagcgcctgcgcaaggccaagaaggagcgccgcccatggagaagccggaagtggtgaagacgcacctgcgggacatgatcatcctacccgagatggtgggcagcatggtgggcgtctacaacggcaagaccttcaaccagcccgagatgatcggccactacctgggcgagttctccatcacctacaagcccgtaaagcatgncggcccggcatcggggccacccactcctcccgcttcatccctctcaagtaatggctcagctaataaaggcgcacatgactcca

SEQ ID NO: 11972 - DNA, 522 bp, Homo sapiens
  SIMILAR (2182)..(4029): 1001254mologous to Homo sapiens pemphigus vulgaris antigen,accession number M76482,Smith-Waterman Score=3213.
atggcagaagtagagcagaagaagcagaccttccgcaggttcacctaccgtggcgtggacctggaccagctgctggacatgtcctacaagcggctgatgccgctgtacagtgcgcgccagcagcggcggctgaaccggggcctgcggcggaagcagcactccctgctgaagtgcctgcgcaaggccaagaaggaggcgctgcccatggagaagccggaagtggtgaagacgcacctgcgtgacgtgatcatcctgcccgagatggtgggcagcatggtgggcgtctacaacggcaagaccttcaaccagcacttcagggagcatctggacaaacttttcgccaaaggaattggaatgttggatatagctctgaatgaggccttcaacattctgagtgataagtgtggaggaggctacccaagaagaactgtgactatggagggaaggacctgtcctgtggaagttggaactatggaggagacacagtcacggccagaaaatgcctatcccctgagagcgtag

SEQ ID NO: 11973 - DNA, 646 bp, Homo sapiens
  SIMILAR (619)..(485): 1001254mologous to Homo sapiens Protein cognate of protein kinase C-theta (clone 3-1 product),accession number W15776,Smith- Waterman Score=232.
  misc_feature (1)...(646): n = a,t,c or g
cccccccccccgctcttctgaggatccggcaaagatggcagaagtagagcacgaagaaggaagcggacccttccgcaagttcaccttaccggcggccgtggacctcggaccagcatgctggacattgtccctacgaagcagctngatgcagctgtacaagttgccgcccagcggcggcggcttgaacccgggggcctgcggcggaagcagccactcccctgcttgaaagcgcctgcgcaaggccaagaagggaggccccgccccatggagaaagccggaagtggtgaagacgccaccctgcgggactatgatcattcctaccccgagatggtgggcaagcatggtgggcggtctacaacggcaaagaccttcaaaccaggtgggagatcaaggtgtgtgcggccgtccctgccggctggggtgggctggggtcgcctgatgcaggcgggatcagctgacacccagctttgctcttggtctcccgcagcccgagatgatcggccactacctgggcgagttctccatcacctacaagcccgtaaagcatggccggcccggcatcggggccacccactcctcccgcttcatccctctcaagtaatggctcagctaataaaggcgcacatgactccaaaaaaaaaaaaaa

SEQ ID NO: 11974 - DNA, 337 bp, Homo sapiens
  SIMILAR (161)..(199): 611254mologous to Homo sapiens Human secreted protein encoded by gene 11,accession number Y36234,Smith-Waterman Score=35.
  misc_feature (1)...(337): n = a,t,c or g
gagatagagaacagcgtcttaccccagaaggttcccttgggatcatctcctcatttgcccctgtcagcagttactgatttgctttctgtcactatggattagacttgtctttactaaagtttcatgtacgtgaaatcataacaacatgttctcttgtgtttggcttctcttgctcagcatgatatttttacggttcacccatattgcatgtatcaggaatataannnnnnnnnnnnnnnnnnnnnnnnnnnnnnnnnnnnnnnnnnnnnnnnnnnnnnnnnnnnnnnnnnnnnnnnnnnnnnnnnnnnnnnnnacattgcgccgttacctatagacc

SEQ ID NO: 11975 - DNA, 358 bp, Homo sapiens
  SIMILAR (309)..(64): 331254mologous to Rattus norvegicus ORF4,accession number X53581,Smith-Waterman Score=108.
  misc_feature (1)...(358): n = a,t,c or g
ctttctgtcactatggattagacttgtntttactaaagtttcatgtacgtgaaatcataacaacatgttctcttgtgtttggcttctcttgctcagcatgatattttnacggttcacccatattgcatgtatcaggaatataatccttttnattattgagtagtgttctattgtatgtatataccacagtttatttctcccntcatcctttgctagattttggggtttttcacattgcgctattcagtataaaccngctctcaacattcatgtgcaagctttgagtggcatatattgcgttnccttgggggatnacctngttgggcacgnggctaacctaaaaaatttaacactgtgg

SEQ ID NO: 11976 - DNA, 2582 bp, Homo sapiens
  SIMILAR (691)..(1269): 1001254mologous to Escherichia coli K12 putative synthetase,accession number AE000181,Smith-Waterman Score=1014.
gcctactactactactatacggctgcgagaagacgacagaagggagaaataaactgtggtatatacatacaatagaacactactcaataataaaaaggattatattcctgatacatgcaatatgggtgaaccgtaaaaatatcatgctgagcaagagaagccaaacacaagagaacatgttgttatgatttcacgtacatgaaactttggtaaagacaagtctaatccatagtgacagaaagcaaatcagtaactgctgacaggggcaaatgaggatgatgatctcaagggaaccttctggggtaagacgctgttctgtatctcgatcgtattggtggtcacacaagtgaagacatgttagaactcatcaaacccttacaccttagaatggtgtaatataaacctcaataaagcaaaatttaaaaaaaaaaaaccacctttaattttctcttacaaaaaaaaaaaaaaaaggaaaaccacttaacttttaattttcctccaacaactgattctggtacatagtataccttactgcctgcatccacggcctcacatcatgctgtttacatgaacgtaaagcttcaccgaagagtggaataagacagtcctctgtttaaagtctgttagaaactgtgttctccaaagcaggtgagcaatacagctgcaaggtacttagaactggcaaagactgtgaaactgttaaagtagaaagtctcagaggtccaacagcgatgcgggatgtttgcttcaagtactttaccacattttcagttatagactgccacttctgatcttgttctatcgggttttaaagcagttgccaaacaaacagaacttcttaacaattgaacttcaatggatttctgaagttccctcggatccggacttaacatgttaggaagcagttttttcatgtctattttttcttttgatcctccagcaagtagattgatattttcgtcctggtaacaattctaattgctcgggtacattcaacaaattttccagactcaaagctgccttaatggattttatatagttgaagtcagctttcaggttgagggaagtgctactggtactctttttcaagtcatggatagcgttctgccatttcctgcacagcagcccaatcggcagttgagatgtagcactcacatgctttgtttcctaaataatttataaccctcagggggaagagtcaagtcgggtttgggacagcacactttttctgggattcacccattccagacaatgtttccaggctgggcactccttacaccccagcactgggctaagggtgagcacccgatttgtcaaagctgggagatgcagccaatcaacacctgtcatggggcacacagggtgttccctggtactccacagaggccttttcaaacctcccttcagcctgttgagccactgagttaatccacagaagatgttttccaacaatagatgatgaccagacagcaattccctgtatagcttcaggacaatgaagttcacatagtgcttctaccaccatcataatgcttacttccaattcattcccctgagataggctggttgttttcatctctgtaagcaagtcaaagccatgtctcactgtcactgcaggctggcctgccaacaatcctaccctcatgatggagagtcgaatccgcgttagccagtcctgacaagtttggcgattggtatacaaaaaagtttttaatagccttgaggagggtaaagttaagccatatagcccatcgcctcgtgagcatttagcattaattttctccagattttccagatactgcagaagagaagcaagtctaagttgggtggttaccatggccttcatcactgtctgcagttgtccactgactaacatcctgatcagggtttaatgtgtgacctgcgagacttcgaatgataccttcaattgtctggaaggtgtcttgagctctgcccagtggggttctcagcttagaaagaacagtgaattgtgcagcttcccatatggcccactgccaaaggatagcatctgtcttcaggagattgcgtggaattgttgactggtcacgcttatccagtctctggcagctatagaacagtctttccaaccaattgtccttccctgttctatgagagttcccatacaaaataaaactaataacatcagagaaatcttgggggtggaatgtattacttggtgctttactcatgtgacttcttaatgctaaagaaatttcttgaatttctgtgtgattgttatcgcttaggaaaacacctaaaggaattgatttcaacagttttccaaatgcttgtcgaatacaagttccacggtgcactagttggacacggcaaacatcaacacatctctgtaaaagatcatctggcaaggaagaggatagagcatgtagactgctgcatgcctgcagacagatattcacatcttcaacgagagtgtcggctaaaaggcctttgcaaaatttatggaaagacggaagacagaataaaggtgcatatgtttcggacttcttcattacaacagctacttccaaagcccaagtcattaacagtttcctcgtgtcctg

SEQ ID NO: 11977 - DNA, 689 bp, Homo sapiens
  SIMILAR (1)..(261): 241254mologous to Human immunodeficiency virus type 1 gag protein,accession number U73088,Smith-Waterman Score=84.
cccacgcgtccgatcagaaagagataattattgagccttttcaggctgtggatgaagtggaacgggtacctgaggactattatacaggaccagtatatttaacagaggtaacaacccttcagcagcgtctgttacagcctgacttccagccagtctgtgcttcacagctctatcctcgccacaaacatcttctgatcaaacggtccctgcgctgccgtaaatgtgaacataatttgagcaagccagaatttaacccaacgtcaatcaaattcaaaatccagctggtcgctgtcaattatattccagaagtgagaatcatgtcaattcccaaccttcgctacatgaaggagagccaggtcctcctgactcttacaaatccagttgagaacctcacccatgtgactctcttggagtgtgaggagggggaccctgatgatatcaacagcactgctaaggtggtggtgcctcccaaagagctcgttttagctggcaaggatgcagcagcagagtacgatgagttggcagaacctcaagactttcaggacgatcctgacattatagccttcagaaaggccaacaaagtgggtattttcatcaaagttacaccacagcgtgaggagggtgaagtgaccgtttgcttcaagatgaagcatgatttttaaaaacctgggcagcccccatttcgcccc

SEQ ID NO: 11978 - DNA, 885 bp, Homo sapiens
  SIMILAR (452)..(691): 451254mologous to Halobacterium sp. NRC-1 Vng1823c,accession number AE005084,Smith-Waterman Score=186.
atggagagtcgggtcctcctgactctgacaaatccagttgagaacctcacccatgtgactctcttcgagtgtgaggagggggtccctgatgatatcaacagcactgctaaggaagtccaccccgccctccacatctggatggaatttaccccccaaggcaactcaattaccagtgatctgatcaggacggttcatgtgtcagagggggccctggtgaaggttgctctgccagagatgaaggttcctgggccagtgatctacccctcccacagcccagggtaccttcttgaggtccctgggtcccagaatgggtctgcctgctccagacagagcgcgagtgaggagcaggcgggcaggcggcgggcagccgggcagccgtggacagaggcccgggcacagccagttgctgtgccagagggtgtggtgtccggctacagcgaagggaggcctaccccctgcgccttccagatccctgatggaagctacaggtgtctggctctggaagccgaggagagcagcggtgaggagggcctgcagggagaggtggggcctaccgacctggaagaggatgagggggtcagcaggagtggggacgactctgcctgcagagtcacccaggggacaccgcagctgcccaaagccctgggcatccaaccacccagctgctccagagaggaacaaggggcgtcccagcacgacgacagggccagccaggactgggatgtagtgaaggccgggcagatgatgacagccagccccagccctggccctgggcccagagtggcccagaaaccagagcagggcgggacagggaagcccacgctgaatcacctccacagccagcccatggaaacgctgaagtgggtccagatggggaggacgtga

SEQ ID NO: 11979 - DNA, 404 bp, Homo sapiens; identical to SEQ ID NO: 6305
  SIMILAR (200)..(313): 841254mologous to Homo sapiens PRO1546,accession number AF116638,Smith-Waterman Score=180.
  misc_feature (1)...(404): n = a,t,c or g

SEQ ID NO: 11980 - DNA, 398 bp, Homo sapiens; identical to SEQ ID NO: 6100
  SIMILAR (3)..(197): 861254mologous to multiple sclerosis associated retrovirus element gag polyprotein,accession number AF123881,Smith-Waterman Score=299.

SEQ ID NO: 11981 - DNA, 286 bp, Homo sapiens
  SIMILAR (433)..(837): 1001254mologous to Homo sapiens MLL2 protein,accession number AF186605,Smith-Waterman Score=729.
ggccttagaactgatgaccaagtactttaacaactggaactgggtctatgacaacgtaataaatcacgatgaaagtgaattgaacttgaagcatattaaaatagacctagataaattctcagataaccctgatggctatattgatgttttacaagggttaggacaatcctttgatctgacatggagagatataatgttactgctagatcagacactaaccccaagtgagagaagtgccgccataactgcagctcgagagtttggcaatctctggtatctcagtcag

SEQ ID NO: 11982 - DNA, 482 bp, Homo sapiens
  SIMILAR (200)..(78): 851254mologous to Homo sapiens PRO1546,accession number AF116638,Smith-Waterman Score=184.
tggtgtgtgatgttccccttcctgtgtccatgtgttctcattgttcaactcccacctatgagtgagaacatgcggtgtttggttttttgtccttgtgacagtttgctgagaatgatggtttccagcttcatccatgtccctacaaaggacatgaactcatcattttttatggctgcatagtattctgtggtgtatatgtaacatgcttgtcaatttaaaaacatgataagatgaacaccagtgaacacatcacctagagaatgaagcaaacatcaaaaattctattgcagcttcccgtgtggccctccgccatcccagctctctattccatgccagggatatcccattttgaacttcgtatttaccatgtcaatgtgctgttgacatttataggtaattttacatgtaaaactctatatatctctatgtgttgccaaacaataaatatttggccttgcttattttacagttttacaacaaaa

SEQ ID NO: 11983 - DNA, 1165 bp, Homo sapiens; identical to SEQ ID NO: 11954
  SIMILAR (2)..(430): 981254mologous to Homo sapiens MLL2 protein,accession number AF186605,Smith-Waterman Score=748.

SEQ ID NO: 11984 - DNA, 687 bp, Homo sapiens
  SIMILAR (58)..(669): 531254mologous to Homo sapiens NAG13,accession number AF194537,Smith-Waterman Score=494.
atggaatactatgcagccataaaaaatgatgagttcatgtccttcgtagggacatggatgaagctggaaaccatcattctcagcaaactactgcaaggacaaaaaaccaaacaccgcatgttctcactcataggttctattattgtcaaggtcccatcttcacttcaagctcatttacagttatcagggaaagaggttgatgtgaactcagaagtccatgttcaggaaatggctgaagctcgtaaagatgatgttgtaacagtgactgatgcagaaaaagcattagacaaaatccagcatctctttatggttaaaactctcagcaaaatcggcatacaagggacatacctcaatgtaataaaagccatctatgacaaacccacagctaacataatactgaatggggaaaagttgaaagcattccctctgagaaatgaaacaagacaaggatgccctctctcaccactcctcttcaacacagtactgaaagtcctagccagagcagtcagacaagagaaggaaataaagggtatccaaattggtaaagaggaagtcatactgtcactgtttgctgatgatgtgattgtttacctcaaaaaccctaaagactcctatagaaagctcctagaactgataaaaggattagcaaagtttccagatacaaaattaatgtacacaaatcagtag

SEQ ID NO: 11985 - DNA, 309 bp, Homo sapiens
  SIMILAR (1)..(111): 831254mologous to Homo sapiens PRO1546,accession number AF116638,Smith-Waterman Score=154.
atgaaatactatgcagccataaaaaatgatgagttcatgtcctttgtagggacacggatgaagctggaaaccatcattctcagcaaactatcgcaaggacgaaaaaccaaacaccgcatgttctcactcatagaaagggcgtccccctctgcaccacaaatccaatatctgcagggagctgccgtgacccacagtggacttgctatagatgtggctgggatttacaccattggcatccttggttctcaggcctttggacttggactgaattacagcactagctttcctgggtctccagcttgcagatag

SEQ ID NO: 11986 - DNA, 873 bp, Homo sapiens
  SIMILAR (322)..(1122): 711254mologous to Homo sapiens TGF-beta type II receptor,accession number M85079,Smith-Waterman Score=887.
atggaatactatgcagccataaaaaaggatgaattcatgtcctttgtagggacatggatgaagctggaaaccatcattctcagcaaaatatcgcaagaacaaaaaaccaaacaccgcatgttctcactcatagaccaggggtccccaacccctgggccacggacctgtgtcagtccatggcccgttagggactgggctgcacagcaggagatgagtggtgggtatggtataagaaacagtttacttattgccccgatgcctacagcttccactgctcagatcctggggaataatgagtccattgaaccttacaccagcaacatctatactcgcagagtcttgtcaggagaatttcagcgcctgaattctgctattatctatgaccgagatttctcttacaattacttcggctttaagaatggccagcagtcccagcagctgggaggtcatcaggtcagaaaagcagagtgggtggcagatggcaaagtaaccagtccagggccagggccagaggaagttgtagtccaggaggagggtgaagtagataaagaacacctaggccaggcggccatgcagcgatatggggttagcataatatacaaagccctccagcattttaggcatcacggctgtggcagcacgaatattgacagccaggagcacagtgatgagcatacacgtaggctgatgcagattttgccgggcaaccactgtgtggatgaccagggcattggcagagatgatggtcacaaagaggaagacaagaggcaggaccagaaggggccaccactctcgaagtccagggaaacccaccaggaagaacttggtgcaggagatgttgaaggtgcttgtatttccatcctcacccattag

SEQ ID NO: 11987 - DNA, 939 bp, Homo sapiens
  SIMILAR (939)..(829): 861254mologous to Homo sapiens PRO1546,accession number AF116638,Smith-Waterman Score=165.
ctagccaaaggctggcttctcaagccgctggatgaatggggagcctggagatgttgaacaagtcacgtacgtctctgattgcctcgatttccccattttggccgatggcatcgctaaagcatttgatgattccaccgtcaagtgtgagagctgagcagttgctctctgatgtctcaccgagccatccaccatcccagcgaagaaagggccaccaccaccaacaacaatcggagcctggcagttggtgagggtgggtgggggcgaacagatggtgccacaagatgtcctcgggcggctcactggggaccgagccttgtggctcctgccttgcgtgctcagcttggactgtaacagtacaagcccagtgacagctggtgcctggaaaccatcttgctgctgtttcctgtgagtggagaggatcttcttctcaattgcaaaatgaagatcaacagcactgatcttgcttggttccagggatgcttggttccagggatgagatggttgtgattttatagctaaatatgagccgggtgcgttgatggagccatttttgacatatttcaattgcactgattgcctgacatcattgaagtcacccacgtttccccagcacaggccacacactcgggtagattcagttattttcacaaggacagcctccccagccctgcagaagtcattgtctttttctgggcagcccctgtggatggattcagcaatcccacatttgggggtgcaggagaccccgaaatgtgggctgtctttggaaagagtagaacactccgcgtggggctggcgggctgctgctatgagtgagaacatgtggtgcttggttttttgtccttgtgatagtttgctgagaatgatggtttccagcttcatccatgtccctacaaagggcatgaactcatccttttttatggctgcatagtattccat

SEQ ID NO: 11988 - DNA, 2244 bp, Homo sapiens
  SIMILAR (2115)..(1597): 991254mologous to Homo sapiens cone photoreceptor cyclic nucleotide-gated channel beta subunit,accession number AF272900,Smith-Waterman Score=917.
ttactcgtttccttccccatcatacacccatctagtagtgccaattccttcatagtttgaagcccagtaataaacacaggcattaatgtgcagaataaacagcaagtatccagttgttcgaataactacagggtcaggatcatcaatatcactgtcttccacatccacatcttgccccactggaaggtcttcaggctccataacatgggtggagctgtcatttcctataataacaatgccttcttctggaatgcctccagctcctgcagctcctgcagctccagcagctccagcagcttcaccttcatctcctccttgtcctgggccaggctgctgatgtattccttctggtgccacgtcttcagcactgacctctagctctggtacagtgtgatgtatgatgacgtctgtctctccagacagctggatgcagcgacgttccagtttttccatctgctccttcaggtccaccttctcctgcatgagctccataaagtggctctgcagcttctccatggcccccctttgctccttcagctgcccacgtggccatgcctgctcctcctcggcactggccacagctgagtttaaaaatgccaccatggcctcccgactctccagttcctccgggatgcttggcatgagcggaagcgcctcctcctcactgtccagtccatctcccagcttctcgctcggctctttcttgatgtgctgctccgactgtggtgtgctggtgatctccatgttctcattgttcagcttcatgaagccagtctgcaacttggccagctgctctttgagctcaccattctggaagactgcatgactgatggtggtgaggtcattctgcatggtctccagggtttgcctgtgcacctccacctgctcctcccagagctcagccttctgctctagctccagcagcctctcctcctgctctcggttcaggagactcaagccctcattgtcttgcacgcgccaggaatactgcaggcagctggccagatcctttgactctccttcaaactgcctggcagcatgctgagtgtaatacagagctgtccataactctgccttctcggacatgaggatccctatggtctgaatttgaacctgtaaccactccctttggctccctgctttcagttgcttgctttcttttcttcttccagttgatccagaatttcttggttttgttgtttctccagatcccaaacaccacatcacatttaaatggccttgactttgagtcttcctaattttctctaatgttgccaaattttctttttcaattccttcatcctccaactttttcccactaataagttcttctttcttcatcttacagtgatttaagtattttatatctccagccatctcttcttcctcttcttctgaagtcacttctattttcccattctgacccatgggtagtggttgatctagcatctcaaacatccaggtgcacttcaattgctgacgaaggtaattgttgttctcagtatcttctggacgttccagaactgatgtcagatttgggtcatcacagtccacaaaccatattggtgaaaaagatggataggattcttggaatcttattatgtctcctcctcttacaaactggagtctgggctggataaatagcatatcataaaggtagatgatatcacatatgatgtccgcaataagccagtagtgtatgttgtctgcggtttgatatgggaagacgaggcgcagtggtataaaacagcagttccagttataggcaagagtgacaagcaagagccacaggagatagagtcgatctgtgtatgaatctatgctgtttggaagtttaattcgctttaagtactctgttaaaggcatctttttgactttgaaccacaacagcctgtagtaatgttctgttggcttatcatcgctttcttttactggtggtacagccgtgggctttgcagtttgtgggctggcttcgggtgaggagagatctccctctaccaactttttcttgtagagggctgttctttgacgcattcttttcaccaggttgtgtagctgggcatcggcatactcatttataacaggagctgcaggcggtttgttttgtgggctgttgtgtgagaacatgcggtgtttggttttctgtccttgtgatagtttgctgagcatgatggtttccagcttcatccatgtctctacaaaggacatgaactcatccttttttatggctgcatagtattccat

SEQ ID NO: 11989 - DNA, 789 bp, Homo sapiens
  SIMILAR (249)..(4): 981254mologous to Rattus sp. glutamate receptor subunit 4c, GluR-4c {alternatively spliced product},accession number S94371,Smith-Waterman Score=401.
ctaaattttaatactttcggttccatatacgttgtaaccttctctataggttgctaaattctgggtattctgcgaggaagttgggttaaaagtctgtgcactctttgccaccttcattctcttcgcttctgccctggacttgtaacagaactctatcaaagccaccagcattgccaagcccaagccgccaaccagaatgtagaagacgcctgctacattgctcaggctcaaggcactcgtcttgtccttcctcctcctcttccccttccttttcctcttccccttccccctcctcctcttcttctgcttctgcttctcctcctcctcctccttctccttctcctgctcctccataattgtggttacaaccactgttctgttctcaatagcagctgtgtcattgccaagagttggtacatcttgaatcaagactaacttatccatatcattccagtaaccaacctttctaggtcctgtgcttttcagctcaaacacatccattgtgtaattgactctacgtccatagtggtcaaactgaacattccctgtcagcccttgaattcgaacccttgtaacagcagcactgacagacttatctttataatccttaaatctcttagccttaatcgtataggtaggaagtactccattggcatttgttgaactaaattgaaagtgtttggttttttgtccttgtgatagtttgctgagaatgatggtttccagcttcatccatgtccgtgcaaaggacacaaactcatcattttttatggctgcatagtattccat

SEQ ID NO: 11990 - DNA, 474 bp, Homo sapiens
  SIMILAR (1573)..(2901): 991254mologous to Homo sapiens TGF-betaIIR alpha,accession number D50683,Smith-Waterman Score=2357.
atgggatactatgcagccataaaaaaggatgagttcatgtcctttgtagggacatggatgaagctgaaaaccatcattctcagcaaactatcacaaggacaaaaaaccaaacactgcatgttctcactcatagcctgggctgtcctcatagagcacagcaagtgtgggccctgcagtgacatccccgcttctgccctcttatttcagccacagccacagcagacacttccgtacaagatcacctcgggcttgcagcctcccacctaccagggaagaggtctaggaacaatgagcagccctgtcacaatgaacaacaagaacactcagattgtggtctctaaacaccacatcctatcagtagaaacagggctcctgggagaaatggctgattccaagcctggacctggaaatatactagatgagcatggaatatcttgcataccagacagcttcaaagctatcaaaggctactaa

SEQ ID NO: 11991 - DNA, 423 bp, Homo sapiens; identical to SEQ ID NO: 11962
  SIMILAR (1)..(132): 781254mologous to Homo sapiens PRO1546,accession number AF116638,Smith-Waterman Score=182.

SEQ ID NO: 11992 - DNA, 384 bp, Homo sapiens
  SIMILAR (229)..(339): 861254mologous to multiple sclerosis associated retrovirus element gag polyprotein,accession number AF123881,Smith-Waterman Score=175.
atgatcatcactggccttgaagactatgaaatgggtcttcgaatggaaggaacacttgagatcccaggacactaccagaaagacaaattcttagcacaaagtacaccagatttgctactgcctaagactagtctcacaaatcctttttctattaatcaaatccttgcagagagacaaatagtgacatttactgtttacccagacacagaaagagatagagagactagaaacttggctgacttgaagcaaattaaaatagacctaggtaaattctctgataaccctgatggctatattgatattttacgagggttaagacagtcctttgatctgacatgggagagatataatgttactgctaaatcagacactagctccaaatga

SEQ ID NO: 11993 - DNA, 1344 bp, Homo sapiens
  SIMILAR (3)..(941): 1001254mologous to Homo sapiens 09-AUG-1994 Human transforming growth factor beta receptor type II gene,accession number T27593_cd1,Smith-Waterman Score=1633.
ttaacagctcttgacgcgggcctgggtgatatccgatgttttcttgatgacgctggcccgggtctcccggtctggccgactgctgctggatgctggggtcatggaggaagaaagggggaggtcttgaaaagggggccaggagctgttgtaaggcaccggattgctctcctctttgatggtgacctggaggtccggtttgttggaagtgacgaaggacgccatgccgggcagcaggtaggagcctcgagtccccatgttgctgaggtactgtttgccttcaatattcctcttccgccagtgtggccgcccctcggcactctcttcatcgctgggcacactatcagtcgtttcgctttctttactgagctgcagttttctcctctgtaaaatgagggcactgccaccatctgaaaggctttttgcactctgacattctgctacactttctggaaggctcttgttcagcaagtttgatttgaatttctttctattgatcatattctcaattactttcaccaggagtaaattattttcaaatcggaatcctcttaatctcaaagcgattgtgtctttgctcttgttaagccacttgagccccgggatcgtgttggagtttatctgctcctccagccacgggcgcatgcgcatcctttccaccggcatggtgccatcttcaggctccactggtaattctagttctcttgctatctccaccacaactgtggttacttcctctgctaaggtcttgaacccctcaaagtcatttgtgagggttggaatcaacttcttccaaactcttattaatgctgcaatttttacctcccctcgtgaaccatgaatgttcttaatggcatctacaatagtgaatcctttccagaaggtttctaatttactttgcccagatccgtcaaaagaatcatgatctacattgacagtccattgttcagcatagccactttcatcaatgatcttagccagatcttctggataacttgctgaagcttctacatcagaacttgcagcttcatcttgtgctattatatcatagagatgtcttcctttcttaaacctcatgaaccaacctatgctaacttcagacttttcttctgtagcttccttatctctctcggccttcataaaattgaagagaattagggctttgctacggattaggctttggcttaagggaatgttgtggttggcctggtcttctatgagtgagaacacgcggtgtttggttttttgtccttgcgatagtttgctgacaatgatggtttccagcttcatccatgtccctacaaaggacatgaactcatcattttttatggctgcatagtactccat

SEQ ID NO: 11994 - DNA, 1356 bp, Homo sapiens
  SIMILAR (153)..(563): 941254mologous to Cloning vector pZC320 SopA,accession number U26464,Smith-Waterman Score=658.
tcatccatctggaggtccttgctgtttgtacacatttaaaaatgcgatgaagctagctatgtcttcctttggtgttgcgtgtaggtaacttttctcactcgatttccctttcaaatgggaaggttcactatgttctgtgtttgtgagcacagcttgtccactggagggcttctctgctgctacagccagtatcacaccagatgccttgagctccaagttacagtacactgcgccaccaccctcgccgccgccgtcttcatccatcttgaggccactcccgcagccggcgagccgggggccggcagcagaggggccgcgggctggggacgccgccggagggagcgcgcaggcgaccgggcggctcctcagcgcgcggcccgggtcgcggccgggcctcctcccgccgggcggggcctcgctggtcggcgtgccgtcacgtgacccatgccccgcctctgcccgcggtgggcggggcgtgaggccgcgcagccccgccctcgggaaccggccgggccggcggcgtctgcgctggggaaggctgtagacctggcccctgaagtgcaggccgatccggtgtgcgtggagcgaagcctcctcgccctcagcattccagtagccctttagcacactccagaggaaatacatactcaggtttaaagcttgaccttggctctggtaacgggacagttcatcgaacaaggggtgattcatgagaacatcctgtaccgccccctctccctctagagccactgggggcctcaaaacgtgagagcggaaccgctcgaggaatggaggcaggttttgcaagcgtctgtctccagtcatgggcaggaagtggctgttttcctgccaggcctgtgaggtcccctggagatgagctgggaagggtactcctcgtcctgcttcacaatagaacttcaacgccttcattttaaggcgattttcttccatttggaagcgcagcgtgcttttccacaatgaggttcctagaagagacagctccggagagacagtaagtagaacgatggctgccaggggctgagtatgtggcctggcagttctgtctgtcggttttctggaagcaaccaggagctgtcccagcctctgtggggcaggtacagcaagaatccacctccccgagtcaccacttggagagccttcaagtctgtggacatcctgtcccatttcaactttagtgttaacaggatgtgtcagacatgacactatgagtgagaacatgcggtgtttggttttttgtccttgcgatagtttgctgagaatgatggtttccagtttcatccatgtccctacaaaggacatgaactcatcattttttatggctgcatagtattccat

SEQ ID NO: 11995 - DNA, 507 bp, Homo sapiens; identical to SEQ ID NO: 11963

SEQ ID NO: 11996 - DNA, 663 bp, Homo sapiens
  SIMILAR (1)..(87): 861254mologous to Homo sapiens Human secreted protein sequence encoded by gene 2 SEQ ID NO:250,accession number Y91577,Smith-Waterman Score=142.
tcagtcagtggccttgttgagaaagtgacatttgagcaaagactcaaaggaggagagggagacagcactgtgggcagcagtggtaatgagatcttcaggcagtggccatgttgggagttgagcaatggatgctctcttcagggtgacgcaggctgcagctgccttgtagttcatgttactttcccagctggttctctctccggtgatggcttgcccacggcccaatggctccagtcccttctcgtgctggctggagggagaagagtcaacagcacccaagggcacagatgccatcactgggggagtgtagcagagccctgcgtcctggtgaaaagacaccacgctgcccaagaaggcttgtgcagttttcagaaaactccccgctcgcaggtcccctttcacttgttctgggaccctggccaccacacccttttgtgttcctactgcccttctgtgcgtggcgggcacccagccagcggtgcaggctgtaagcacagctgtgtagaccgcggcggagggagagccgctccctatgagtgagaacatgcggtgtttggttttttgtccttgcgatagtttgctgagaatgatggtttccagtttcatccgtgtccccacaaaggacatgaactcatccttttttatggctgcatagtattccat

SEQ ID NO: 11997 - DNA, 987 bp, Homo sapiens
  SIMILAR (1)..(237): 771254mologous to Homo sapiens Human secreted protein, SEQ ID NO: 7284,accession number G03203,Smith-Waterman Score=309.
atgctggtattgggctacaaccggaaaaatactgaaggtacacaaaagcagaaaggtactaatgcttcagactttcatttcctatcccaagtattagagcaagttgtatctccaaagggatctaaggaagctcaatgctgcgtcctcaggcatctaggctgtgaatccagtgagtctgcccctggtatccctcccaatttaggtatacagctcttgacatgggcagttatgtgggacccgttccccaccacccttgccagggccccaagtttggccttagagctgatgacccagtactttaacaactggaattgggtctacaacaacataacagatcagggtgaaagcaaaatgagtaaattaaagggaaaagagagaaggcagagagagggagagagaagagagagaaaaagggagagagagaaaagagagagagaaagtcagagaaaagaaagaaagagagagaaaaaagggaaaaagagggaaagagagaaagatagaagtgacttgaagcaaattaaaatagacctaggtaaattctcagatacccctgatggctatattgatgttttacaagggttaggacaaccctattatctgacatggagagacataatgttactgctagatcagacactaaccccaaatgagagaagtgccgccataactgcagtccgagagtttggtgatctctggtatctcagtcaggtcaatgataggaagataacagaggaaagagaacaattccccacaggccagcaggcagttcccagtgtagaccctcattgggacacagaatcagaacatggagattggtgccacagatatttgctaactgacgtgctagaaggactaaggaaaactaggaagaagcctaataaattagtcaatgatatccactataacacagggaaaggaagaaaatcctactgcctttctggagagactaagagaggcattgaggaagcatacctcactgtcacctga

SEQ ID NO: 11998 - DNA, 1379 bp, Homo sapiens
  SIMILAR (1)..(87): 791254mologous to Homo sapiens Human secreted protein sequence encoded by gene 2 SEQ ID NO:250,accession number Y91577,Smith-Waterman Score=123.
aacgttttctgaatttaaagactgtacaactcaacactaaaacaaaaaccaatcacctaagcagaaagccaaatttgtcaaaatgtcaacaattgttaaatatggacaatggaccaacaacgacagactggattaagaaaatgtggcacatatacaccatggaatactatgcagccataaaaaatgatgagttcatgtcctttgtagggacatggatgaaactggtaaccatcattctcagcaaactatcgcaaggacaaaaaaccaaacaccgcatgttctcactcacagaaatacaaaaaaccctcagagactattatgaacacctctatgcacacaaactagaaaacctagaaaaactagaaatggacaaattcttggaaacatgcaacctcccaagattgacccaggaagaaattgaatccctgaacagatcaataacaagttctgaaactgaatcagtaataaaaagcctaccaaccagaaaaggcccaggaccaggtggattcacagccaaattctatcagagcccatcccttactggcaagaatgacaaagagcctgagattttaccctacttccatgctgacttccttgtggttcctggaacgcaccaagcatcccctgtccttatggtcttggggcataagtcatttcctcataggaactctcctccaagcgtctgcatggctaacttctttactcaaaagccaccttctcaatctattcacaacgctgtgaacacccacacggatcctccactgtttctggtgctgctgaaggacagaggattgcttgtcatctggtgccatgagtcacaaggagacgaattgtggcacttggtacttctagattccaagtgctgcttcggcagcatgacacacagaatggaatggtcaggaccctcggctgcaggtctgttggagtttgctggaggtccactccagaccctgtttgcctgggtatcagcagtggaggctgcagaacagcgaatattgctgaacagcaaatgttgctgcctgatcattcctctggaagctttgtctcagaggggtatctggccgtggcagggatccccagtccccaggccctggaccactaccactctgtggcctgttaggaaccaggccacacaacaggagacctccttaatgccttgccagctggaaggaaaagagcctcttgcattgcccacaaaggaagcagagattgaggggagaagaactggagaaattaaaaaagtggaaagagacagcaacacaaataaagaggagctactgctggatttagccttcaaagtctcctcattatttgacaagttagaagaggtagtggaactactagtaattggggaactacaactctatcccagcaagtga

SEQ ID NO: 11999 - DNA, 867 bp, Homo sapiens
  SIMILAR (578)..(799): 1001254mologous to synthetic construct lac repressor,accession number A14595,Smith-Waterman Score=354.
atgaggcagattcagatgaggaagaggaagacgagtgtaaaaatcgaacttcagattctgaatgaacccagcccagctctaggactcacccctgagcacaaaggcaatgttgggcacactggtaaaggaccactagaatccagcagcccggacccttttctttgtggtcaagaaaggggaaaacaggtgcaggactgctacatcgatgggaaatgttccccccaaggcaaaaacgcccttaagatgtattctggagaattcgacccagtcagagtgtgtgtacctttttccctctcagatttgaagcaacttaaaatagacctaggtagattctcagataaccctgatggctatattgatgttttacaagggttaggacaatcctttgatctgacatggagagatataatgttactgctagatcagacactaaccccaaatgagagaaatgccaccataactgcagcccgagagtttggtgatctctggtgtctcagtcaggtcaatgataggatgacaacagagcaaagagaacgattccccacaggccagcaggcagttcccagtgtagaccctcgctgggacacagagtcagaacatggagatgggtgccacagacatttgctaacttgcatgttagaaggactaaggaaaactaagaagaagccgatgaattactcaatgatgtccactataacacagggaaaggaaaaaaatcctaatgcctttctggagagactaaggcaggcattgaggaagcatacctctctgtcacctgactctattgaaggccaactaatcttaaaggataagtgtatcactctgtcagctgcagacattagaaaaaacttcagaagtccaccttag

SEQ ID NO: 12000 - DNA, 1115 bp, Homo sapiens
  SIMILAR (1)..(261): 771254mologous to Homo sapiens pot. ORF VI,accession number X03145,Smith-Waterman Score=351.
ttttttttttcagttgcaagatttaatagagtgaaatagagtgaaaacagagctcccatacaaggggaagggacccaaagtgggtagccattgctggcttgaatgcctgagtttatatcctgatcattgtcccgccccttgtgctgtcaggcgatagatgactggctatttctttacctcctgtttttgcctaattagcattttagcaagctctctttactacctgattggtcgggtgtgagctaagttgcaagcctagtggttaaaggtaggtgtggtcacctttcccagctaggcctaggaattcttagtcagcctaggaaatccagctagtcctgtctctcagtcccctctctcaacaggaaaacccaagtgctgttggtgaggttggttgacgatcactcttaactgcttcctgctgaattggggcgtagtaggtgtcatgcagttgagatttccttgggaggggtgacttcgatgtcattaacattggagcatggactagcaggccagttcaggggtacacagtagatcttagtcatggactgcatctgggactccatttgaagaatgatttgtagttttgcagtttcaatggtggaagaggcaaaaggcttcttcctagttttcctaagtccttctagcatgcaagttagcaaatgtctgtggcaccaatctccatgttctgattctgtgtcccagtgagggtctacactgggaactgcctgctggcctgtggggaattgttctctttcctctgtcgtcatcctatcattgacctgaccgagataccagagatcgtcaaactctcgggctgcagttatggcggcacttctctcatttggggttagtgtctgatctagtagtaacattatatctctccatgtcagatcaaaggattttcctaacccttgtaaaatatcaatatagccatcagggttatctgagaatttacctaggtctattttaattcgcttcaagtctatgagcgagaacatgcggtgtttggatttttgtccttgtgatagtttgctgagaatgatggtttccagcttcatccatgtccctacaaagaccgtgaactcatcattttttatggctgcatagtattccat

SEQ ID NO: 12001 - DNA, 3052 bp, Homo sapiens
  SIMILAR (496)..(1164): 741254mologous to Homo sapiens very large G-protein coupled receptor-1,accession number AF055084,Smith-Waterman Score=822.
atgtactcacatgtgatcacggtgtgccggcatgtgaagaatggggacattctgctactgaaccgacagcccacactgcacagaccctccatccaggcccaccgtgcccgcatcctgcctgaagagaaagtgctgcggctccactatgccaactgcaaggcctataatgccgactttgatggagacgagatgaatgcccatttcccccagagtgagctgggccgggccgaggcctacgtcctggcctgcactgatcagcagtaccttgttcccaaggatggccaaccattggcgggactgatccaggatcacatggtttcaggggcaagcatgactactcggggttgctttttcacccgggagcactatatggagctggtgtaccgaggactcacggacaaagtggggcgcgtgaagctcctttctccttccatcctgaagccctttccgctgtggacaggaaaacagcatataaacagaaccaaagacaaaaaccacatgattatctcaatagatgcagaaaaggcctttgataaaattcaacaacccttcatgctaaaaactctcaataaattaggtattgatgggacgtatctcaaaataataagagctatctatgacaaacccacagccagtatcatactgaatgggcaaaaactggaagcattccctttgaaaactggcacaagacagggatgccctctctcaccactcctattcaacatagtgttggaagttctggccagggcaatcaggcaggagaaggaaataaagagcattcagttaggaaaagaggaagtcaaattgtccctgtttgcagatgacatgattgtatatctagaaaaccccactgtctcagcccaaaatctccttaagctgatgagcaacttcagcaaagtctcaggatacaaaatcaatgtgcaaaaatcacaagcattcttatacaccaataacagacaaacagagagccaaatcatgagtggactcccattcacaatcacttcaaagagaataacatacctaggaatccaacttacaagggatgtgaaggacctcttcaaggagaactacaaaccactgctcaaggaaataaaagaggatacaaacaaatggaagaacattccatgctcatgggtaggaagaatcaatatcgtgaaaatggccatactgcccaaggtaatttatagattcaacaccatccccatcaagctaccaatgactttcctcacagaattggaaaaaactactttaaagttcatatggaaccaaaaaagagcccacattgccaagtcaatcttaagccaaaagaacaaagctggaggcatcatgctacctgacttcaaactatactacaaggctacagtaaccaaaacagcatggtactggtaccaaaacagagatatagaccaatggaacagaacagagccctcagaaataatgccgcatatctataactatctgatctttgacaaacctgacaaaaacaagcaatggggaaaggattccctatttaataaatggtgctgggaaaactggctagccatatgtagaaagctgaaactggatcccttccttacaccttatacaaaaattaattcaagatggattaaagacttacatgttagacctaaaaccataaaaaccctagaagaaaacctaggcaataccattcaggacataggcatgggcaaggacttcatgtcgaaaacaccaaaagcaatggcaacaaaagccaaaattgacaaatgggatctcattaaactaaagagcttctgcacagcaaaagaaaccaccatcagagtgaacaggcaacctacagaatgggagaaaatttttgcaacctactcatctgacaaagggctaatatccagaatctacaatgaactcaaacaaatttacaagaaaaaaacaaacaaccccatcaaaaagtgggcaaaggatatgaacagacacttctcagaagaagacatttatgcagccaaaaaacacatgaaaaaatgctcatcatcactggccatcagagaaatgcaaatcaaaaccacaatgagataccatctcacaccagttagaatggtgatcattaaaaagtcaggaaacaataggtgctggagaggatgtggagaaacaggaacaacttttacactgttggtgggactgtaaactagttcaaccattgcggaagtcagtgtggcaattcctcaggaatctagaactagaaataccatttgacccagccatcccattactgggtagatacccaaaggattataaatcatgctgctataaagacacatgcacacgtatgtttattgcagcactattcacaatagcaaagacttggaaccaacccaaatgtccaacaacgatagattggattaagaaaatgtggcacatatacaccatggaatactatgcagccataaaaaaatgatgagttcgtgtcctttgtagggacatgggatggagctggaaaccatcattctcagcaaactattgcaaggacaaaaaaaccaaacaccccatgttctcactcatagacttgcaacaagcggttcacgctggtttgccccagcaggcgaaaatcctgtttgatggtggttccgaaatcggcaaaatcctgcccgctttccagtcgggaaacctgtcgtgccagctgcattaatgaatcggccaacgcgcggggagaggcggtttgcgtattgggcgccagggtggtttttcttttcaccagtgagacgggcaacagctgattgcccttcaccgcctggccctgagagagttgcagcaagcggtccacgctggtttgccccagcaggcgaaaatcctgtttgatggtggttccgaaatcggcaaaatccaggaaatccctagaggagtcaaattcataaaggcagaatgcagaatgatggctgccaggggctatgagtgagaacatgcgatgtttggttttctgtccttgtgatagtttgctgagaatgatggtttccagcttcatccatgtccctgcaaaggacatgaactcatccttttttatggctgcatagtattccat

SEQ ID NO: 12002 - DNA, 496 bp, Homo sapiens
  SIMILAR (1183)..(1524): 951254mologous to Plasmid ColIb-P9 resolvase,accession number AB021078,Smith-Waterman Score=565.
  misc_feature (1)...(496): n = a,t,c or g
gggaaagaaaaaaattttgaaaaccctttttngacccgcgctgcaggaattcggcacgagggaaaacctgaaaagactggtctcaaacgaaactttacgaacgttgcaggaaaagctagacttctggctgaaggagtacaacgtcctccaggagccggtctcccagccctgcccctcgcagccgtagctgcagccgcagcagatctgccagcccctccaccgctgtcaaggtcaggagaccgtccccaaaccgctccaagctgtccaatgtggcgcgcaaggctgccctcttgtcccggttcagcgattcctattcccaggcccgcctggacgcgcagtgcctgctgcggcgctgcatcgacaaggctgagaccgttcagcggatcatctacatcgccacagtggatgtgatccgagccatgaatgtcaatcccaagatttcattccctcctgtcgttgacttttgccttctcagtgacttcatccaggagatatg

SEQ ID NO: 12003 - DNA, 2040 bp, Homo sapiens
  SIMILAR (562)..(1122): 901254mologous to Homo sapiens MSTP016,accession number AF110322,Smith-Waterman Score=813.
tcagaagctcttcagtttaatgagatcccatttgtcaattttcacttttgttgtcattgcttttggtgtttcagacatgaagtccttgcccatgcctatgtcctggatggtattgcctaggttttcttctagggcttttatggttttaggtctaacatttatgtctttaatccatcttgacttaatttttgtataaggtgtaaggaagggatccagtttcagctttctacatatggctagccagttttcccagcaccatttattaaataggaaatccgttccccattgcttgtttttttcaggattgtcaaagatcagatagttgtagatatgcggcattatttctgagggctctgttctgttccattgatctatatctgtgttttggaaccagtaccatgctgttttggttactgtagccttgtagtgtagtttgaagtcaggtagtgtgatgcctccagctttgttcttttggcttaggattgacttggcgatgcgggctcttttttggttccatatgaactttaaagtagttttttccaattctgtgaagaaagtcattggtagcttgatggggatggcattgaatctgtaaattaccttgggcagtatggccattttcacgatattgattcttcctacccatgagcatggaatgttcttccatttgtttgtatcctcttttatttcattgagcagtggtttgtagttctccttgaagaggtccttcacatcccttgtaagttggattcctaggtattttattctctttgaagcaattgtgaatgggagttcactcatgatttggctctctgtttgtctgttgttggtgtataagaatgcttgtgatttttgtacattgattttgtatcctgagactttgctgaagttgcttatcagcttaaggagattttgggctgagacgatggggttttctagataaacaatcatgtcgtctgcaaacagggacaatttgacttcctcttttcctaattgaataccctttatttccttctcctgcctgatcgccctggccagaacttccaacactagagcatttttccggttcataaattggggggtcaaacctccaagtttacagtttccatgaggaagcgcccgtctctcaaggagaattcgttggacggcagaagctatgaattcattagacacccttcgcaaaggcgcatacgagccaaacgttggaagattcgacaaaagtccgtcctcacgcccatgccgtctcttgggaaatattgccactgcccgatgattatttatggccatggcgttccaagttgtaaacactcttgcttcattttccctgagacccactggggtctgtcccttaagaaacccagtcctttctgatttcttgtttctctctgatccttctttcagggtccttccttggagtgcacttttctcagcagacagaacagctatctcctccttcaggtttcggagctgtttcttataatcggacatggcttctgtgtcctgctggtctgcattctgcttgagtgagttccactgctcacgcttccgctcctccaagctccaaggctctgaccgcctattctctgagctcctctgatctgtgtttctgtggcgggcatcctcctgagcttgaagagatttaagctttatttcattaatttggtcttcaatcactgatatcctttcttccgcttgatcgaattgactcatgaagcttgtgtatgcttcacgcagttctcgtactgtggctttcagctccatcaggtcatttaagcttttctctacactggttatgctagttagccattcctctaatcttttttcaaggtttttagcttccttgcgatgggttagaacatgctcctttagcgcggagaagtttgttattactgatcttctgaagcctacttctgtcaactcgtcaaactcattctccatccagttttgtttccttgctggcgaggagttgtgttcctttggaggagaagaggcattctggtttttggaattttcagcctttctgctctggtttctccccat

SEQ ID NO: 12004 - DNA, 543 bp, Homo sapiens
  SIMILAR (552)..(127): 331254mologous to Cynops pyrrhogaster alpha1 type II collagen,accession number AB022046,Smith-Waterman Score=87.
tcaggacttcatccaggagatatgttgcattgcctttgcaatgcaggccttagaaccacccctagatattgcatatggagcagatggagaagtttttaatgattgcaaataccgccgcagctacgactcggatttcactgctcccttagtcctctatcacgtgtggcctgctctcatggagaatgactgtgtcattatgaagggagaagctgtcaccaggagaggggctttttggaattcggtgcgatctgtaagtcgttgtcgaagcaggagtttaagtcccatttgcccccgtagccaaattggtttaaacacgatgtctcgaagtcggagtccttctccaataagatgtggattgccaagattttaaaagcaccagacctgctcctttgacccagtgcgtggaaacagctgctttctccagtgccgccatctgtcttctgtgtctgcctcagacctcacttaagataatgtcaaaaggcaattctgtgtatcaccccacacagagagttaaatgttttggcttggcgcatttgtaaaaaa

SEQ ID NO: 12005 - DNA, 1615 bp, Homo sapiens
  SIMILAR (220)..(384): 851254mologous to Gallus gallus neuronal tetraspanin,accession number AF206661,Smith-Waterman Score=236.
cgagtccaacccagctgcgaacgacccgccattatacagccagcagccgtccgccgtggcgcaagcaccgggcgacaacaggcaacgggcagcaatcatccgcgaatggacaaatacagcggccgaaacgggggaaggcatcgtcgacgaccaacaccgcgtggccaacgtgacggcagccgtggccaccgcaacgcttaaatctcttcaagctcaggaggatgcccgccacagaaacacagatcagaggagctcagagaataggcggtcagagccttggagcttggaggagcggaagcgtgagcagtggaactcactcaagcagaatgcagaccagcaggacacagaagccatgtccgattataagaaacagctccgaaacctgaaggaggagatagctgttctgtctgctgagaaaagtgcactccaaggaaggtcctccaggagccggtctcccagccctgcccctcgcagccgtagctgcagccgcagcagatctgccagcccctccaccgctgtcaaggtcaggagaccgtccccaaaccgctccaagctgtccaatgtggcgcgcaaggctgccctcttgtcccggttcagcgattcctattcccaggcccgcctggacgcgcagtgcctgctgcggcgctgcatcgacaaggctgagaccgttcagcggatcatctacatcgccacagtggaggcattccatgtagcaaaaatggcattcagacacttcaagatccatgtgagaaaatcgttgacaccatcttatgtggggtcgaatgactttgagaatgctgtcttggattatgtcatttgtcatcttgatctatatgattctcaaagcagtgtcaatgatgtgatccgagccatgaatgtcaatcccaagatttcattccctcctgtcgttgacttttgccttctcagtgacttcatccaggagatatgttgcattgcctttgcaatgcaggccttagaaccacccctagatattgcatatggagcagatggagaagtttttaatgattgcaaataccgccgcagctacgactcggatttcactgctcccttagtcctctatcacgtgtggcctgctctcatggagaatgactgtgtcattatgaagggagaagctgtcaccaggagaggggcttttgtacggtggccttgcatagtgacaattcatcccaagtgtttgattcacaagttcgagaacatttataaacccagagattctataaaagaagtttataaagagttgataagatttcatacaaaggagagcgtgaggggaaatctgggatgtctgcatattggagatggcagaaacaaaaaacaaagatggcaagctgacaccggggcaacagctgacccgtttcttgtaagaggagccttctcgctggggctgcggttatttttatccaaatctctgctggcggctgaacggggatgttaccttgaacaccttgtcatcctgaggggaggaatgccaagcccctatgacctgaacagctctcaaaaggcaacaccacccaatgctgttgcattggagattaaatttccgaacatgaatttttggggacacattcacatcatagaaggaaatgatgggtga

SEQ ID NO: 12006 - DNA, 255 bp, Homo sapiens
  SIMILAR (13)..(162): 341254mologous to Streptomyces coelicolor A3(2) putative acyl -CoA dehydrogenase,accession number AL117385,Smith-Waterman Score= 69.
atggtggcaagcctcgtgttctctgacctggggttcttggcctcacggattccaaggaatggaatcttgggccatgcaccgtgtgggaacagtggcaagcctttagcccgactgggagctgtaatgggcgcctcgctggatcaggagcacagcagacaccttgccggatctggacggatggaagtcagcagcaggtctgcgacagcggcaaacagcagtggtggacggcgagagaaagctcagctcgaaccatga

SEQ ID NO: 12007 - DNA, 510 bp, Homo sapiens
  SIMILAR (1204)..(1485): 611254mologous to Gallus gallus neuronal tetraspanin,accession number AF206661,Smith-Waterman Score=298.
tcagatggacagccaggaaagtgggctttccacacagatgatataatacagtacttccaaaggcatgcctatgcggaagtctgatttgttggatgaactaaagtcattcagaccagaatatgcaggtgtctgtagaacggagtaacctccgtgtgcggttgtatgcctgctgtggattgctgctgtgtactgcttatccacaacattttgcgcaccgttatgtggacaaaatacctggttacccaagccgtgccggcacgttaaccgggctgcatccaatgcaagtgtgtcgctgtcgacggtgaccctgttttcccgcctttcttgaccacaaagaaaggggtccgagctgctggattctagtggtcctctaccagcatccccatcattgcctttgtgctcaggggtgagtcctagagctggcctgggttctgcatggccgaagattccattccttggaatccgtgaggccaagaaccccaggtcagagaacacgaggcttaccaccat

SEQ ID NO: 12008 - DNA, 6040 bp, Homo sapiens
  SIMILAR (2)..(67): 901254mologous to Homo sapiens Human secreted protein, SEQ ID NO: 7284,accession number G03203,Smith-Waterman Score=122.
ttttttttttttttttataaatatatgtatatattttatttacattatatacatggcatatctatacagttacatttacacttgacttagagtcaaagtcatatacacacacacaggacttggactcaaagcttttaatgacaagcatgcaaaatttcttagtatagaccctaagagtacccttaatataagtatgtttatttaaaaattctatgtatctactactgttaccagggggtccttgctcccagagctcccaagatggtggcaggccacttccaaaatggtggcaagcctcatgttctctgacctggggttcttggcctcacagattccaaggaatggaatcttgggccatgcggtgagtgttatagctctattagaagccatggatcacagaagagaaccgtggaacccagcaactagtgttcagctcaattgggacgaacccaaggacttagctgcgcaggaacaatggaccctcagctgcaggtctgttggagtttgctggaggtccactccagaccctgtttgcctgggtatcagcagtggaggctgcaaaacagcggatattggtgagcagcaaatgttgctgcctgatcgttcctctggaatttttgtctcagaggagtacccggccatttggaaatgcagaaatcacccgtcttctgtgtcactcatgctgggagctctagactggagatgttcctattcggccatcttggtaaaccgaatccagcagcatatcaaaaagcttatccgcgatgatcaagtgggcttcatccctgggatgcaaggctggttcaccatatgcaaatcaataaacgtaatccggcatataaacagaaccaaagacaaaaaccacatgattatctcaatagatgcagaaaaagcctttgacaaaattcaacaacgcttcatgctaaaaactctcaataaattagtgttggaagttctggccagggcaatctggcaggagaaggaaataaggggtattcaattaggaaaagaggaagtcaaattgtccctgtttgcagatgacatgattgtatatctagaaaaccccatcgtctcagcccaaaatcgccttaagctgataggcaaattcagcaaagtctcaggatacaaaatcaatgtgcaaaaatcacaagcattcttatacaccaataacagacaaacagagagtgaaatcatgagtgaactcccattcactattgctttaaagaggatgaaatacctaggaatccaacttacaagggatgtgaaggacctcttcaaggaaaactacgaaccactgctcaatgaaataaaagaggatacaaacaaatggaagaacattccatgctcatgggtagaaagaatcaatatcatgaaaaaggccatactgcccaaggtaatttatagattcaatgccatccccatcaagttaccaatgactttcttcacggaattggaaaaaactactttaaagttcatatggaatcaaaaaagagcccacatcaccaagtcaatcctaagccaaaagaacaaagctggaggcatcacactacctgacttcaaactacactacaaggctgcagtaaccaaaacagcatgggctggaaacaggattgttgaaatactccctgaacatctgaaagagtttcagtcccttgaaactttggaccttagcagcaacaatatttcagagctccaaactgcatttccagccctacagctcaaatatctcgaattgaaccgaaacaagattaaaaatgtagatggactgacattccaaggccttggtgctctgaagtctctgaaaatgcaaagaaatggagtaacgaaacttatggatggagctttttgggggctgagcaacatggaaattttgcagctggaccataacaacctaacagagattaccaaaggctggctttacggcttgctgatgctgcaggaacttcatctcagccaaaatgccatcaacaggatcagccctgatgcctgggagttctgccagaagctcagtgagctggacctaactttcaatcacttatcaaggttagatgattcaagcttccttggcctaagcttactaaatacactgcacattgggaacaacagagtcagctacattgctgattgtgccttccgggggctttccagtttaaagactttgatactccaaggaaatcggatccgttctattactaaaaaagccttcactggtttggatgcattggagcatctgcatttaaatacatcaagccttttgtgcgattgccagctaaaatggctcccacagtgggtggcggaaaacaactttcagagctttgtaaatgccagttgtgcccatcctcagctgctaaaaggaagaagcatttttgctgttagcccagatggctttgtgtgtgatgattttcccaaaccccagatcacggttcagccagaaacacagtcggcaataaaaggttccaatttgagtttcatctgctcagctgccagcagcagtgattccccaatgacttttgcttggaaaaaagacaatgaactactgcatgatgctgaaatggaaaattatgcacacctccgggcccaaggtggcgaggtgatggagtataccaccatccttcggctgcgcgaggtggaatttgccagtgaggggaaatatcagtgtgtcatctccaatcactttggttcatcctactctgtcaaagccaagcttacagtaaatatgcttccctcattcaccaagacccccatggatctcaccatccgagctggggccatggcacgcttggagtgtgctgctgtggggcacccagccccccagatagcctggcagaaggatgggggcacagacttcccagctgcacgggagagacgcatgcatgtgatgcccgaggatgacgtgttctttatcgtggatgtgaagatagaggacattggggtatacagctgcacagctcagaacagtgcaggaagtatttcagcaaatgcaactctgactgtcctagaaacaccatcatttttgcggccactgttggaccgaactgtaaccaagggagaaacagccgtcctacagtgcattgctggaggaagccctccccctaaactgaactggaccaaagatgatagcccattggtggtaaccgagaggcacttttttgcagcaggcaatcagcttctgattattgtggactcagatgtcagtgatgctgggaaatacacatgtgagatgtctaacacccttggcactgagagaggaaacgtgcgcctcagtgtgatccccactccaacctgcgactcccctcagatgacagccccatcgttagacgatgacggatgggccactgtgggtgtcgtgatcatagccgtggtttgctgtgtggtgggcacgtcactcgtgtgggtggtcatcatataccacacaaggcggaggaatgaagattgcagcattaccaacacagatgagaccaacttgccagcagatattcctagttatttgtcatctcagggaacgttagctgacaggcaggatgggtacgtgtcttcagaaagtggaagccaccaccagtttgtcacatcttcaggtgctggatttttcttaccacaacatgacagtagtgggacctgccatattgacaatagcagtgaagctgatgtggaagctgccacagatctgttcctttgtccgtttttgggatccacaggccctatgtatttgaagggaaatgtgtatggctcagatccttttgaaacatatcatacaggtacctttggaaaagctctcaggagacctcacctagatgcctattcaagctttggacagccatcagattgtcagccaagagccttttatttgaaagctcattcttccccagacttggactctggtggttttatgattgccttgtggtaccacgggactcttagtccagaaccagcttttgtattaaaagctagggatgatgtaggtacctgtcatagtcatagagctggccagcattggctcaagtactacctccttcaagcacttgcagaaggaaatgtggtgccggagcccccacacagagttccccctggggcaccacctactggagctgcgagaagagagctactgtcctccaatcctcagaatggtagatccactgacagcttgcgctctgtgcctgcaaaagccgcagacactcaatgccaatctgtgaaagcagccaggagggaggctgtaccctgcaaagtcacagggccggagctgcccaaggccacaggagcctatctcttgcatcagtgtgacctggatatgagacatggagtcaaaacagatcattctggagctttaagaattggaggaaaataccgagcacctgtcggccagttaaaaacgattagtgtggccaccggacttaagactcagctttcctatcaaaaacccttcattaaccctgtaacccgccgatgcattcaatctgtagcggcaactgctttgctaacagaagaaagtagaaaagaaacttttagaggaaacctcattgtgaggaaacctcattgcaagcggactttggagcctctggaaaagggaaaagctgggaaaattgaatgcctaatagggcttgcttccagtgtggtctacaaggacactttaaaaaagattgtccaagtagaaataagccaccccctcgtccatgccccttatgccaagggaatcactggaaggcccactgacccaggggatgaagctgtacctaacccttacactctgctttcccaaataccagagaaagcagagtggtttatactcctggaccttaaggatgcccttttcttcatccctgtacatcctgactctcaattcttgtttgcctttgaagatccttcaaactcaacatctcaactcacctggactgttttacccctagcgttcaggaatggcccccatctatttggccaggcatcaacccaagacttgagccagctctcatacctggacactcttgtcctttggcatgtggatgatttacttttagctgcctgttcagaaaccttgtgccatcaagccacccaagcactcttaaatttcctcactacctgtggttacaaggtttccaaaccaaaggctcaactctgctcacagcaggttaaatacttagggctaaaattacccaaaggcaccagggcccccagtgaggaatgtatccagcctatactggcttatcctcatcccaaaaccctaaagcaactaagagcgttccttggcataacaggtttctgccgaatatggattcccagcatactcactgctaaaggagacttgtggctgtcagataaccatttacttaaatatcaggttctattacttgaagggccagtgctgcaactgcgcacttgtgcaactcttaacccagccacatttcttccagacaatgaagaaaagatagaacataactgtcaacaagtaattgctcaaacctacgccactcgaggggaccttttagaggttcccttgactgatcccgacctcaacttgtatactgatggaagttcctttgtacaaaaaggacttcaaaaagcgggatatgcagtggtcagtgataatggaatacttgaaagtaatcccttcactccaggaactagcactcagctggcagaactggtagccctcacttgggcactagaattcggagaaggaaaaagggtaaatataaatacaggctctaagtatgcttacctagtcctccatgcccatgcatcaatatggagagaaagggaattcctaacttccgagggaacacctatcaaacatcaggaagccattaggagattattattggttgtacagaaacctgaagaggtggcagtcttacactgctggggtcatccgaaaggaaaggaaagggaaatagaagggaactgccaagcggatattgaagccaaaagagcctcaaggcaggaccctccattagaaatgcttatagaaagacacctagtatggggtaatcccctctgggaaaccaacccccagtactcagcagaagaaatagaatggggaacctcatga

SEQ ID NO: 12009 - DNA, 4535 bp, Homo sapiens
  SIMILAR (1)..(1920): 981254mologous to Homo sapiens epsin 3,accession number AF324241,Smith-Waterman Score=3290.
atgcagtgggaagaggctgagaaagacccttctggcagttgtgtgttccagcggcctcctgtggcccttgtcttccccctacactccaagtggacgttggtgaacagcccaccaagctcaggcgatccctacgtgccaggacgaccagcacagtcaggacagctttccctcagccctgcacctccatatgttcttcctggccccgggaaaataaagcaagcaggcaacaacccatcactgacaagcatctaccgttcagaagtcttctgtgcccaccgccacctccaccccccgcagctggtgtgtgcccgtggacacattggatcagcgcatctcagtgtggacaggggcagcctcatctgggaagtgttagaaagcacagtctgggcgcgcaccaatgagtggagtccagtgacccggacggttctcatttcagctttggcatctacacacattccacagccctgcgagtctcgtccacccgtccctccagaatatgaggtgacagtccttcggagtcaaggcactgctcagctcccgccctggtcctcttccaccagctggaggctgacagatccttcctgcccaaaacatgctgcctggctgactgaccttgcctccagcaaaggcccagcggctggtggaactggctccttctcccagccaggcaccttgacatccacaagaacaaatcctcttaagaaagaaaaaagtcccgaggacttaaagcaaattaaaatagacctaggtaaattctcagataaccctgatggctatattgatgttttacaagggttaggacaatcctttgatctgacatggagagatataatgttactgctaaatcagacactaaccccaaatgaaaaagtgccaccattactgcagcctgagagtttggcgatctctggtatctcagtcagagatcaggaggagcaggcagaacaggacaaacaggataaaaaaaaggccatcactttagtcatggccctcaggcaagtggactttggaggctctgtaaaagggaaaagctgggcaaatcgaatgcctaatagggcttacttccagtgcggtctacaaggacactttaaaaaagattgtccaagtagaaagccccaggtatgcttgaccattgagagccaagaggttaactgtctcctggacgccggtgcggccttctcagtcttactctcctgtcccggacaactgtcctccagatctgtcactatccgaggggtcctaggacagccagtcactagatacttcttccagccactaagttgtgactggggagctttacccttttcacatgctttcctaattatgcctgaaagcctcactcccttgttagagagagagattctagtaaaagcaggggccattatacacctgaacataggagaaggaacacccatttgtcgtctcctgtttgaggaaggaattagtcctgaagtctgggcaacagaaggacaatatggacaagcaaagaatgcccattttgtccaagttaaactaaaggattccacctcctttccctatcaaaggcagtaccccctcagacccgaggcccaacaaagactccaaaagattgttaaggacctaaaagcccaaggcctagtaaaaccatacagtagcccctgcaatactccaattttaggagtacagaaacccaaaagacagtggaggttagtgcaagatctcaggattatcaatgaggctgtttttcctctatacccagctatacctagcccttatactctgctttcccaaataccagaggaagcagagtggtttacagtcctggatcttaaggatgcctttttctgcatccctgtacatcctgactctcaattcttgtttgcatttgaagatccttcaaacccaacatctcaactcacctggactgttttaccccaagggttcagggatagtccccatctatttggccaggcattagcccaagacttgagccagttctcatacctggacactcctgtccttcagtgcatggatgatttacttttagctgcccgttcagaaaccttgtgccatcaagccacccaagcgctcttaaatttcctcactacctgtggctacaaggtttccaaaccaaaggctcagctctgctcacagcaggttaaatgcttagggctaaaattatccaaagtcaccagggccctcagtgaggaacgtatccagcctatactggcttatccttatcccaaaaccctaaagcaactaagagggttccttggcataacaggtttctgccgaatatggattcccaggtacggcaaaatagccagaccgttatatacgctaattaaggaaactcagaaagccaatacccatttagtaagatggacacctgaagcagaagcagctttccatgccctaaagaaggccctaatgcaagccccagtgctaagcttgctaacggggcaagacttttcctcatatgtcacaaaaaacaaacaaacaaagaaaaaaaaaaacatgaatagctctaagagtccttgcgctggtctgagggacgagtttgcaacccgtggcatacctgataaggaaattgatgtagtggcaaagggtcagcctcattgtttacgggtagtggtggcagtagcagtcttagtatctgaagcagttaaaataatacagggaagaaatcttactgtgtggacatctcatgatgtgaatggcatactcactgctaaaggagacttgtggctgtcagacaaccatttacttaaatatcaggctctattacttgaagggccaatgctgcgactgtgcacttgtgcagctcttaacctggacacatttcttccacacaatgaagaaaagatagaacataactgtcaacaagtaattgctcaaacctatgccactcgaggggaccatttagaggttcccttgactgatcccaaccctaacttgtatactgatggaagatcctttgtagaaaaaggacttcaaaaagtggggtatgcagtagtcagtgataatggaatacttgaaagtaatcccctcactccaggaactagtgctcagctggcaaaactcactcgggcactagaattaggagaaggaaaaagggtaaatatatatacagactctaagtatgcttacctagtcctccatgcccatgcagtaatatggagagaaagggaattcctaacttctgagggaacacctatcaaacatcaggaagccattagggaattattattggccgtacagaaacctaaagaggtggcagtcttacactgccggggtcatcagaaaggaaaggaaagggaaatagaaaggaaccgccaagcagatattgaagccaaaagagctgcaaggcaggaccctccattagaaatgcttatagaaggacccctagtatggggtaatcccctctgggaaaccaagccccagtattcagaagaagaaatagaatggggaatctcacgaggacatagttttctcccctcaggatggcaagccaccgaacaaggaaaaatacctttgcctgcagctaaccaatggaaattacttaaaaccactcaccaaaactttcacttatgcattgatagcacccatcagatggccaaattgttatttactggaccaggacttttcaaaactctcaagcagatagttggggcctgtgaagtgtgccaaataaataatcccctgccttatcaccaagctcctccaggagagcaaagaacaggccattactcaggagaagactggcaactagattttacccacatgcccaaatctcagggatttcagtatctactagtctgggtagatattttcactggttgggcagaggccttcccttgtaggacagaaaaggaccaagatgtaataaaggcactaattcatgaaataattcccagattcggacttccccgaggcttacagagtgacaatggccccgttttcaaggctacagtaacccagggagtatcccaggcattaggcatacaatatcacttacactgcgcctggaggccacaatcctcaggaaaagtcaagaaaatgaatgaagcactcaaacgacatttaaaaaagctaacccaagaaacccaccttgcatggcctgctctgttgcctacagccttactaagaatccaaaactctccccaaaaagcaggacttagcccatacaaaatgctgtatggatggcccttcctaaccaaggaccttgtgcttgaccgagagatggccagcttagttgcagacatcacctccttggccaaatatcaacaagttcttaaaacattacagggaacctgttcccgagaagagggaaagtaattattgcaccctggtgacatggtatttaaaatagagccccagatgcagtccatggctaagatctaccacggacccctggaccggcctgctagcccatgctctgatgttgatgacattgaaggcacggcttccgaggaaatctcaactgcacgacccctactacaccccaatttagcgggaagcaattagagcagtcattggccaacctccccaacagc

SEQ ID NO: 12010 - DNA, 992 bp, Homo sapiens
  SIMILAR (121)..(264): 931254mologous to Homo sapiens peptidylprolyl isomerase,accession number X52851,Smith-Waterman Score=227.
ctatttcactctattaaatcttgcaactgcacactcttctggtctgtgtttgttacggctcgagctgagctttcactcgctgtccacccctgctgtttgccgctgtcacagacccgccgctgtcacagacccaccgctgactgccatccctccagatctggaagggtgtccgctgtgcttctgatccagcgaggcacccattgccactcctgattgggctaaaggcttgcccttgttcctgcatggctaagggcccagggttcatcctaatcgagctgaacactagtcactgggttccacagttctcttccgtgacccatgacttctactagagctaacagagctataacactcaccgcatggcccaaggttccgttccttgtaatccgtgaggccaagaaccccaggtcagagaacaaaaggcttgccaccatcttggaagcggcccgtcgccatcttggaagcggcttgccaccatcttgggagctctgtgcacaaggacaccctggcatctaggctatcaacccacttatccctctgcaatagcaatctccaagccttggctccttggccagggccttagaactgatgacccagtactatgggtctacaacaacataatagaacaggataaaagcaaattgacaatatggagagaaagggaattcctaacttccgagggaacacctatcaaacatcaggaagcctttaggagattactactggctgtacagaaacctcaagaggtggcagtcttatgctgccagggtcatcagaaaggaaacgaaagggaaatagaagtgaactgccaagcggatattgaagccaaaagagccgcaaggcaggaccctccattagaaatgcttacagaaggacccctagaaatcatagaagaacacattgataagatgtcaaaaagatcaaagcagctgaaatatggagccaacacatggaagaaaactgtccgcagattcatccatacccatagctga

SEQ ID NO: 12011 - DNA, 550 bp, Homo sapiens
  SIMILAR (550)..(497): 551254mologous to Homo sapiens pro-alpha 1(II) collagen,accession number X02375,Smith-Waterman Score=48.
ccactgcaagaggggaagttgctactgtgatgaattctgccatgtggcaccagactgccacccagaccacagtgtcctctgcaaccctggtaactcacatacaggcccgattccaccgacagcaaagctggatgctatggctggcagaggcaaaccctttgcctgcacttcaggccaaagccgggatgtggcctagatggttcctaaggtccctgacaatcctgagatcttgcatcttgtctatttcagggcaaagcttctcacatgaccaagatggtgctgcagatggtgctgaggatggagaacccaccaagccccgctaggagccacctagactggatgcagagcatgctttacaaagggaagccccacaaaaggacacaggtggcaaatccggggacctggatgctgggtcaccgacttcatgttcttgctgacttcctggcctcggttttcttctccttaaggctgggtgaatggaatgagtttagatccctggacctccaggccctcctgtgccccggggtggccctgcttcacagggatgccc

SEQ ID NO: 12012 - DNA, 863 bp, Homo sapiens
  SIMILAR (501)..(313): 791254mologous to Homo sapiens elongation factor-1- beta,accession number X60489,Smith-Waterman Score=268.
  misc_feature (1)...(863): n = a,t,c or g
gggcagaagtcagcaaactatggtctatgggccaaatctggccactgcctgtttttgtgcaactcataggctaagaatgttttctacatttttagatggtaggagaagaacaaaagaggaagaatgttttgtcacaaaagtatatgagattcaaatttcagtgtccacagacggcaatcctggctcctacccctaaaacaatcattgcagtggagctctgccctagctacggcccctttcttcttttggttccctgactttggggcctggagggcacaaaggcaaggagcaggctgccatccaccccttctcagagaacctgcagggagctcaccatgctctgcatccagtctaggtggctcctagcggggcttggtgggttctccatcctcagcaccatctgcagcaccatcttggtcatctgagaagctgagagaaacacaaggtaaatgttccctgtccctcattttctgccctcccnaacccccactgctgctgcctcaatgtcccccagtatctctctgcagactccctgtgtgccctcaaaagtctacacggtaccagtcaagagacatccatactgcaagatgatagaaaggtaagtggaacccaaccacctcactctctaccctcatgtctaccacggacagctgaacctctccctgtggaacctggaaaagtagctcagagaggagtagcaggtggcaaggaacatcagggaaacaaagctagaaggagcatgtaggcacctttgacctgaaatagacaagatgcaagatctcaggattgtcagggaccttaggaaccatctaggccacatcccggctttggcctgaagtgcaggcaaagggtttgccacgaaa

SEQ ID NO: 12013 - DNA, 664 bp, Homo sapiens
  SIMILAR (178)..(477): 311254mologous to Mus musculus zinc finger DNA-binding protein,accession number AF132613,Smith-Waterman Score=101.
tttttttttttatgtttcacaatttgtatggctgattctacgcacatttaaatgtgtttatcgacaattgtagatttcggttttcctctggttaaaccaatgtggaagtacacaggatgggagctgagagacaagcatcctgggcccagccatgctgccatcagtgggccaagctggggacagatgacctctgctccgtggatcctgctggctcagggtggggaaggggcctcaggagaggagtcaggctctcttctttattctccttacagcccatggaagaatggcaattcctggggaagctggtttggagaactcgctgaaccatgctctgcatccagtctaaggtgggctcctagcgggggcttggtgggttctccatcctcagcaccatctgcagcaccatcttggtcatgtgagaagctgagagaaacacaaggtaaatgttcctgtcctcatttatgcctcccaaccccactgctgctgctcaatgtccccagtatctctatgcagactcctgtgtgccctcaaaagtctacgcggtaccagtcaagagacatccatactgcaagatgatagaaaggtaagtggaacccaaccacctcactctctaccctcatgtctaccacggacagcatgaacctctccctgggaggctggttgg

SEQ ID NO: 12014 - DNA, 2049 bp, Homo sapiens
  SIMILAR (457)..(738): 881254mologous to Homo sapiens putative p150,accession number U93572,Smith-Waterman Score=418.
atggctgcaaacaggaaggattttattcaccgtcgatgcggccccgagttgtcccaaagcgaggcagtgccccaaggtctatgcagagcagaacgcagctccgccctcgcaatgctctccgggtctgtgccgaggagaacgcagctccgcccttgcaaaggcacacagcgccggtgccggcgtggcggagaagcggacagcggcggagaggcggtcggcggcggcgcggcggagaggcggtcggcggcggcgcggcggagaggcggtcggcggcggggcggcggagaggcggtcggcggcggcgcggcggagaggcggtcggcggcggcgcggcggaggcgaggcgggcggcggcggcgcggcggaggcgaggcgggcggcggcggcgcggcggaggcgaggcgggcggcggcggcgaggcgggcggcggcggcgaggcgggcggcggcggcgcggcgggcggcggcggcgcggcgggcggcggcggcgcggcggatagcggagagcggcggagaggcgcacagccgcggagaggcgcacagcggcggagaggcgcacagcggcggcgcaggcgcggagaggcgcaggcccaggctccactccccagctctgaaaactcatcctggtcagagttcagaaggacatgtggagtataagctgaatcacgtagaatttgaagatcaagatgatgaagccagagttcagtatgagggttttcgacctgggatgtatgtccgcgttgagattgaaaatgttccctgtgaatttgtgcagaactttgaccccctttaccccattatcctgggtggcttgggcaacagtgagggaaatgttggacatgtgcagatgcgtctgaagaaacatctctggtataagaaaatcctcaagtcccaagatccaatcatattttctgtagggtggaggaggtttcagaccatcctgctctattatatcgaagaccacaatggaagacaaaggcttctaaagtatacgccacagcatatccattgtggagccgccttttgggatattgtcttcatgcgaacttggtatcctgtttccatcccagccttctataacccagtaacatctttgttgaaaccagtgggtgagaaagacacctggtcaggaatgtggaccacgggccaactcaggctcgcccatggtgtcagactaaagacaaacaaggactctctgtataagtggtgggacacagcagcatctcagtctctgaaaggccaggcacagcatcagcaaggaccccagaatggtggagcactactgtggcttgagccctcgggggcagggaccagtacagcaactacttctctccctggggaggcagatatttccttttccaccatagtcctcaaagcactccaaatgtccaattgcaaatcctacaaaaagagtgtttcaaaactgctcaatcgaaggactcaaagggctcctaatgtgcacttgcagattctacaaaaagagtgtttaaacctgctcaatcaaaagaaatgttcaacccggcctcaaagcgaacaaaatgtccgcttgcagattctacaaaaagagtgtttccaaactgctcaaccaaaaggcaggagtgtgtgcttcttcccagcaaaggcagaggcagggcctacagaaactgtgcccgcagcctatagtgatggggtctatgaggtaattcaggcagatgaggcagacatttcttctgcctccaggatggaggtagagaatcttggccttggaccacgcactgtggaccatgctgggctgccgtggacagtgacggactcatgttctcaccaggatccccaaaataggcccctgaaaaaaatgttaccatcagggcaagttgctttggcagatatcattctcattaataaaacagacttggttccagaagaagatgtaaagaaattaagaacgacaattaggagccgctcatctgctggcagaggtagccgaagaatgccctttagtgtaagtcctctacaaccatacaccaaatgtgctccctgcatttcaaattccattgtagaaagtctctga

SEQ ID NO: 12015 - DNA, 1803 bp, Homo sapiens
  SIMILAR (70)..(186): 251254mologous to Caenorhabditis elegans predicted using Genefinder,accession number AL031620,Smith-Waterman Score=46.
atggagaacagtatggaggttcctcaaaaaagtaaaaatagaactaccatgtggtccagcaatttctttactggatatatatccaaaataaaggaaattaatgtatcaaagacatatctacatgccgatgtgtactgcagcgctattcacaatagacaaaatatggaatcaacgcagacagtaatccagataaataaatgcaagggcaaattaggggaaaaattggaatggagagctcagaatgtggccccagagaagggcagagggaaaggggacccagttcagaatctcgacacaagaatcagggagcacaccctgatggtaacatttttttcaggggcctattttggggaccctggtgagaacctgagtccgtcactgaccatggcagcccagcatggtccccagccctacatgtctgtgggatccctgcgtgaccaggtgatctacccggactcagtggaggacatgcgaaggaagggctactcggagcaggacctggaagccatcctggatatcgtgcacccacaccacatcctgcagtgggagggagcccccactgctgggtgcgagatggccctgggcaaggacctcgccttgctggagctccccttcatggttcaagggcacaggcaccaagccctccctcggtggcaacatgagaaaaagtggctcctgcaggaaatgaccagggtgttgtcacctgcctgtggaggaagcgggaacacaggttgggaggctatgtgtgactggaaggacatcctgccaggtggtgagaagcagagaatcggcatggcccgcatgttctaccacaggcccaagtacgccctcctggatgaaggcaccagtgccgccatgagaatcaacgtggaaggcaagatcttccaggcggccaaggacgcaggcattgccctgctctccatcacccaccagccctcctgtggtagggagtaccacacacacttgctacagttcgatggggagggtggctggaagttcgagaagctaggctcggctgcccgcctgagcctgacagaggagaagcagcggctggagcagcagctggcgggcattcccaagatgcagcggcacctccaggagctctgccaaatcctgggcgaggccgtggccccagcgcacgtgccggcacctagcccgcaaggccctggtggactccaggcccggcatctctgtcctgcagaccaaacacaaaactcattgccatccctcttcaacctggcttcctttctgacttcccttcaggtgccccaggcagaaccatggggatcatctgaccctctgtctgcctcatccttccctatcccaccagtccatgtcctactgactcagtccttaaagtccctctcgctccccaccggatcctcagtgtctggtagtacggcgcctgacatgggagcccttactctcctttcacggaaaggtcgcagccggtggccctaccggcagacaggtgcagagccccaggttaccatgcagcagcctgctgttcatgtaaaaggtcaagaacctttgacttccatgatggcatcttttcctcctcaaaagcaaaaggaaacgagtgaatggctgtttcctttttcttcaagccacgccctagtcgggctggtaaaatcattggcatgttggtggagatgggtaattaaaaactccttcataagcctggaatctccagatcctctctatactaaggtggacaaaggtatagctgtactacaagagccccaagctaaagaggctgcccaaaaagcagttaatggtgccactggtgttccaattgtttaa

SEQ ID NO: 12016 - DNA, 516 bp, Homo sapiens
  SIMILAR (1)..(870): 921254mologous to Homo sapiens putative p150,accession number U93572,Smith-Waterman Score=1349.
atgaaatctacttctggtgaagatgctgtgaacattattgaaatgacaacaaaggatttagaatactacataaactcagttgatacggcagcaccagggtttgagagaactgaatgtaattttgaaagaagttctactggagggacgctacagacacttccccggcccctaccgctgaggcacttccgcttccgccgccgctcgcatatttccggagtgttgtcatccggggctggagcctcaaacccgtgtccatattgtgtgtgtgaagaagcatcgaagcgcggcagccatgttcagcgtggcatttcggaaggcttgtcaggggtggagaagcggggcgggttgctgttctttcacctgacactaaagcgccatgccggaagcactgagtctgatacgtcggaaccagtctccaccgtgtggtttggtcttgatttccactggtactctggggtcttggataagtctctggacctcgcctttgtcatttgcgaagtcgataggttccaatag

SEQ ID NO: 12017 - DNA, 384 bp, Homo sapiens
  SIMILAR (3)..(74): 751254mologous to Homo sapiens Human secreted protein, SEQ ID NO: 7645,accession number G03564,Smith-Waterman Score=119.
atggatgcggtgaacagggaacacttctacactgctggtgggaatgcaaacaagtacaaccaccatggaaaacgtaatcatcaatcaaggagagaaacttccagctcatatgccgaagtggctgatttcctggtgcaccgtgatgaggacgtggaactgcatgtgggtagatgggaaggagggcaagagcaaatcctggtgtctacaatagcagggggtgctgaggaccccctctcaccaccctcagtcaaagataatgaagaaggccaacagcaaaaactcaatgactacacatgtgcccaagaagatgggcagatggaaactgatgaaaatatgacggacatgcaccaaggggtatacagcccccaccttgcggatatctga

SEQ ID NO: 12018 - DNA, 3336 bp, Homo sapiens
  SIMILAR (7)..(195): 931254mologous to Homo sapiens line-1 reverse transcriptase,accession number U83303,Smith-Waterman Score=318.
atgaggccaagagacatatggtcctgttctcctgaggctgcagtctacgcggagctgaaggatcccagccggcaccaaggacagcagcagcagcgtggtgactcctcgttcctgagctgctgtagtgagagggcagactccgcgagcagcggctacctggtcctcttggctctgcaccgctttctccccctggtaactgtgcactggggaaagggaaatgatcagacatttcggggactactggacactggctctgagctgatattgattccagggcacccaaaatgtcattgtggtcctccagttaaagtaggggcttatggaggtcagaagacagatgaatcttggagaatgtcagtggattatcgtaagcttaaccaagtggtgactccaattgcagctgctgtactagatgtggtttcattgctcgagcaaattaacacatcttctggtacctggtacgtggtcattgacttggcaagtgcctttttctccattcctgtccataaggcccgccagaagcaatttgcctgcagctggctgggacagcaatatacctttactgtcctaccccagaggtatatctattctctggctttgagtcataatcttattcggagagaccttgatcgctttttgcttccacaagatatcacattggtccattacattgatgacattatgctgattggatccagtgagcaagaagtagcaaatgcagtggacttattgaaagggatgtttgcaataagtcagaaagttgaggcatgtcgaagaattgtctgtgaaagtcgtgaaagaaaaaaaatgtgctataaaaagcaacttatgcaagaaatgctgtataatttcaaagtaattaggcctcctgaatgtaaaactattgaagaaacagtttatatgcaagagagcccagttgaacataactgtgtagaggtgttggactcagtttattctagcaggcccgacctccgagaccatctttggacatcagtagactgggagctgtacgtggacgggagcagcttcatcaacccacaaggagagaggtgtgcgggatatgcggtggtaatcctggatgctgtcattgaagccaaatcattgccccagggcacttcagcccagaaggccgaactcattgctttaatttgggccttagagctgagtgaaggtccaaccgtcctgtctggcatacaagcttatggagaagccccctttgaagatctcaatatagacttcaccaagatgcccaaatgtggcagtaacaagtatttgctagttccagtgtgtacatactctgggtgggtggaggcctatccaacacgaaccaagaaagctcgtgttcttctccgagatctcatcgctaggtttggactgcccttatggatcggctcagaaaatgggccggcgtttgtggctgacttggtacagaagacagcaaaggtgatgagtgtggatcaaagactggaacgtagcccccttgcagccacggtggaaaggaccccagactgtcatcttgaccactcccacagctgtgaaggtagagggaatcccagcctgggtccaccacagctgcgtaaaacctgcagcaccggagacctggtaggtacttttggggaatgtgattcagaggtcgatgtgctacactggtccaggtacaactgcttcctgctgtatcagatggggaccttctccaccttcctggagctactccacatggaaattgacaacagccaggcctgtagcagtgcccttcggaaaccagctgtctccatagctgatagcacagagctcagggtgctgctgagtgttatgtacctaatggtggaaaatattcgcctggagcgagagacagacccctgtgggtggagaacagcccgggagaccttccgcactgaattaagcttctccatgcataatgaggagccttttgcccttttactcttctccatggttaccaagttctgcagtggcctggctcctcacttccccataaagaaggtcctgctcctgctctggaaggtggtcatgtttaccctcggtggatttgagcatctgcagactctcaaagtacagaagcgggcagaattgggcctgcctccactggctgaagacagtatccaggtggtgaagagcatgcgtgctgcctccccgccctcttacactcttgacctgggagagtctcagctggcacccccaccctccaagctgcgaggccgccgtggctctcgaaggcaactcctcactaagcaggacagcctggacatctacaatgaaagggatctcttcaagactgaggagcccgccacagaggaggaagaggagtctgctggtgatggagaacgaaccttggatggagagctagacctgctagagcaggaccctctggtgccacctccaccctcacaggcacccctctctgctgagcgggtggcttttcccaagggcctgcctgggccccaaagacagaaggacattgagcacttcttggagatgagcaggaacaagttcatcggattcaccctggggcaggacacagatacattggttggattacccaggcccatccatgagagtgtgaagaccctaaagcagcacaagtatatctccatcgcagatgtgcagatcaagaatgaagaggagctggagaagtgccctatgtctttgggggaagaggtggtaccagagacgccatgtgaaatcctctaccagggaatgctgtacagccttccgcagtatatgggctctgtggactgtcccactctggagtttgagtatggagatgcagatgggcatgcagccgagttgtcagaattgtatagttacactgagaacctggaattcaccaataacaggaggtgctttgaagaagatttcaagactcaagtgtttaaatcggcaccaatcttaaagcgggccctcaaggtcaaacaggccatgctgcaactttatgtcctaaagctactaaagttacagaccaagtacctggggcgccaatggaggaaaagcaacatgaaaaccatgtcagccatttaccagaaagtgcgtcaccgcatgaacgatgactgggcttacgggaatgacatcgatgccagaccatgggacttccaagcagaagaatgtaccttgagggccaacattgaggcttttaacagccgtcgctatgacagaccccaggactctgagttttcacctgtggataactgcttgcagagcgtactggggcagaggttggatctgcctgaagatttccactattcatatgagctctggctcgagagagagatcaatgctaaggctttcttccgtgcaaaggctgaagatccatttggttga

SEQ ID NO: 12019 - DNA, 363 bp, Homo sapiens
  SIMILAR (99)..(185): 411254mologous to Homo sapiens IL-6SAG,accession number AF058296,Smith-Waterman Score=60.
atggccctcattgacgtgggcttcgtgggtgagaaacgggctgatgggtcgcctctttcagggcagttgttcactattccagggaggagggccaagctggcagtgggcaacatgatctatgcatattacccagagctctccattcatgggctctactgcagtctctgtctccccagtgccgagctccctgatgattttccaaatggacagtctcctgggctccacaagactgagttcctgattccagaagagctgaaaaaatgccagcaactcttgaattatgtgaaggaggggcacacgcaggtggcttcccatgtgcagaggctgtttatggagtgtgcaggattcagcccagaagtgtga

SEQ ID NO: 12020 - DNA, 5030 bp, Homo sapiens
  SIMILAR (1340)..(2614): 841254mologous to Homo sapiens putative p150,accession number U93563,Smith-Waterman Score=1790.
ccatgttaagaatattttatttgttttttgagattacatagtcattattgctgatctaatacaatcacttagacataaagatttccaagaacttctcagaaatggtgatctttagaagtgttattcctttcagtaagatgacagaactagatgattacgtatatagatatatagatatatatatatatatgtatatatagagtttagaacctgtccacatataatttgctggtgttgcctattttccttccgtaattttcctttattgaaaaagcttaatgcaacaatgcattttgattcctttttaaaaaccacggcaaagttaattttgagaaaaccacaggagcagcaatatcagatctgtttagagaaaagcgaagcagcataaaagctttgcaggagtatgtggccatggggagccgtgctcatatgggcaagtaggatagggagggaggagagcagagggaaggtagagtagatacattttttttctttgtttaaatgaaaaaaagaaaactgaatatctccattaagaaggcaaaaaagtgccaggcacggtagcacacacctgtggttccagctactcaggaagctgaggcaggaggattgcttgagcccaggagtttgagaccagcctgggcaacatagtgaaaccctgtctctaagggtgaaaagaaaagaaagaaagaaggcaaaatattagcacagattcattgtagagaaaatgttatgtatcctcacagactggagccacatacaaagagataagtagccttctttcccatgcttccagataaccaggatgcatctaaggtaagaggttggaggaaagaagacacattgctctgattccaagggtagagggaataatgaccagatttcaaccctaagatagaacccaaatacttgggaggcttgtggttctttcttcttaatggttgataacacagtgtccctacagagaggtcatctgaaactcagaggcaaataactcatcatgggcagcaacactggcaacctaacttagaagccccgtgtggccccttttttatttggagtgggtctcttcactacagcaaggcagaatgtactctttaagtaccagcacatagtaagctccagagagcaaggctttgctgagaaacagcaggttatgatttttggtctaagaatacaataggctagagaccatctatctgccaaatggaatctgctctggatataagataaggtacaaagatctgaatcccttgctaaagggaaccaattaatacaaaaatcaggactaggtaggcaaaaggaagaactgaatggcttagtggaatttttagcatttatgatcttccttacaaaaaaagaatataaccagtacttgctgagacatatggcctctgaagaactgtagtctatgggctgagcctgtatactattaaatgaggcaaacagtcatttaccaaagttccacttccctacttccgaaagtaaggtcactttcagactagctttgagagtatatgtgaagaccaggagaagttggagagggtagaggtagaagaagagaatcaggatgggaaggttttggtgatcatgcgtggtctggtgttatcttgagtcaccttggtcttgagactttgaggcagaccagcataggaaaaaagtgggaaacaaacaaacctgagagtgttaaaaaggatcggtaaggggaagaggcttatttaattcaagtttcctagggccagtccagactaactcttagaaccaatctggtcctaatgaaatgcctgagaccaacagatcagtctccaaaaggaatccaatttttgggtgggacataaaatgtcacgctgcccacaccacattactaattctttttgtagcactggagttactcaagaaactgactctgaaatacagaatcatcaaatggaagaggttaaatcataaaagatatgccagcagagaagtccacagatcagactgcagatctcggtttcatccatggcaatggccaaaggaatgaatgtctgacgaggttcaaactagtcaaattagctttgataatctggatacagtttacaatttcatctctgtatccctcagccagtcaaactgcaatggccttcctgggaaacaaataaatatactctgctttgttagggtatcaagctgtgagtctgaaagacctgtcccatttccaaagcctatccccctaagtccctggaaaagtatgcctttccctactcagtttcagacgtagctttaggcaatagcaggaagtttcaggaagcagtgtttcacaacaagctctccttttctgagatagtgccaatctggaggggcttccttggaaactatccaatcaaatgacaaggaagtaaaactatgggtcccagtggagctggccccacttcctgagcagacgttggctggattagaaagacagcagaacaaatgtctgacaaataccaaaactgtggaggaaataatggaggcacatccctcttgcaaccaggaagtgttaaaatggacataaatattcaaggagaagaaaggagtcctgggtaagaaaggagacccctggtaggcacagcacagctgagttcttgatgtagcttggcaaagccataaataacactccttccttattagcctttatataaagaaggcagtgatagtgatggtcaagattgggaacccaatcttgtgtgaaacactggccatgttaattccaaacggcctcacccggggaagggccaagctgagaaaagcaggtgctgaaaatttattccagaaaactccagggaatagggagtatggaatccctggactaactcgtgagcctggacaagaggaaaaacggccactgctgaggattcagtcaatggggaatgatgcaaatgatgcactgggagcagtaaccccatttctttccttcctcagcccatcctctgtggctttcatggccctcagggcagtaaccacactctgggccaacactacaggcacaggattcttgattttaataaataaataacctaacacacagggtgagcacggcaggcagctttgattggagaagcagcttgctgaattctttcttgtatagtagtggagaaaaggcttggaggttctattccttaaaaattctggtttgagttacaggaacttaatacctgtagtaattaggcttgaagggcccattcttattgagtcccagatacttggcctgttcatctgtcagctctgtcaagtgggcatcaaaggtaggcaggtggtaagctggccacatactcatccatcttcttgggcaacaggtagacatcctgcttatagcgaccctcaggagcattgtaaagctctatcaaggcaagagccttgagtagtagcagtgattgagagcacaaatgtaggcactgtggagcagctaaggttcagcaggcggccctctgccagcagtactatcctcttgccatcaggccatatcacatggtcaacttgagatctcactcgctccccagtcagtttctggtgtccgcagactcgccacgtcaatctctgtgttggaatgtcccatgttacaaacgatgcagctattcttcatacggtccaagtgctctctggttaccacattcttgttacctgtacaggtaataacaatgtccaacttgtcggatgacctcatttaatttcaccagtcgaaatccatccatacaggcttgcagggcacagatggggtcaatttcagttacatacacaatggagcccatggctttcagggcagcacagcaccctttccccacctctccatagccacagactaccacttgctttccaccaaacatcatgtctgttgtccttttaagtccatcaagaattgattcacggcaacagtagaggttgtcaaatttctgtttggtgactgagtcattgacattcatggctggaacacacagcttcccagctttggacagttggtacagcctgtgaactccagtaacactctcctctactatgcccttgattttcttaaacatgttgggatactttttataaatccagtgggtaagatcccctccatcatccaagatcatgtttggctgccagccctccacattcacacatctatcgatacaccaccaaaagtcatcttctgactctcccttccaggcaaaaacaggaaatccactttctgctagagcagcagccacttcattgagagtggaatagatgttgcaggcagcccatcggcactgggcccccagagcacccagagtttccataagcacagcagtctgagcagtgatgtgtgtgcaacccacgattttggctccagccaaaggcttttctccttgagctctcttcctcaaagccatcaatgcaggcatttcttgttcagcaatttcaatttctcttcgtccaaactctgcctgtttgatgttcttaacacagaagtcactgcttcccttagagttcttttgctgcttgtccctgggcgatgtctcatcatcagagctatctgtatatgaagccgctgagctgtagctgtcagtagatgactgagaaatggaacgagacaaagagcgacgtccaattttggtgggacgtttgttgaattcttgcttctggtcagcaaactggatcttcttgactgtgcgcggcgcctcggtgacggtgccgtcggggctgaccagggcctcgccgccgtcgcggtgccgctggtgctggtgatgtgggtcgctccgcttcatggccgacgcctgaggcaccttcccggcggcggggctgagagcggcggcgggccccgagcccgggccggggaccgggggccgctccgcggcgggagctggagcctcagggtctccaccgcccgccgggggggccatggcgcccacggcggccgtgctcagtcctagttgcgactccgcctcggaggggctcaggtccttcagctccacctcaggcaccttggcggcagccgcggctgacacaacctgcaccgacatcaccgcctccgctgcaaccaccggctc

SEQ ID NO: 12021 - DNA, 939 bp, Homo sapiens
  SIMILAR (463)..(828): 971254mologous to Homo sapiens Open reading frame extends without a stop codon for the full 5' nucleotide sequence. The initiation codon has yet to be identified,accession number AX029176,Smith-Waterman Score=631.
atgaggccaagagacatatggtcctgttctcctgaggctgcagtctacgcggagctgaagagtcatggagccttggagattaccctccagccctcagagcagtgtgcagccaaagttggtccctggaagctcgcacacaggcccaacccagaccccgggtcctgcctctatggctgcaggcagatctttgcattttacccagagccctccattcatgggctctactgcagtctctgtctccccagtgccgggggcgtcctgcgcgtcacctgtctgcctcttacattaggactatttatagtttggaatggtagtgagagtaacagtatgatgacccaggacaatgacaacactgatcaaattgacagagcatgtgacatgggctggttctttcatcgcagagtagccgcacagtggggcttgctatggctaatgctgtacttgctgtatgtgttccaggcgagtctgcggacaccagaactgacctgggagcgagtgagatctcaagttgaccatgtgatatggcctgatggcaagaggatagtactgctggcagagggccgcctgctgaaccttagctgctccacagtgcctacatttgtgctctcaatcactgctactactcaggctcttgccttgatagagctttacaatgctcctgagggtcgctataagcaggatgtctacctgttgcccaagaagatggatgagtatgtggccagcctacacctgcctacctttgatgcccacttgacagagctgacagatgaacaggccaagtatctgggactcaacaagaatgggcccttcaagcctaattactacaggtgccttgggctccccagaaatcagggacacctgggcagtgatgagcttcctgcactggaattggtctttgcatccccaaccacatatgcttacatgaactcagaaaaatga

SEQ ID NO: 12022 - DNA, 2594 bp, Homo sapiens
  SIMILAR (2)..(2023): 991254mologous to Homo sapiens phospholipase C-beta- 1a,accession number AJ278313,Smith-Waterman Score=3431.
  misc_feature (1)...(2594): n = a,t,c or g
atggagccgatctacagggtactctccagaaagaaaataagcatcaccaacctcctcacaactgacttccactgctgctacgaaaacaccatgggcactaaaaagtcctcagccatgaaaaaaaatgagccaaagaacaacaaagatgtggccttgggctctcttcccaaccacaaggagctatctacctctggggaacaagggaacccagagccagcactcaaggacaaacctggccacacagaggcgggttaccggctaactcttctgtgccacctgcacattcacccagtcctgcagacattctttccaaggaatgtatatgtggaagtcatcatcgatccacgcacagtatttgtccctgcaaatgaggaaactcagagtgctctgggaaagaagtgcttacattcagaagggatccaacaacttccgaaggagcctttgccatttgtgtccaggggcttcctggtatctccgcagctcacacaagacgatcccatcccaagcattgatgcagcctgtgtcaacaaatggatgttgtctctctctctagcccctgatgaacagtgtgctggacctcagttcgacgaggatgacngctactctcctctgccagaaaaagaccccaccccaagccttggtgcagtctgtgtcaacaaatggatgttgttcctctctctcgagcccctgatggagcagtgtgctggacctcagtttgacgaggatgacggggcctcatggcatctcaaagatcacacaagacgaagaccatccttcttggacaagggccttccttccatgccaatgacaccaggaaggtgcagaggaaatgagtgtgcttcagaaagacagacaggcacatctggcggaaaaccaaccaaaacctgtgctggaaggcacctgcccaatgctcagaatgttgcactgatacatgacgtcaaagccagaggtggtcttcccaccctagccaaacgacctcaagaaacagcttcctccgctccattcagtccgcgtaagcacacgtgccctcaggatgcatgaagagaatggctgtttctccaacagcacgtccgcgcctgatgccccaaaagcggagtgttcaagacacaccgcctaacattgtccttgcgctggtcacctcacagggcttccctgcattgacctcagaggcaatgtcccatcgtgcagtcagcttggctgcattcccacccacaacaatgcctgcaagtcaacaccacatcaacaccagcaccagaggaaatgttcctaacctgtgtgtgatgggagactttggcctgtggatgccctgggaggtggaacctatgggaactagtggaagttgtccctcaatcctacagtccccggcagaggcaaatgtgctggacctcagttccgatgagaacgacggatgtagcagaatccaatactggaacatcgccaacacacaaaggcgaggaggcaacccaaatcaagagactctccacggcagtgcccctggtattgcacatgtgttgcctggaatgcacaaggacctccatgaatacgccaagtgtgactggaccccatcggagagtcccaggccagggccagggccagggcacattccctctggacgcctttgggatggaagctgctttcaaagcgggaaatgggatccagagcagtatttgctcacacgagctgcagcaggacctgcccttgaagacccccaatggccaacctgtcatccaccagagaaatccctggaaagcccatcaccaccaaatgacagcccaagaccactgatggcatgcatgtccactccatgtacctgcaccatgtcctcaggacacccaaagggaatggctgcttttcccatgggacatccctgcctaacgccccaaacaccaggcagacaggacacagtgccttccatcatccttgcatcgatcacactcaaaggccttccttgcaccgacctccgacgcaacatcccaccacgcagccaacttggatgcaggaccatcctccccaacacctgctcaacgacatctgacaaccaccaccaggtctacatgcacatggctactaactcaccaagccaaggccagccgcacactcccctaggtctgcatttccacccacttctacagttgccacgacatcacagagcagccaatccccccatgactctcctacttgtatacctcacacagagggaatatttctattgtgcctgtgatgtgagactttcatccatggacgccctgagtggtagaacctctgggaaccagtggaagttgtccctcgctcctacagtccccgggggaggcaatgtgctggacctcagttccgatgagaacgacggatggaagctgctttcaaagcaggaaagaggatccagagccatatttgctcacacgagctgcagcaggtgtggccgctcggcaatggcgggccaagagacgacttccaggaagatgtgcccaacagtggagcccactactctgtcaggaagacgagaagtgaccaagggccacgagcacaagtctgacccttgtattccctggaacctgccctctgacacctctgctggccaacttgtcatccactag

SEQ ID NO: 12023 - DNA, 517 bp, Homo sapiens
  SIMILAR (4)..(156): 1001254mologous to Homo sapiens dJ654A7.1 (phospholipase C- beta-1 (KIAA0581, 1-phosphatidylinositol-4,5-bisphosphate phosphodiesterase beta 1) (PLCB1, PLC-I)),accession number AL049593,Smith-Waterman Score=256.
gttgggaaatcaagcatcgtgtgtcgatttgtccaggatcactttgaccacaacatcagccctactattggggcatcttttatgaccaaaactgtgctttgtggaaatgacttcacaagttcctcatctgggacactgctggtcaggaacgggccgccagatcccacccttggacccccatgaaaatggaaacaatggaacaatcaaagttgagaagccaaccatgcaagccagccgccggtgctgttgacccaagggccgtggtccacggtacttgaagaagccagagcccacatcctgtgcactgctgaaggaccctacgctcggtggcctggcacctcactttgagaagagtgagcacactggctttgcatcctggaagacctgcagggggcggggcaggaaatgtacctgaaaaggattttagaaaaccctgggaaaacccaccacaccaccacaaaatggcctttagtgtatgaaatgcacatggaggggatgtagttgcatttttgctaaa

SEQ ID NO: 12024 - DNA, 1845 bp, Homo sapiens
  SIMILAR (171)..(1): 941254mologous to Homo sapiens Human vesicular binding protein,accession number W86813,Smith-Waterman Score=284.
tctcaggtgccgattttcttctgatagcttcatcatttctccctgaagtcttttacactcttccattagtttccttgtttcggtatcattaagtgaaacactgtgtggttttggcataggtccatcttgcttagatgcattcagtggaacagctttgctaggttccatatcattcttcaaagaatcgaaagtctgtttgggaacagtgaagtgaacactcagggcatagttatgagagaaatcaggctgtgcagggctgagctcaagagagcaggggctctggaaaggagagatccatgtgggctgaactccaggggcaaagggggcggctggggctcctcccttcctcaaaaaataaaatgtggggccatctaagtctcctctgtgtgacttggctagccacacacacaacgaccgccctagtcgctggggtttttgagctgagtttttggcagctcccagtggtagtctgggaatgtcaccatcctcttggaaagtccgtggtgagttctttacagctggcaggacctctgaggtgtcaccctgaggcttagcagtcttctcatcatcttcactccctaatgtgctcagggtgtctgattcctggccagtgtcttggatgtcctgggtcagcccacgtacgccagtgcatgttggaaggggagagttgattccctctcccaagccaggaggtccgtcggcatgggctctttcataagcatgctttcctacagaaggtgtgccttcccccgtttccttctcacttcctaccatggcggtgtagagactctcaaaatcaagagggaaaagaaggaagctcagtacttcttgcggcgagagaagccagtgccggtgcggacactcttggctggtggaatctgtggtgggggtggggggtgccctcactggcagggagcttacagatgcattgggtggtgtgaggagatcacagatgtacttggcctctgtctgtgagcccccaccgtgtgtgccgtggcccctacacttatcccgcccccccgttgtgctccacagagctggcaaacaaaaggcccagctcttgggttcagaaaacgaactgcagatgtctgaggtgtggccctgagatttagcgggagcaggagtaaaacgggttaaagtttggttgagaataaagttaatattcagcactggtgtattgtggctgccaagaatacgagctgtggccgtgttaataaaagtgcagtgtttagagggagtgagtgatcgtcttgctctggctctgtgggaccacccgtggagcttggctgggctctgtgaggggcacctcacagcttccatatctgaagtgtttggtggagcaaaaattgtctgtaccataaacttgtgtttactcttttcattcggatcatagtcaaagggctgtagcattactgaacttcctaagcccatgaattgggcttcatgcagcagaaccttggcctcctttttgttgcaggccgccagatcccacccttggacccccatgaaaatggaaacaatggaacaatcaaagttgagaagccaaccatgcaagccagccgccggtgctgttgacccaagggccgtggtccacggtacttgaagaagccagagcccacatcctgtgcactgctgaaggaccctacgctcggtggcctggcacctcactttgagaagagtgagcacactggctttgcatcctggaagacctttgctccagttgccaacaagttccccatctccatctaagaccacctccgcctggactttattgtccatattgctatcagcattttgggcaaagccgttcaacaagtctctaggaagttccaaactttcccacat

SEQ ID NO: 12025 - DNA, 1458 bp, Homo sapiens
  SIMILAR (994)..(1113): 821254mologous to Homo sapiens Human secreted protein, SEQ ID NO: 7420,accession number G03339,Smith-Waterman Score=160.
tcaacagagttccaaggtgatcaccttggtacagaaagccatggccattttccaaaaccatgcctttgtgtaagtgccttgaaccttccggtaaattctgaataccttaggccctaagatcggggtttgcgttcggcgtttgctttcttgttttgcgttctggtttcctggtgcaggctcccttctccttttaaaggtgccggcctcattgttatgatctggcttttctctttctctgcgtggaagcatttccttctccctgtgtttaaggttggcatgtgtgtgacttatcccaggtgttactgttgaagtcacggtaccatgaaagccgctcattaaaccaggatgggtctctgaacttcctaagcccatgaattgggcttcatgcagcagaaccttggcctcctttttgttgcaggccgccagatcccacccttggacccccatgaaaatggaaacaatggaacaatcaaagttgagaagccaaccatgcaagccagccgccggtgctgttgacccaagggccgtggtccacggtacttgaagaagccagagcccacatcctgtgcactgctgaaggaccctacgctcggtggcctggcacctcactttgagaagagtgagcacactggctttgcatcctggaagacctgggagatactgggtgggagtgtgaacatttggctccacattacttatgcaaatttctgcagccagcttggatttctcctcagaaaatgggattttcttttctatcacattgccagactgcaaattttctaaacttttatgctctgcttcccttataaaaccaaatgcctttaacagcacccaagtcacctcttgaatgcttctctgcttagaaatttcttccgccaggtaccctaaatcatctctctcaagttgaaaattccagaaatctctagggcaagggcaaaatgctgccagtctctttgctaaaacataacaagagtcacctttgctccagttgccaacaagttccccatctccatctaagaccacctccgcctggactttattgtccatattgctatcaggcttttggtcaaagccattcaacaagtctctaggaagttccaaactttcccacatcttcctgtcttcttctgagtcctacaaactgttccaacctctgcctgttacccagttccaaagtcgcttccacattttcaggtatttttacagtagcaccccactctctgcagcaccaatttactatattagtctgttcttacactgctaaataagacatacctgagactgaacaatttataaacgaaagaggtgtaattaactcacagttcagcatggctggggaggcctcaggaaacttacaatcatggcagaaggggaagcaacatgtccttcttcacataatggcgggaaggagaagaatgagtgcccactgaagggggaagcccctataataccatcagt

SEQ ID NO: 12026 - DNA, 985 bp, Homo sapiens
  SIMILAR (173)..(643): 611254mologous to Homo sapiens Rab22b,accession number U57091,Smith-Waterman Score=413.
ccctcggacggccccggaggatgctgctgagccccggcactgcctggctgcgagcacatgatggcgatacgggagctcaaagtgtgccttctcggggacactggggttgggaaatcaagcatcgtgtgtcgatttgtccaggatcactttgaccacaacatcagccctactattgggggcatcttttatgaccaaaactgtgccttgtgaaaatgacttcacaaagttcctcatctgggacactgctggtcaggaacgtttttattcattggctcccatgtactatcgaggctcaggtgcagctgttatcgtgtatgattttaccgaggccggattccattttcatcccttgaagaaatgggtccaagcggctgaaagaacttggtccggaaaaacattgtaatggccatcgctggaaacaagtgcgacctctcagatatttagggaggttcccctgaagggatgctaaaggaatacggctgaatccataggtgccatcgtggttgagacaagtgcaaaaaatgcctattaatatcgaaagagctctttcaaggaaatcagccgcccagatccccacccttggaccccccatgaaaatggaaacaatggaacaatcaaagttgagaagccaacccatgcaagccagtccgccggtgctgttgaccccaagggcccgtggtccacgggtactttgaagaagccagagccccacatcctgtggcactgctgaaggaccctacgcttcggtgggcctgggcacctcactttgagtaagagtgaggcacactggctttgcatcctggaagacctgcagggggcggggcaggaaatgtacctgaaaaggattttagaaaaccctgggaaaacccaccacaccaccaccacaaaatggcctttagtgtatgaaattgcacatggaggggatgttagtttgcatttttgctaaaaaaaaaaaaaaaaacctttaaaaattgttggatgtgta

SEQ ID NO: 12027 - DNA, 1665 bp, Homo sapiens; identical to SEQ ID NO: 5400
  SIMILAR (1387)..(2559): 991254mologous to Homo sapiens double homeobox protein,accession number AF117653,Smith-Waterman Score=2101.

SEQ ID NO: 12028 - DNA, 1566 bp, Homo sapiens; identical to SEQ ID NO: 5402
  SIMILAR (1)..(285): 1001254mologous to Homo sapiens prostate-specific, androgen- regulated homeoprotein NKX3.1,accession number U91540,Smith- Waterman Score=494.

SEQ ID NO: 12029 - DNA, 1452 bp, Homo sapiens
  SIMILAR (329)..(511): 331254mologous to Human herpesvirus 6 DR1,accession number X83413,Smith-Waterman Score=77.
atgaagcttccagaggaaggattagcagcaatatttgctgttctgcagtattactattctgcatcctccgctggtgataaccaggcaacacggtctggagtggaactccacaaatccaggagactgctgctgagggacctgatgttgaagaaaccacaacagaaggagtactcattcacaaagggcttccgaatccccggtggccccatcaaacaggttgtaacccaaatgaaaactaccatcagagaatactataaacacctctacgaaaataaactagaaaacctagaagaaatggataaattcctggacacatacactctcccaagactaaaccaggaagaagttcaatctctgaatagaccaataacaggctctgaaattgaggcaacaattaatagcctaccaaccaaaagaagtccaggaccagacggattcacaactgaattctacccgagaaccaatgacaaaaaccacatgattatctcaatagatgcagaaaaggcctttgacaaaattcaacagcccgtcatactaaaaactctcaataaactaggttttgatggcatgtatctcaaaataataagagctatttgtgacaaacccacagccaatatcatactgaatgggcaaaaactggaagcattccctttgaaaaccagcacaagacaagggtgtcctctcttaccactcctgttcaacgtagtgttggaagttctggccagggcaatcagacaaacagagagccaaatgatgagtgaactcccattcacaattgcttcaaagagaataaaatacctaggaatccaacttacaagggacgtgaaggacctcttcaaggagaactacaaaccactgctcaatgaaataaaagaggatacaaacaaatggaagaacattccatgctcatgggtaggaagaatcaatatcgtgaaaatggccataccgcccaagatgttcttccggcttcaattgccacctgtgaatagtgaagaaacttctcactatgagattccattgcccggaaggagggtagagctacggtacccactaaggcagggaacagaagcaacagacggacaggtctgtggaaatgaggatatgctaataagggaccgagtcaggaaaactagagggtcagcaccgcccccagcccacaacctggcacccacggaagttgctttagaggacgtcctgcgtatcttcacctctgcgtggcgtggggtcgacggcgctctggagaagggaggaacttcctgtcccgcgcgcgcacaacttccggcagagccggaagaccctctctttcgctgtttgagagtctctcggctcaaggaccgggaggtaagaggtttgggactgccccggcaactccagggtgtctggtccacgacctatcctaggcgccatgactgggtaaaccatcggatgtggggaagaaagcagcagtattag

SEQ ID NO: 12030 - DNA, 1607 bp, Homo sapiens
  SIMILAR (231)..(1601): 921254mologous to Homo sapiens putative p150,accession number U93563,Smith-Waterman Score=2171.
aaatacaaactaccatcagagaatactacaaacacctctacgcaaataaactagaaaatctagaagaaatggataaattccttgacacatacactctcccaagactaaaccaggaagaagttgaatctctgaatagaccaataacaggatctgaaattgtggcaataatcaatagcttaccaaccaaaaagagtccagaccagttggattcacagccgaattctgccagagaaaaagagggaatcctctctatctcattttgtgaggccagcatcatcctgataccaaagctgggcagagacacaaccaaaaaagagaattttagaccaatatccttgatgaccattgacacaaaaatcttcaataaaatactggcaaaccaaatccagcagcacatcaaaaagcttatccaccatgatcaagtgggcttcatccccgggatgcaaggctggttcaatatatgcaaatcaataaatgtaatccagcatataaacagaaccaaagacaaaaaccacatgattatctcaatagatgcagaaaaggcctttgacaaaattcaacaactcttcatgctaaaaactctcaataaattaggtattgatgggacgtatttcaaaataataagagctatctatgacaaacccacagccaatatcatactgaatgggcaaaaactggaagcattccctttgaaaactggcacaagacagggatgccctctctcaccactccttttcaacatagttttggaagttctggccggggcaattaggcaggagaaggaaataaagggtgttcaattaggaaaagaggaagtcaaattgtccctgtttgcagacgacatgattgtatatctagaaaaccacattgtctcagcccaaaatctccttaagctgataagcaacttcagcaaagtctcaggatacaaaatcaatgtacaaaaatcactagcattcttatacaccaataacagacaaacagagagccaaatcatgagtgaactcccattcacaattgcttcaaagagaataaaatacttaggaatccaacttacaagggacgtgaaggacctcttcaaggagaactacaaaccactgctcaatgaaataaaagaggatacaaacaaatggaagaacattccatgctcatgggtaggaagaatcaatatcgtgaaaatggccatactgtccaaggtaatttacagattcaatgccatccccatcaacctaccaatcactgtcttcacagaattggaaaaaactactttaaagttcacatggaaccaaaaaagagcccacattgccaagtcaatcctaagccaaaagaacaaagctggaggcatcacgctacctgacttcaaactatactacaaggctacagtaaccaaaacaggatggtactggtaccaaaacagagatatagatcaatggaacagaacagagccctcagaaataacgacacatatctacaactatctaatctttgacaaacctgagaaaaacaagcaacggggaaaggattccctatttaataaatggtgctgggaaaactggctagccatatgtagaaagcagtgtgttttcattgtacctccaacagaagggtag

SEQ ID NO: 12031 - DNA, 402 bp, Homo sapiens
  SIMILAR (2)..(250): 841254mologous to Homo sapiens line-1 reverse transcriptase,accession number U83303,Smith-Waterman Score=372.
acaaacagagagccaaatgatgagtgaactcccattcacaattgcttcaaagagaataaaatacctaggaatccaacttacaagggacgtgaaggacctcttcaaggagaactacaaaccactgctcaatgaaataaaagaggatacaaacaaatggaagaacattccatgctcatgggtaggaagaatcaatatcgtgaaaatggccataccgcccaagatgttcttccggcttcaattgccacctgtgaatagtgaagaaacttctcactatgagattccattgcccggaaggagggtagagctacggtacccactaaggcagggaacagaagcaacagacggacaggtctgtggaaatgaggatatgctaataagggaccgagtcaggaaaactagagg

SEQ ID NO: 12032 - DNA, 380 bp, Homo sapiens
  SIMILAR (354)..(196): 371254mologous to Arabidopsis thaliana contains similarity to glucose regulated repressor protein~gene_id:MKD15.20,accession number AB007648,Smith-Waterman Score=111.
tcacgctgcttggtcttcactgctgtatgttgactttttcactgttaattctaaggctcctttagatgatgttatgttgtcaagctctgtaacagggtttccttccctatcatagccaaaccaacgtggagggtcattagtgttgtattcctgctgctgaactttagatgacattctttgagctgccttcttggaaatatttgtgcagtattgcatcttaaggatccggagttgtttgcagcctatctgaaggtcctcaaggatttggtcagtaagcaagacacaaccagagatatccaaaatgtgcaggtaatggcattttgccgataacatctccatcgctgagtcagtaatctgcaattggtgtcttggaaataacc

SEQ ID NO: 12033 - DNA, 723 bp, Homo sapiens
  SIMILAR (34)..(489): 971254mologous to Homo sapiens putative p150,accession number U93563,Smith-Waterman Score=738.
atggacaaagctacaattggtaatgaaacaaagataatgttggaagttctggccagggcaattaggcaggagaaggaaataaagggtattcaattaggaaaagaggaagtcaaattgtccctgtttgcagatgacatgattgtatatctagaaaaccccattgtctcagccccaaatctccttaagctgagaagcaacttcagcaaagtctcaggatacaaaatcaatgtacaaaaatcacaagcattcttatacaccaataacagacaaacagagagccaaatcatgagtgaactcccattcacaattgcttcaaagagaataaaatacctaggaatccaacttacaagggatgtgaaggacctcttcaaggagaactacaaaccactgctcaaggaaataaaagaggatacaaacaaatggaagaacattccatgctcatgggtaggaagaatcaatatcgtgaaaatggccacactgcccaaggtctctgagtctctcagaagagagggtagctcctctctgcagctggtcatcccacagtctgtctgtcctctgctctggctgagccccaggcttattatggacctcacaggggaggaagtgcatgccaatcagtccctgggcagccataggcaggcctggaagaggaaccacatgtccccacttaggtcctcaggactggcagctcagcccccagcctttaggccctacctggcctga

SEQ ID NO: 12034 - DNA, 365 bp, Homo sapiens
  SIMILAR (529)..(1026): 481254mologous to Arabidopsis thaliana Putative membrane protein,accession number AC011001,Smith-Waterman Score=437.
ctcatttaatgcagtgtgatgggacagaatcgaaatgagctgcatgttgaaccccagccatgggtgaagtgcccactggtatatgcatttctttaatgtcctcattccttattccctgtcccccttaccctagctctgctctccagtccacccacagacagctttagtgaaaccaaacatcagtgggtccctgactattggaagtgatgcttactgactggaggggagcaaaggatcagatctcagacccactctccttccagactcaagttctgggaggttaaggcttcctccacctggtatgtctttagggcctgttttagtctgaagtgctttcacagcaagggtggtcctagggaaaaact

SEQ ID NO: 12035 - DNA, 1248 bp, Homo sapiens; identical to SEQ ID NO: 5453
  SIMILAR (181)..(1173): 891254mologous to Homo sapiens putative p150,accession number U93574,Smith-Waterman Score=1585.

SEQ ID NO: 12036 - DNA, 1422 bp, Homo sapiens
  SIMILAR (730)..(1179): 901254mologous to Homo sapiens ALD protein (ALDP),accession number Z21876,Smith-Waterman Score=700.
atgattatctcagtagatgcagagaaggcctttgacaaaattcaacaacccttcatgctaaaaactctcaataaattaggtattgatgggatgtatttcaaaataataagagctatctatgacaaacccacagccaatatcatactgaatgggcaaaaactggaagcattccctttgaaaactggcacaagacaaggatgccctctctcaccactccttttcaacatagtgttggaagttctggccagggcaattaggcaggagaaggaaataaagggtattcacttaggaaaagaggaaatcaaattgtccctgtttgcagacgacatgattgtatatctagaaaaccccattgtctcagcccaaaatctccttaagctgataagcaacttcagcaaagtctcaggatacaaaatcaatgcacaaaaatcacaagcatttctatacaccaataacagacaaacagagagccaaatcatgagtgaactcccattcacaattgcttcaaagagaataaaatacctaggaatccaacttacaagggatgtgaaggacctcttcaaggagaactacaatccactgctcaatgaaataaaagaggatacaaacaaatggaagaacattccatgctcatgggtaggaagaatcaatatcgtgaaaatggccatactgcccaagaattggaaaaaaactactttaaagttcatatggaaccaaaaaagagcctgcatcgccaagtcaatcctaagccaaaagaacaaagctggaggcatcacactacctgacttcaaactatactacaaggctacagtaaccaaaacagcatggtactggtaccaaaacagagatatagatcaatggaacagaacagagccctcagaaataatgccacctatctacaactatctgatctttgacaaacctgagaaaaacaagcaatggggaaaggattccctatttaataaatggtgctgggaaaactggctagccatatgtagaaagctgaaactggatcccttccttacaccttatacaaaaatcaattcaagatggattaaagacttaaatgttagacctaaaaccataaaaaccctagaagaaaacctaggcattaccattcaggacataggcttgggcaaggacttcatgtctaaaacaccaaaagcaatggcaacaaaagccaaaattgacaaatgggatctaattaaactaaagagcttctgtgcagaaaaagaaactaccatcagagtgaacaggcaacctacaaaatgggagaaaatttttgcaacttactcatctgacaaagggctaatatccagaatctacaatgaactcaaacagatttacaagaaaaaaacaaacaaccccatcaaaaagtgggtgaaggacatgaacagacacttctcaaaagaagacatttag

SEQ ID NO: 12037 - DNA, 1388 bp, Homo sapiens
  SIMILAR (340)..(717): 381254mologous to Pseudorabies virus immediate-early protein,accession number M34651,Smith-Waterman Score=118.
atggataaattcctcgacacatacaccctcccaagactaaaccaggaagaagttgaatctctgaatagatcaataacaggctctgaaattgtagcaataatcaatagcttaccaaccaaaaaaagtccaggaccagatggattcacagccgaattctaccagaggtacaaggaggagctggtactattacttctgaaactattccagtcaatagaaaaagaagcaaccctccctaactcattttatgaggccagcatcatcctgataccaaagcctggcagagacacaacaaaaaaagagaattttagaccaatatccttgatgaacattgatgcaaaaatcctcagtaaaatactggcaaaccaaatccagcagcacatcaaaaagtttgtccaccatgatgaagtgggcttcatccccaggatgcaaggctggttcaatatacacaaatcaaaaaacgtaatccagtatataaacagaaccaaagacaaaaactacatgattatctcaatagatgcagaaaaggcctttgacaaaattcaacaactcttcatgctaaaaactctcagtaaattaggtattgatgggacgtatctcaaaataataagagctatctatgacaaacccacggtcaaaatcatactgaatgggcaaaaactggaagaattccctttgaaaactggcacaagacagggatgccctctctcaccactcctattcaacatagtgttggaagttctggccagggcaattaggcaggagaaggaaataaagggtattctattaggaaaagaggaagtcaaattgtccctgtttgcagatgacatgatcgtatatctagaaaaccccatcgtctcagcccaaaatctcccttaagctgataagcaacgtcagccaaagtctgaggatacaaaatcaatgtgcaaaaatcacaagcattcttatacaccactaacagacaaacagagagccaaatcatgagtgaactcccattcacaattgcttcaaagagaataaaatacctaggaatccaatttacaagggacgtgaaggacctcttcaaggagaactacaaaccactgctcaatgaaataaaagaggatacaaacaaatggaagaacattccatgctcatgggtaggaagaatcaatatcgtgaaaatggccatactgcccaagcctccgctgctgatacccaggcaaacagggtcgggagtggacctccagcaaactccaacagacctgcagctgagcgtcctgactgttagaaggaaaattaacaaacagaaaggacatccacaccaatacctcatctggacgtcaccatcatcaaagaccaaaggaaggcagctcctcgccagcaacagaacgaagctggatggagaatga

SEQ ID NO: 12038 - DNA, 821 bp, Homo sapiens
  SIMILAR (1)..(150): 581254mologous to Homo sapiens HDCMB45P,accession number AF068294,Smith-Waterman Score=139.
atgatcacaattgcttcaaagagaataaaatacctaggaatccaacttacaagggacgtgaaggacctcttcaaggagaactacaaaccactgctcaatgaaataaaagaggatacaaacaaatggaagaacattccatgctcatgggtaggaagaatcaatattgtgaaaatggccatactgcccaagattactgactcagcaatggagatgttatcggcaaaatgccattacctgcacattttggatatctctggttgtgtcttgcttactgaccaaatccttgaggaccttcagataggctgcaaacaactccggatccttaagatgcaatactgcacaaatatttccaagaccacccttgctgtgaaagcacttcagactaaaacaggccctaaagacataccaggtggaggaagccttaacctcccagaacttgagtctggaaggagagtgggtctgagatctgatcctttgctcccctccagtcagaaggcagctcaaagaatgtcatctaaagttcagcagcaggaatacaacactaatgaccctccacgttggtttggctatgatagggaaggaaaccctgttacagagcttgacaacataacatcatctaaaggagccttagaattaacagtgaaaaagtcaacatacagcagtgaagaccaagcagcgtgaccttcagcctcaagcaggaagaacaaaaaatcaagaacttggcaagttttctccatttgttgcaagtatgtttactagctgaatctcaataacaatgtaaacaagcaacaaaccatcttctgattcttattccaactaca

SEQ ID NO: 12039 - DNA, 4490 bp, Homo sapiens
  SIMILAR (1606)..(2742): 601254mologous to Homo sapiens Human secreted protein clone pt332_1 protein sequence SEQ ID NO:12,accession number Y94903,Smith -Waterman Score=1144.
atgaaggcagaaataaagatgttctttgaaaccgacgagaacaaagacacaacataccagaatctctggaacacattcaaagcagtgtgtagagggaaatttatagcactaaatgcccacaagagaaagcaggaaagatccaaaattgacaccctaacatcacaattaaaagaactacaaaagcaagagcaaacacattcaaaagctagcagaaggcaagaaataactaaaatcagagcagaactgaaggaaatagagacacaaaaaacccttcaaaaaaatcaatgaatccaggagctggttttttgaaaagatcaacaaaattgatagactgctagcaagactaataaagaagaaaatagagaagaatcaaatagatgcaataaaaaatgataaagggaatatcaccaccaatcccacagaaatacaaactaccatcagagaatactataaacacctctatgcaaataaactagaacacctagaagaaatggataaattcctggacatatacaccctcccaagactaaaccaggaagaagttgaatctgtgaatagaccaataacaggttctgaaattgaggcaataattaatagtctaccaaccaaaaaaagtccaggaccagacagattcacagctgaactctaccagaggtacaaagaggagctggtaccattccttctgaaactattccaatcaatagaaaaagagggaatcctccctaattcattttatgaggccagcatcatcctgatatcaaagcctggcagagacacaacaaaaaaagagaattttagaccaatatccctgatgaacatcgatgcaaaaatcctcaataaaatactggcaaaccaaatccagcagcacatcaaaaagcttatccaccaccatcaagttggcttcatccctgggaatgcaaggctggttcaatatatgcaaatcaataaatgtaatccagcatataaacagaaccaaaggcaaaaaccacatgattatctcaatagatgcagaaaaggcctttgacaaaattcaacaacccttcctgctaaaaactctcaataaattaggtattgatgggacatatctgacatatctcaaaataataagagctatttatgacaaacccacagccaatatcatactgaatgggcaaaaactggaagcattcccttttaagactggcacaagacagggatgtcctctctcaccactcctattcaacatagtgttggaagctctggccagggcaatcaggcaagagaaagaaataaagggtattcaattaggaaaagaggatgtcaaatttgtccctgttggcagatgacatgatggtatatcttagaaaatcccaatgtctcagccccaaaatcttctttaaggctggttaagcaacttcagcaaaagtcttcaggttacaaaatcaatgtgcaaaaatcacaagcattcttatacaccagtaacagacaaacagagagccaaatcatgagtgaactcccagttcacaattgcttcaaagagaataaaatacctaggaatccaacttacaagggatgtgaaaggacctccttcaaggagacctacaaaccactgctcaacgaaataaaaagaggacacaaacaaatggaagaacatttcatgctcatgggtaggaagaatcaatatcgtgaaaaatggccatactgcccaaggtaaatttatagattcaatgccatccccatcaagctaccaatgactttcttcacagaattggaaaaaactactttaaagttcatatggaaccaaaaaagggcccgcattgccaaggcaatccgaagccaaaagaacaaatctggaggcatcacactacctgacttcaaactatactacaaggctacagtaaccaaaacagcatggtactggtaccaaaacagagatatagatcaatggaacagaacagagccctcagaaataacgccgcatatctacaactatctgatctttgacaaacctgagaaaaatgagcaatggggaaaggattccctatttaataaatggtgctgggaaaactggctagccatatgtagaaagctgaaactggatcctttccttacaccttatacaaaaatcaattcaagatggattaaagacttaatcgttagacctaaaaccataaaaaccctagaagaaaacctaggcattaccattcaggacataggcatgggcaaggacttcatgtctaaaacaccaaaagcaatggcaacaaaagccaaaattgacaaatgggatctaattaaactaaagagcttctgcacagcaaaagaaactaccatcagagtgaacaggcaacctacaaaatgggagaaaactttcgcaacctactcatctgacaaagggctaatatccagaatctacaatgaactcaaacaaatttacaagaaaaaaacaaacaaccccatcaaaaagtgggcgaaggacatgaacagacacttctcaaaagaagacatttatgcagccaaaaaacacatgaaaaaatgctcaccatcactggccatcagagaaatgcaaatcaaaaccacaatgagataccatctcacaccagttagaatggcaatcattaaaaagtcaggaaacaacagtacgtttgactttggacaacatgagtttgaactacacaggtccacttatacgcggattgttttcagtaaaattacaccaatattggaagttctggccagggcaattaggcaggagaaggaaataaagggtattcaattaggaaaagaggaagtcaaattgtcccctctttgcagatgacatgattgtatatgtagaaaacccccttccgtctcagcccccatatctccctcaagctgataagcaacttcagcaaactcctcaggatacaaaatcaatgtacaaaaatcacaagcattcttatacaccaataacagacaaacagagagccaaatcatgagtgaactcccattctgttattgcttcaaagagaataaaatacctaggaatccaacttacaagggatgtgaaggacctcctcaaggagaactacaaaccactgctcaatgaaataaaagaggatacaaacaaacggaagaacattccatgctcgtaggtaggaagaatcaatatcgtgaaaatggccatactgcccaaggctatatggaatagcctgttgcttctaggatacaaacctgaacagcatgttactgtgctggatactgcaggcaactgtatcacattggtatctgtgtatcaaaacatatgtaaacatagaaaagataaacaggaaacattcatgggcaaagtacaagagggaccagtggattttaatgggaataagtatgaagagtttattgatatattttcagatcccatgttgcaacaaacctcgaagatactgccccttacaataactgcaatgtgctctgatgattggttgttagtcagaatgaaaataaggccttttgataagaacacagacattagaattggcgacatacacctgagagataactgtcctgtaacaagactgttgtcatttaactacgcgttttcttatcctgtcacttcttgtgggatcaagaaaattttcatttgcaacttagcaatgccattttcagctgttcaggatgatttcaaacaaattctcactatatccttatacttcttgaagggtggaaaaggtatcaacattttagctgtatttccaggatttcactcaagaatacctgtgaactggagaggggacctcaagaagtcaagatattggaataaaaaacaaccaagacagaaaatgagcaggttgtgtggaggcctacagtggcagttgtatggacgaagaagttttactggacaaaaattatctcatgaacttttcttcagcaacctggagacatacacattcatgacaaaatactttgggaaagcaaaattaaagcagattggggttttcaaagctgaaaccacagtgtttgtagagtgtactgaatcttggcttctggttgaaattagaggagcacctcttgtggaaaacctgcaacctaagcataatgagctgtctctaggaaatgggtgtcctgtaaccaggatgacgaatgatatctttgagttcacttatgctcttgagttttctggcatcatgaaatatgaatgcccatggggcattcttgttgagagtttcgtcaaatatcaaccagcgtttttgaatttcagaacttacatcccagtaagatgcgcccttgaaagaaagccttcctcatttgaacaaaatgtaatacagaataatactgataaatctaagaaaatagtccaaactcagtattatcaagcaggaaattggggtatcgaggaatgttacttaggtattccagaagaagacattgttatcacaggagatgacaactccttgtgtgttattgcccacgaagaccttccagtgggacaatatgtggagagggaagacggtgagattgaggatcctgaccctgcatag

SEQ ID NO: 12040 - DNA, 382 bp, Homo sapiens
  SIMILAR (7)..(297): 301254mologous to Homo sapiens keratin associated protein 9.2,accession number AJ406946,Smith-Waterman Score=102.
  misc_feature (1)...(382): n = a,t,c or g
agcagggcgccgtgctgcaccccacctgcgtcttcgctggcagccccgaggtgctgcacgcacaggagctggaggccagcaactgcgacggaagccgagacgacaaggacaagatgagcagcaaacaccagctcctcagcttcgtgtccctgctggagaccaacaagccgtacctggtgaactgcgtccgcatccctgccctccagtccctcctgctttttagccggnctttggacaccaatggtgactgctcccgcctggtggccgatggctggctggagctgcagctagcagacagtgaaagtgccatccgactcctggcggcttccctgcggctccgtgcccgctgggaaagtgccctggaccggcagctggcgcacca

SEQ ID NO: 12041 - DNA, 1590 bp, Homo sapiens
  SIMILAR (682)..(924): 401254mologous to Globodera pallida putative cuticular collagen,accession number AJ277425,Smith-Waterman Score=96.
cccaggggccagtgatggcgtggacatccaggatgtgaagttcaagcttcggcatgacctggcgcagctgcaggccgctgccagctcagcccaggacctgagccgcgagcagctggctctgctgaagctggtgctaggccggggcctgtacccacagctggccgtccccgacgccttcaacagcagccgaaaggactcagaccacgattttccacacgcaggccaagcagggcgccgtgctgcaccccacctgcgtcttcgctggcagccccgaggtgctgcacgcacaggagctggaggccagcaactgcgacggaagccgaggcatggctgcgtgctgggagtcacattcagatttggctgaccttcttgtctgagccaggccaccaaagccatgccacgacaaggacaagatgagcagcaaacaccagctcctcagcttcgtgtccctgctggagaccaacaagccgtacctggtgaactgcgtccgcatccctgccctccagtccctcctgctttttagccggtctttggacaccaatggtgactgctcccgcctggtggccgatggctggctggagctgcagctagcagacagtgaaagtgccatccgactcctggcggcgtccctgcgggctccgtgcccgctgggaaagtgccctggaccggcagctggcgcaccagtgcccagcagcagctggaggaggaggaggaggatacgccagtcagccccaaggaggtggccaccctgagcaaggaactcctgcaattcacggcatccaagattccttacagcctccggcggctcacagggctagaagtccagaacatgtatgtgggaccccagaccatcccagccaccccccatcttcctggcctctttggcagctccaccctgtccccccaccccacaaaggggggtctacgcagtcactgacttcctcacctacaactgcctcacggaatgacacagacctgtacagcgactgtctccgaaccttctgggacctgcccccactgtgggcctgcatgcgcccctcacgccctgggagcgcattcgcccattgagggaacaacttgcccccaggggccccacagggttggggcccccaggggctgaggaagctgccctcgaaaccctccagaagaacatctgtcctgcagaggccctaccactgcgaggcctgcgggaaggacttcctctttacacccacagaggtgctgcgccaccggaagcagcacgtgtgagctgggccaggagccctgcccacctccgtgcagctgacctgccctccagcccaggactaggggcaggactcttgcctgaacccccagcctgggcttagccctgtggtcctgtcccagtgcagagggcctggagcacggattgtgaataaagcctcacatgctgatacacactgttaggcctgcacctgcccatccagaaagcagcagctgccttgttagtcctccccagggtctagctttccttcttcctgctgcagggggctgcctgaggggtcctgggtaggaggggcgttagagccagcagggacctcccatgtctccagattccaggtgcagggtctt

SEQ ID NO: 12042 - DNA, 442 bp, Homo sapiens
  SIMILAR (152)..(388): 1001254mologous to Homo sapiens phospholipase C beta 1,accession number AY004175,Smith-Waterman Score=408.
  misc_feature (1)...(442): n = a,t,c or g
nctgagtcatgactaccggcacgaattcccgtgtcgagccacgcgtccgcggccgggtgtataagaagaaaatggataaaaagaggcaggagaagataacagaagctaaatccaaagacaaaagtcagatggatgaggagaagacagatatgaaaagcccaagctgcaggtggagctggagcaagaataccaagacaaattcaaaagactgcccctcgagattttggaattcgtgcaggaagccatgaaaggaaagatcagtgaagacagcaatcacggttctgcccctctctccctgtcctcagaccctggaaaagtgaaccacaagactccctccagtgaggagctgggaggagacatcccaggaaaagaatttgatactcctctgtgaatgctcctgccaggccttcagaaattgcatgggcactccagcgtcatcgga

SEQ ID NO: 12043 - DNA, 5150 bp, Homo sapiens
  SIMILAR (4853)..(3663): 791254mologous to Homo sapiens Open reading frame extends without a stop codon for the full 5' nucleotide sequence. The initiation codon has yet to be identified,accession number AX029176,Smith-Waterman Score=1617.
tgactgtaaaaaatcttcaatggatgaggggactgctggaagtgaggctatggccacagaagaaatgtctaatctggtgaactatattcagccagtcaagtttgagtcatttgaaatttcaaaaaaaagaaataaaagttttgaaatgtcttccttcgtggaaaccaaaggacttgaacaactcaccaagtctccagtggaatttgtagaatataacaaaatgcagcttagcaggatatatccaaaaggaacacgtgtggattcatccaactatatgcctcagctcttctggaatgcaggttgtcagatggtggcacttaatttccagacaatggacctggctatgcaaataaatatggggatgtatgaatacaacgggaagagtggctacagattgaagccagagttcatgaggaggcctgacaagcattttgatccatttactgaaggcatcgtagatgggatagtggcaaacactttgtctgttaagattatttcaggtcagtttctttctgataagaaagttgggacttacgtggaagtagatatgtttggtttgcctgtggatacaaggaggaaggcatttaagaccaaaacatcccaaggaaatgctgtgaatcctgtctgggaagaagaacctattgtgttcaaaaaggtggttcttcctactctggcctgtttgagaatagcagtttatgaagaaggaggtaaattcattggccaccgtatcttgccagtgcaagccattcggccaggctatcactatatctgtctaaggaatgaaaggaaccagcctctgacgctgcctgctgtctttgtctacatagaagtgaaagactatgtgccagacacatatgcagatgtcatcgaagctttatcaaacccaatccgatatgtgaacctgatggaacagagagctaagcaattggctgctttgacactggaagatgaagaagaagtaaagaaagaggctgatcctggagaaacaccatcagaggctccaagtgaagcgagaacgactccagcagaaaatggggtgaatcacactacaaccctgacacccaagccaccctcccaggctctccacagccagccagctccaggttctgtaaaggcacctgccaaaacagaagatcttattcagagtgtcttaacagaagtggaagcacagaccatcgaagaactaaagcaacagaaatcgtttgtgaaacttcaaaagaaacactacaaagaaatgaaagacctggttaagagacaccacaagaaaaccactgaccttatcaaagaacacactaccaagtataatgaaattcagaatgactacttgagaaggagagccgctttggaaaagtccgccaaaaaggacagtaagaaaaaatcggaacccagcagccctgatcatggttcatcaacgattgagcaagacctcgctgctctggatgctgaaatgacccaaaagttaatagacttgaaggacaaacaacagcagcagctgcttaatcttcggcaagaacagtattatagtgaaaaataccagaagcgagaacatattaaactgcttattcaaaagttgacggatgtcgcagaagagtgtcagaacaatcagttaaagaagctcaaagaaatctgtgagaaagaaaagaaagaattaaagaagaaaatggataaaaagaggcaggagaagataacagaagctaaatccaaagacaaaagtcagatggaagaggagaagacagagatgatccggtcatatatccaggaagtggtgcagtatatcaagaggctagaagaagcgcaaagtaaacggcaagaaaaactcgtagagaaacacaaggaaatacgtcagcagatcctggatgaaaagcccaagctgcaggtggagctggagcaagaataccaagacaaattcaaaagactgcccctcgagattttggaattcgtgcaggaagccatgaaaggaaagatcagtgaagacagcaatcacggttctgcccctctctccctgtcctcaagaccctggaaaagtgaaccacaagactccctccagtgaggagctgggaggagacatcccaggaaaagaatttgaatactcctctgtgaatgctcctgccaggccttcagaaattgcatggccactccagcgtcatcggactctctcttattacaaagatcactgcccaggaccatctttccgaaaagcattcctttagcctaaaatccccaccaaagggagagttccagaggaatccatgaagaattcccatgcccaggctccatgtgtcatgtggaaacctccacaggtctgctagtgaagaatgcatgtatgtgagatttttgttttctttccaatagcaaattcaaagcaagcaacttgcaggctccatggaacttttaatgaaggacagtgtcttctttgaagaaaatcaagctcgtgtttttattcgaagctctggtgtaaaatatttcaaagtcatagaaatagtttgagaaatgcatagcattatttaacactattgaacagccgactttgagcattgtttcttctaactgcccctcaactaccattatcttcaagtcaacatgcatattacattttcatcctttgctttgcaagcactggtggcttgcagtttgctaatttatttatcatagagtcatcaatgtatttgttgctgacatggttttattagatactgtagtgattcaaataagttttctatttgaaaaaaaaaatcacttgattgtatccttgcccagtgaagccatcctaagacttagcaatatggattgtacatttggctgcatgagcaagtcggccgcacacttccagacagtgtgctgtttgaattgactatttgcactcaaagtctgggtattcattggttattggcctgaaatgatcaaataactacaaatgatctgttgaataaaaatagttgagctgatatatgttaagcagatattcaatcagaatgaacaggttccggtggttattttgccgtttgacattttttatggttcatttatttttaatatagagaggaagattgaatatttatctagagaatacaaagacccacatgtaaatgataggtattatctccatgtatatatgtacccacttagtcatgtaagtgcatatacacatacacacacatgagtgtagacatgtgtttattaattgacaatgacccaaatctcttccacaagacttaaaaccaaattcagggacaaatggatagagaagaaaagggtcaaacatcgagattacatggatgttaaattatatggagacgctaagaaataattgatggagccattgatgcaaaccgaagtagatttagaacttatatgaatttgatttatattttgcaagatcaaaaattagatgttaagtatcagattttaagcttgttttaatggtcaaaaaattaggacagaaataatatggacatttattagtatcttccataatttttaagtctgacacatttctattttattctaacataaaaaaacttccattatatatttactaagtatatttaattcacttaactctgtctttataagttcctattttagatggaataagagaaacaaattatatcaaggtaaaactgatcaaaagcataattgaaagttctgaaaaaagaaaaataataatatgtagaaaaatgtaacttagagagtaacacatgaacattgaagttaaaacccagaagccagatgctcacagttttattttaccttaaaataaacctgtctgactgtagctttgtgaaatatcttaaaacgcaaaaaccaattgtgtcctgaaaattgtttcaagaatttaatatttttatgaaaattattttatttaactttaagcaataactagagattacaattaaattttaatcaaaatgaaggcttagttcaaacataaggaaacagtgtttgattaaaaaaaacacatctagtaagacgtaaggggaaaatcacatcctctttggagatgattatattttgatctgaagggtttggggtgttcattagacacttaataaaacttaacttccaatgaaaaagaaatcttttgtaaatcattctacttttgcactttgaaagaaaggcgttaatcataaagaagcaagaatggtcaaaatcgaatgctgcatttttataaacaaaattacagactgtctgaaattgaagaagaatgaactaataatagcattcataaccaaacacaatgatgattattgcagaacattgtatcacattttagtccagagatagaataaagttgaataaccttgacttacacaaaactgttttggtagttggatttcattatcttagtgaatttagtcattttacaatatgtttgtatttggccatttactgtaatcacatttttatatctgtacaatgacactttttgcagttgtggggtagtgtgtaacactgtccatcttgcatcattgaaactactacaatgatactatcatttaataatattaatattacttgaaatagactaagataaagaaaaggggtctgtatgatgtgcagttttgtgcctttatgtatttgccttgttctttgtcgaatgtgtgaaattccgtactgtggtttttcctataatagaaagtagagctgtgtattaaattagactgtgtctctctgatacctttacactactgagaatagcatggttttggccatgtaaaccaattttcaaagttctaatgacatagccatgtgtttttggttttttatatttcattttaaaatttgagtatcaccatacattaattaatactcctgtagtagataagctgtcattaagtaattcccaaaaaaagggccatttgcttgcattactttgaatttaatgttgcgcttgtgcactgtgttaatattgtttgtgatggattggacgttgtgactcttgccttttaagaagaaaaaaaagataggacaaagtatttgaagctcttaaaatgtacatattttggttcttctatctcaaattatttaaaatgcataattcacatttttgtaataattctatgcaattttgtggcatgatgtttcttccacttgtaattttatgtgctttcatcacaaatccaaaggaaagaataaaaatttcttaacac

SEQ ID NO: 12044 - DNA, 1197 bp, Homo sapiens
  SIMILAR (1958)..(2176): 281254mologous to Lycopersicon esculentum cell wall hydroxyproline-rich glycoprotein,accession number M11759,Smith- Waterman Score=70.
atgctgcaggtggagctggagcaagaataccaagacaaattcaaaagactgcccctcgagattttggaattcgtgcaggaagccatgaaaggaaagatcagtgaagacagcaatcacggttctgcccctctctccctgtcctcagaccctggaaaacaaattcaaagcaagcaacttgcaggctccatggaacttttaatgaaggacagtgtcttctttgaagaaaatcaagctcgtgtttttattcgaagctctggtgtaaaatatttcaaagaaccattcttggatccaccaaagcttctgccaggccccttcatctattctcccaatgcaacctgtatcagtcacccactgctgcataacaagccacagcaaaacttgatgtttgaaataactaccacttactattggttgtgggcctatggatgggtagatggctctgctgatctgagctgggctgggcttatctcagctgggctcatctatgccgctacggcctcactggctccccatggagctgctggactctgggacgtcaccccaagtggattttggcctgctgtgagcgaaacacgtggctgtacaagaagcatggcactggcatctgcatccagtgagaggcttacggtcatggtagaaggtgaagggggagcaaatgtgtcccgtgtcatgacaagaaataattggcttgtgagaatcaacattgaagctggaaaaatgatggcatccgaacaagtagacacagccctagtcaaggcaataaactacactaaagacagaggagaaagactcaaagttgttctaacatgttctgctcatgaaacagagacaaccatgtgtggtgcctgcattcttggcctgcggggagtggaaaggagacaaagagtaaaacacggtgggaaagaagaaaaagaggttaagaaaagcaaatgtgcctactccagtgtagcattttggagaagacatggcttcaggaatgatttcccagaaattttgaaggtccttaaaactaaagaagaaagtcctgtgatatctgcaaaggctcatttgcagaaactggcccagcccaagtgtacagaaacaaagaaatgctacagccagtcaaaaccatttggctcactggttcttatttcaaatcagcagaataaacaaacttcagtccaagtaggaactggttctgctgtcctcttcttttaa

SEQ ID NO: 12045 - DNA, 2562 bp, Homo sapiens
  SIMILAR (1)..(111): 941254mologous to Homo sapiens low-Mr GTP-binding protein Rab31,accession number U59877,Smith-Waterman Score=188.
atggagagaggaacgggagagactagaggggcggaagggacgttaggagggaggcagggaggcagggaggcagggaggaacggagggagagacagagcgacgcagggactgggggcggggccgagggagccggggacggacggggggaggaaggcagggaggaaaagcggtcctcggcctccgggagtagcgggaccgcccgcctccgggaaaacggtcagcgtccggcgcgggctgagggctgggcccacagccgccgcgccggccggcggggcaccacccattcgccccggttccggggcccagggagtgggcggtttcctccgggacaaaagaccgggactcgggttgccgtcgggtcttcacccgcgcggttcacagaccgcacatccccaggctgagccctgcaacgcggcgcgaggcccacagacccggccacggaggagccacacgcaggacgacggaggcgtgattttggtttccgagtggctttgccctcccgaaggcggcctgttgctcacgtctctccggcccccgaaaggctggccatgccgactgtttgctcccggagctctgcggcacccggaaacatgcagggaagggtgcaagcccggcatggtgccttcgctctccttgccaggttccaaacccgccacactgcagactcccccacgttgccgcacgcgggaatccatcgtcaggccatcacgccggggaggcatctcctctctggggtctcgctctggtcttctacgtggaaatgaacgagagccacacgcctgcgtgtgcgagaccgtcccggcaacggcgacgcccacaggcattgcctccttcacggagagagggcctggcacactcaagactcccacggaggttcagttccacactcccctccaccctcccaggctggtttctccctgctgccgacgcgtgggagcccagagagcggcttcccgttcccgcgggatccctggagaggtccggagagccggcccccgaaacgcgcccccctcccccctcccccctctcccccttcctcttcgtctctccggccccaccaccaccaccgccaccacgcctcccccaccaccccccccccccaccaccaccaccaccaccaccccgccggccggccccaggcctcgacgccctgggtcccttccggggtggggcgggctgtcccaggggggctcaccgccattcatgaaggggtggagcctgcctgcctgtgggcctttacaagggcggctggctggctggctggctgtccgggcaggcctcctggctgcacctgccgcagtgcacagtccggctgaggtgcacgggagcccgccggcctctctctgcccgcgtccgtccgtgaaattccggccggggctcaccgcgatggccctcccgacaccctcggacagcaccctccccgcggaagcccggggacgaggacggccacggagactcgtttggaccccgagccaaagcgaggccctgcgagcctgctttgagcggaacccgtacccgggcatcgccaccagagaacggctggcccaggccatcggcattccggagcccagggtccagatttggtttcagaatgagaggtcacgccagctgaggcagcaccggcgggaatctcggccctggcccgggagacgcggcccgccagaaggccggcgaaagcggaccgccgtcaccggatcccagaccgccctgctcctccgagcctttgagaaggatcgctttccaggcatcgccgcccgggaggagctggccagagagacgggcctcccggagtccaggattcagatctggtttcagaatcgaagggccaggcacccgggacagggtggcagggcgcccgcgcaggcaggcggcctgtgcagcgcggcccccggcgggggtcaccctgctccctcgtgggtcgccttcgcccacaccggcgcgtggggaacggggcttcccgcaccccacgtgccctgcgcgcctggggctctcccacagggggctttcgtgagccaggcagcgagggccgcccccgcgctgcagcccagccaggccgcgccggcagagggggtctcccaacctgccccggcgcgcggggatttcgcctacgccgccccggctcctccggagccggggcgctctcccaccctcaggctcctcggtggcctccgcacccgggcaaaagccgggaggaccgggacccgcagcgcgacggcctgccgggcccctgcgcggtggcacagcctgggcccgctcaagcggggccgcaggccaaggggtgcttgcgccacccacgtcccaggggagtccgtggtggggctggggccggggtccccaggtcgccggggcggcgtgggaaccccaagccggggcagctccacctccccagcccgcgcccccgggacgcctccgcctccgcgcggcaggggcagatgcaaggcatcccggcgccctcccaggcgctccaggagccggcgccctggtctgcactcccctgcggcctgctgctggatgagctcctggcgagcccggagtttctgcagcaggcgcaacctctcctag

SEQ ID NO: 12046 - DNA, 407 bp, Homo sapiens
  SIMILAR (42)..(404): 531254mologous to Homo sapiens p40,accession number U93571,Smith-Waterman Score=322.
gtcaccatcatcaaagactaaaggtggataaaaccacaaagatggggagaaaccagagcagaaaagctgaaaattctaaaaaccagagcacctcttctcctccaaaggatcgcagctccttgccagcaatgaaacaaagctggatggagaaggactttgacaagttgacagaagtagacttcagaaggatgtttgaacccatcacaaggaagctaaaaaccttgaaaaaaagattcaatgaatggctaactagactaaacagtgtagagaagaccttaaatgacctgatggagctggaaaccatggcacgagaactacgtgacccatgcacaagcttcagtagccaattcaatcaagtggaagaaagggtatcagtgattgaagatcaaacgaatgaaatgaagtga

SEQ ID NO: 12047 - DNA, 603 bp, Homo sapiens
  SIMILAR (303)..(4): 711254mologous to Homo sapiens PRO2221,accession number AF116695,Smith-Waterman Score=358.
tcatgccatggttttcagctccatcaggtcatttaaggtcttctctttactgtttattctagttagccattcatctaatcttttttcagggtttttagcttccttgcgatgggtttgaacatcatcatgtagctcagagaagtttgttattacccaccttctgaagcctacttctgtgaactcatcaaaatcattctccttccagctttgttccattggtggcaaggagctgcgatcctttggaggagaagaggctctctggtttttagaattttcagcttttctgctctggtttctccccatctttgtggttttatctacctttggtctttgacgatggtgacctactttagcctcagcaatggtggacgcccctccccctgccaggctgctgccccgcaggtcaatctcggactgctgtgctagcagtgagcaaggctctgtgggtgtgggacctggattggggaggcggttgccgccgctgctgctgacggtgtgacgttctctgttccggtcacaccacatacgttccgccattcctatgcgatgcacatgctgtatgccggtataccgctgaaagttctgcaaagcctgatgggacat

SEQ ID NO: 12048 - DNA, 995 bp, Homo sapiens
  SIMILAR (1)..(990): 991254mologous to Escherichia coli ORF3,accession number D90212,Smith-Waterman Score=1673.
aaatctcagctagtgcttcagacaatgtgtttatgtccgtttcatctccgtcctgctccagctgtttctttaccttgtacaggtacctgtggaaaagtgaaaagccactctactactcatttgtcgacaaaccagtagcatataaaaaaagagaaatggtggtgaatctacagaaacaatttaagcacacgggccgagtccaaccagcaacctgctggaaaaaaaagccccttcaagttttcagttcaactggactgaagaggacactgatagaacgtgtttcccatggacacagccttcagggagtcctgaaagagaaaggccaatcactgctgactaagaattcattatattggcttagtacacagaaattctgaagatgctatggacaccatgtgccaccctatgaagaatcaatttattttctgagtaacaggtttaacctaaatctcttctccttcctgctcagaataaagacttcctttctccaatgaagaagtgagcttagttgagaaggaaactttttgaggaaaaaatacagtgtaaaaaggaaagaaatcaagatccaaggaaagtgaggacgacattgagaaaatgaaatagaaactttctggaaaaatattttaatagtgataataacatcagattttaatataacattccagagaattgtggaaaatactgcatatatatgtatagactctgacacatatttacatatatatcaagtgtgcttagaaaaatgtatattgtaaagcaggtgagcttcatttgattttatttttcagagtatgaacattctaagagaaagttaaaacaatagcaaattgtataattgtatccagaaatgtatactcatcgtattttaaagctaaatttattttttaaactagatcccttcattattctttatgccccagagtaaatcccagatggatcaaagatctaaacataatctttcatatgtaaaaatataaaagtattagtagaaaaca

SEQ ID NO: 12049 - DNA, 1090 bp, Homo sapiens
  SIMILAR (8)..(412): 991254mologous to Rattus norvegicus tropomyosin,accession number L24775,Smith-Waterman Score=673.
atggccccgaaaagcctcttgaactctgagcctcagccgcctgtctataaatataaacaagccctgagaccagctcagaaagaagacgtgaagaccaagcgcagcaccgtgggacgtgcccaacccagtgcccggctccaacgggctcgacacacggaggtgctgccctggccatcctcagtggcgctggccacacaccctggagtgtggagccatggcactgctgccaggcatgtggagggcaaagaagcctcagcaatggtggacgcccctccgcctgccaggctgctgcctcgcaggtcaatctcagactgctgcactagcagtgagcaaggctccgtgggcgagggaccagctgagccaggctcaggttataatctcctggtgtgccgtttgctaagaccattggaaaagcgcagtatttgggtgggagtgtcccgattttccagctattgtacacatgtgacaacctatgaagaatcaaattattctctgagttatcagtttatactaaatctcttctccttcctgctcagaataaagacttcccttctccatgaagaagtgagcttagttgagaagaaactttttgagaaaaaatacagtgtaaaaagaaagaaatcaagatccaagaaagctccagggtgggacagtcactggtgcttctgctggctgggacaacagggccccactgtggaacttgcagcccgtgaccccctcctaacggctcctctcagttcccgtggtcccaaaagccctctgtcccgtgcagggctgccccacagtggccttccacatcctcctgatagcagaggcccccgccacccccagggccaccttctgcagctgtgccggcagcttctctgcccagggcacctgcactgacacggagcaccctcagccctacggtcctgtaatattgtacaaaggacgacctggagacacacagaggttcaattacatccccagggccgtgttggactcttgctctatgccatctcccttcaaccctccctacctcagctccccaagcagagttcatggtttccgagcacagagctcagacctccatgccagtacccacaggcag

SEQ ID NO: 12050 - DNA, 362 bp, Homo sapiens
  SIMILAR (35)..(361): 831254mologous to Homo sapiens histone H2B,accession number Z83336,Smith-Waterman Score=449.
gctgctcgtggtacgcttgtagttcgccttcaacatgccggaaccagggaagatcgttcccgcgccctagaagggctcgaagaaagccgtgactaaggcgcagaacaaggacggcgagaagcgcatgctcagccgcaaggagagctactccgtatacgtgtacaaggtgctgaagcaggtgcaccccgacaccggcgtctcctctaaaggcatgggaatcatgaactccttcgtcgacgacatcttggaacgcatcgcgggtgaggctttccgcctggcgcattacaacaagcgctcgaccatcacctccagggagatccagacggacgtgcgcctgctgctgacccgggagatggtcaagg

SEQ ID NO: 12051 - DNA, 473 bp, Homo sapiens
  SIMILAR (226)..(525): 401254mologous to Mus musculus acidic ribosomal phosphoprotein P1,accession number U29402,Smith-Waterman Score=95.
attcttactcctttatcttgttgcaatgcctgatccagctaagtccgctcccgccccgaagaagggctccaagaaggcggtgaccaaggcgcagaagaaggatggcaagaagcgtaaacgcagccgcaaggagagctactccgtatacgtttacaaggtgctgaagcaagtccaccccgacaccggcatctcctccaaagccatggggatcatgaattcctttgtcaacgatatcttcgagcgcatcgccggcgaggcttcccgcctggctcattacaacaagcgttcgaccatcacctccagggagatccagacagccgtgcgcctgctgctgcctggggaactggccaagcacgccgtgtccgagggcactaaggccgtcaccaagtacaccagctccaaataaatggacgcatgttcaaacccaaaggctcttttcagagccacttaatgatttcaattaagagttttat

SEQ ID NO: 12052 - DNA, 563 bp, Homo sapiens
  SIMILAR (289)..(636): 911254mologous to Homo sapiens Similar to ribosomal protein S2,accession number BC001795,Smith-Waterman Score=545.
ctacacagtgctatgccagagccagcgaagtctgctcccgccccgaaaaagggctccaagaaggcggtgactaaggcgcaaaaaaaagacggcaagaagcgcaagcgcagccgcaaggagagctattccatctatgtgtacaaggttctgaagcaggtccaccctgacaccggcatttcgtccaaggccatgggcatcatgaattcgtttgtgaacgacattttcgagcgcatcgcaggtgaggcttcccgcctggcgcattacaacaagcgctcgacccatcaccctccccagggagatcccagacggccgtgcgcctgctgctgccctggggagttggccaagcacgccgtgtccgagggtactaaggccgtcaccaagtacaccagcgctaagtaaacagtggagtggctgaaacttctcagcaggcgcatctacactagtgacctgaggagagaaaccctaaccccacaatggctgcatcttctctgaagacgagactgatgctcatctttgaaatgaaaggcagtgtgtgcattcctccatgatagcatccacaaaca

SEQ ID NO: 12053 - DNA, 509 bp, Homo sapiens
  SIMILAR (22)..(399): 991254mologous to Homo sapiens histone H2B,accession number Z80779,Smith-Waterman Score=623.
ggcgggattgaatgctttaagatgcctgagccagccaagtctgctcccgccccgaagaagggctccaagaaggcagtgaccaaagcgcagaataaagatggcaagaagcgcaagcgcagccgcaaggagagttactctgtgtacgtgtacaaggtgctgaaacaggtccatcccgacactggcatctcttccaaggccatgggcatcatgaattctttcgttaacgacatatttgagcgcatcgcgggcgaggcttcccgcctggcgcattacaacaagcgctcgaccatcacctccagggagatccagacggccgtgcgcctgctgcttcccggagagctggccaagcacgccgtgtcggagggcaccaaggccgtcaccaagtacaccagctccaagtaaacattccaagtaagcgtcttaacacctaaccccaaaggctcttttaagagccacccagatacccactaaaagagctgtggccagacgccaaattttatttggcggcg

SEQ ID NO: 12054 - DNA, 728 bp, Homo sapiens
  SIMILAR (370)..(1032): 931254mologous to Rattus rattus ribosomal protein S2,accession number X57432,Smith-Waterman Score=1051.
cccacgcgtccgcggacgcgtgggccgcgtttgtactgtgtcttaccatgcctgaaccggcaaaatccgctccggcccctaaaaagggctccaagaaagccgtcaccaaagcccagaagaaagacggcaagaagcgcaagcgcagccgcaaagagagctactccatctacgtgtacaaggtgctgaagcaggtccaccccgacaccggcatctcgtccaaggccatgggcatcatgaactccttcgtcaacgacatcttcgagcgcatcgcgggagaggcttcccgcctggcgcactacaacaagcgctccaccatcacatcccgcgagatccaaacggccgtgcgcctgctgctgcccggcgagctggccaagcacgccgtgtccgagggcaccaaggcggtcaccaagtacaccagctccaagtgagtccctgccgggacctggcgctcgctcgctcgagtcgccggctgcttgactccaaaggctcttttcagagccacccacctaatcactagaaaagagcttgttcacttattcccttagtttcttttcataaagtaagttattttagtgtgaaggtcatgggaaatggcatacgtagctttttaactatttggaactcgaggtccccagtgcgtcattggatttgcttttgaatctagagcgtgtctttactcattgtgctgcttagccttcccaggagtcggttctcaattaggctgttgg

SEQ ID NO: 12055 - DNA, 675 bp, Homo sapiens
  SIMILAR (84)..(299): 1001254mologous to Homo sapiens histone H2B,accession number Z83336,Smith-Waterman Score=366.
cggacgcgtgggtaagcggtaggttgacagaactaccgtcttcctgtttttttcctccaattttccggcagttactcccagtcatgcccgagccctcaaagtccgctcctgccccgaagaaaggctccaagaaggcagtgacaaaggcccaaaagaaggacggcaagaagcgcaagcgcagccgcaaggagagctactccgtgtacgtgtacaaggtgctgaagcaggtccaccccgacaccggtatctcgtccaaggccatgggcatcatgaactccttcgtcaatgacatcttcgaggcgcatcgcaggcgaggcttcccgcctggcgcattacaacaagcgctcgaccatcacctccagggagatccagacggccgtgcgcctgctgcttccgggggagctggccaagcacgccgtgtcggagggcaccaaggccgtcaccaagtacaccagttccaagtaactttgccaaatttccaagttgatcgtgatgttgatccgggactcggtgtggtgacggcccgccctgagcacgaaagtgcacgctcttgacaacttccttatgtttggagctttctccaccaccacccccgcccattttcttgtaaaatttttaccatgcagatatgtaataactgcaagtaaaggctgaagacaatgtgagctgaacacg

SEQ ID NO: 12056 - DNA, 937 bp, Homo sapiens
  SIMILAR (87)..(155): 731254mologous to Homo sapiens alternative HHLA3 protein,accession number AF126164,Smith-Waterman Score=85.
cgcgcccctcgagatcgtcgacattagtccgtgcggtggaattctcgatctgctgctcgtctcaggctcgtagttcgccttcaacatgccggaaccagcgaagtccgctcccgcgcccaaagaagggctccgaagaaagccgtgactaaggcgcagaagaaggacggcaagaagcgcaagcaagccggcaaggaagagcctactccgtatacgtgtacaaggtgctgaagcaggtccaccccgacacctggcatctccttttaaggccatggggaatcatggaactcctttcgttcaacgacatttttcggaacggcatcgcggggttgagggtttcccgcttggggcgcatttaacaacaaggcgtttcgaccattcaccttccaggggagatccatgacgggccgttgcgccttgcttgcttgcccgggggagtttggccaagcaaggccgttttccgaggggcaccaaggcccttcaaccaagttaacaccagcgtttaagttaaactttgccaatggagggacttttctctgggaatttccctgataatggaccaagaaaagcttcttatcaaaaagaagcaacaattgccttcggttacctcattatctactgcagaaaaagaagaacgagaatgcaaccttaccttagaatggccttttccacaagctaaagctggcctcttgatctcattcagattccaaagagaatcatttacaagttaatttctgtctccttggtccattccttctctctaataatcatttactgttcctcaaagaattgtctacattacccatctcctcttttgcctctgagaaagagtatataagcttctgtaccccactggggggttggggtaatattctgtggtcctcagccctgtaccttaataaatttgtatgcctttttttttaaaaaaaaaaaaaaaaaa

SEQ ID NO: 12057 - DNA, 587 bp, Homo sapiens
  SIMILAR (217)..(546): 701254mologous to Homo sapiens TAXREB107,accession number D17554,Smith-Waterman Score=371.
ttctccctcgtggatctcttttctgtctgtgtcagtcaatgctgccatgtaacagccacctgcaaactcagtgtatacacatgcatttctctcacactgccaggtctgctggggtggctctgctgcctgggcctcgtcctggggctgggctggagagactgcagctccctgggcaccctcttcccacagtgtggaaggtggaggctcccagggcacaagcagaacacgtgccgccctaaggccagaggcggagctggctgctgtcgcttctgcccacattccatgggtgctgtcgagctgtaggtccaagccccacatcaggggagtgagtggggtacaatcctcccatgctgggccccactctggagataggcctggggaatgcccaagaaggaagcccagcccttctgggattttcacatcccacagagaatgggtgctggcagccaacggcaacgaggagaaaagctgaccgccttctcagatcaggatgaggtgtttttacaccaaccccgaggatctgcagccttctcaggttaaattaaacctgtcacagacacagggaggggaaagagcacctaaccacc

SEQ ID NO: 12058 - DNA, 404 bp, Homo sapiens; identical to SEQ ID NO: 6305
  SIMILAR (200)..(313): 841254mologous to Homo sapiens PRO1546,accession number AF116638,Smith-Waterman Score=180.
  misc_feature (1)...(404): n = a,t,c or g

SEQ ID NO: 12059 - DNA, 244 bp, Homo sapiens
  SIMILAR (1)..(216): 691254mologous to Homo sapiens Human secreted protein, SEQ ID NO: 7348,accession number G03267,Smith-Waterman Score=249.
atggataaattcttcgacacatacaccctcccaaaactaaaccaggaagaagttgaatctctgaatagaccaataacaggctctgaagttgaggcaataattaatagcttaccaaccgaaaaaagtccaggaccagatggattcacagccgaattccaccggacatggatgaagctggaaaccatcattctcagcaaactatcacaaggagaaaaaaccaaacaccgcatgttctcactcatag

SEQ ID NO: 12060 - DNA, 2142 bp, Homo sapiens; identical to SEQ ID NO: 7840
  SIMILAR (237)..(881): 521254mologous to Homo sapiens TAXREB107,accession number D17554,Smith-Waterman Score=404.

SEQ ID NO: 12061 - DNA, 1965 bp, Homo sapiens; identical to SEQ ID NO: 7403
  SIMILAR (241)..(510): 881254mologous to Coturnix coturnix qdgl-1,accession number AF190625,Smith-Waterman Score=447.

SEQ ID NO: 12062 - DNA, 733 bp, Homo sapiens
  SIMILAR (370)..(510): 721254mologous to Homo sapiens unknown,accession number AF149422,Smith-Waterman Score=169.
gaatatggatgaagctggaaaccatcattctgagcaaactatcgcaaggatagaaaaccaaacaccgcatgttctcactcacaggtgggaatttaacaatgagaacacttggacacaggctgctgccctcgctaccgcaccgacttcgcccgtgtgctcgcctgcacttgcgctgcccgccatggccaccgcccagccgtcgcaggtgcgccagaagtacgacaccaactgcgacgccgccatcaacagccacatcacgctggagctctacacctcctacctgtacctgtctatggccttctacttcaaccgggacgacgtggccctggagaacttcttccgctacttcctgcgcctgtcggacgacaaaatggagcatgcccagaagctgatgaggctgcagaacctgcgcggtggccacatctgccttcacgatatcaggaagccagagtgccaaggctgggagagcgggctcgtggccatggagtccgccttccacctggagaagaacgtcaaccagagcctgctggatctgtaccagctggccgtggagaagggcgacccccagctgtgccacttcctggagagccactacctgcacgagcaagtcaagaccatcaaagagctgggtggctacgtgagcaacctgcgcaagatttgttccccggaagccggcctggctgagtacctgttcgacaagctcaccctgggcggccgcgtcaaagagacttga

SEQ ID NO: 12063 - DNA, 239 bp, Homo sapiens
  SIMILAR (111)..(296): 771254mologous to Homo sapiens Human secreted protein, SEQ ID NO: 6833,accession number G02752,Smith-Waterman Score=247.
atggatgaagctggaaaccatcattctcagcaaactatcgcaaagacaaaaaaccaaacactgcatgttctcactcataggcacctaagagagaaaatcttcatcctacccttgggtcaaccacttagtcacgaatctctcatagtggtgtggaatccccggtcaaactggacagctgtgcaagcttttggcttagtgaagtcccacttcttccctaaagatacagtgtcctactcaag

SEQ ID NO: 12064 - DNA, 270 bp, Homo sapiens; identical to SEQ ID NO: 11091
  SIMILAR (49)..(117): 691254mologous to Homo sapiens Human secreted protein, SEQ ID NO: 6834,accession number G02753,Smith-Waterman Score=102.

SEQ ID NO: 12065 - DNA, 214 bp, Homo sapiens
  SIMILAR (75)..(1): 841254mologous to Homo sapiens Human secreted protein, SEQ ID NO: 7217,accession number G03136,Smith-Waterman Score=111.
atggatgaagctggaaaccatcattctgagcaaactatcacaaggacagaaaatcaaacactgcatgttctcactcggcacaaaaatgctctccacacggcacccgcactacctgtcattccagatgcttaccgctttagtgcctctttcagcaatatgaagttaaatccaggtactgtgagtgctgacttgacttttggttcttatgaaggtg

SEQ ID NO: 12066 - DNA, 687 bp, Homo sapiens; identical to SEQ ID NO: 11984
  SIMILAR (58)..(669): 531254mologous to Homo sapiens NAG13,accession number AF194537,Smith-Waterman Score=494.

SEQ ID NO: 12067 - DNA, 333 bp, Homo sapiens
  SIMILAR (2)..(79): 921254mologous to Homo sapiens unnamed protein product,accession number AK026367,Smith-Waterman Score=120.
atggatgaagctggaaatcatcattctaagcaaactatcacaaggacagaaaaccaaacaccatatgttctcactcataggctttttgtgaggcagcttcaaggatttctagagctcttggaatacagtttgaaaatcatggatctaagcaacctaaccttcattcccttggtttctcagaggattccaagcgtcctggggaccagggtccatggggtgactgaaaaggttctagatggcattggttcatctgatgaggatgctacctcctggctcctctatgagacatcaggggaaaggagtgcacttgaccttctagggcctgcttctggg

SEQ ID NO: 12068 - DNA, 189 bp, Homo sapiens
  SIMILAR (1)..(111): 861254mologous to Homo sapiens PRO1546,accession number AF116638,Smith-Waterman Score=161.
atggaatactatgcagccataaaaaatgatgagttcatgtcctttgtacggacatggatgaagctggaaaccatcattctcagcaaactatggcaaggacaaaaaaccaaacaccgcatgttctcactcatagttatactggagtttggaaatagttattcgaggaacagtaagctcagtgtggtttat

SEQ ID NO: 12069 - DNA, 420 bp, Homo sapiens
  SIMILAR (268)..(381): 861254mologous to Homo sapiens PRO1546,accession number AF116638,Smith-Waterman Score=183.
  misc_feature (1)...(420): n = a,t,c or g
atggaggtgagggtctacggaaattctaatctgattgcttcagttttctttgggaaacgggggtggaaccagcagcaggagctgcacagcctggggcagcagagacagccacagccccaccggcagctcactgataacctcgttgagccggtcgtcgtccgcctcgatgcctacgctgtccaggatcctcttgatgtctttggctctgagggnaggcacatggatgaagctggaaaccatcattctcagcaaactatcgcaaggacaaaaaaccgaacaccgcgtgttctcactcataggtgggaattgaacaatgagaacacacggacacaggaaggggaacatcacacactggggcctgttgtggggtggggggaggggggagggatagcattaggagatatacctgatgttaaatga

SEQ ID NO: 12070 - DNA, 525 bp, Homo sapiens; identical to SEQ ID NO: 11704
  SIMILAR (111)..(1): 761254mologous to Homo sapiens Human secreted protein, SEQ ID NO: 7217,accession number G03136,Smith-Waterman Score=140.

SEQ ID NO: 12071 - DNA, 229 bp, Homo sapiens
  SIMILAR (2)..(58): 841254mologous to Homo sapiens PRO1546,accession number AF116638,Smith-Waterman Score=82.
atggatgaagctggaaaccatcattctcagcaaactatcacaaggacagaaaaccaaacaccgcatgttctcactcgcaggtgtagaaacaggcataaagagatgaagtacttgccagggtcacacagctggtctatcatggagcaggacacaggaagaactgccctgtttaaagcagaggagagggcaggggtctgcagtcctgccactgatccttcccacagcacag

SEQ ID NO: 12072 - DNA, 268 bp, Homo sapiens; identical to SEQ ID NO: 11093
  SIMILAR (1)..(174): 621254mologous to Homo sapiens PRO1546,accession number AF116638,Smith-Waterman Score=188.

SEQ ID NO: 12073 - DNA, 278 bp, Homo sapiens; identical to SEQ ID NO: 4633
  SIMILAR (121)..(276): 961254mologous to Homo sapiens bK415G2.1 (synapsin III),accession number Z83846,Smith-Waterman Score=245.

SEQ ID NO: 12074 - DNA, 274 bp, Homo sapiens
  SIMILAR (235)..(876): 881254mologous to Homo sapiens dJ616B8.1 (RNA helicase),accession number AL023803,Smith-Waterman Score=922.
atggatgaagctggaaaccatcattctcagcaaactatcacaaagacagaaaaccatacaccacctgttctcactcatagcattattcacaatagccaaaaagtggaaaccacccaggtatctgtcagtggacaaatggataaagaaactgtggtatacacatacacaatggagtattattcagccttcaaaaaggaagcgatcctgccaattgccatagcatggatgggcctgaaggacattatgctaagtgaaataagccagacttggccag

SEQ ID NO: 12075 - DNA, 3312 bp, Homo sapiens
  SIMILAR (60)..(413): 881254mologous to Homo sapiens BAT5,accession number AF129756,Smith-Waterman Score=566.
ctatgtagccataaaaacggatgagttcacgtcctttgtagggacacggatgaagctggaaaccaccattctgagcaaactatcgcaaggacagaaaaccaaacaccgcatgttctcactcataggtgggaactgaacaatgagaacaccatgagattcaagtccagctccctgtgccagtccattgtcataggacttttgatcaggcaattccactaccagaaatttaccctgaagatgtatcatactccttctaatataggtgatggcttttttcatatccatgcctgaccagttgttgagcatatagcaaatacaggaagcacagtacacaaatcgcatgtcattttcactgccttcaggtactgcacaaaaactcccatcttccagctgaagggctctcaagcccgctaagcaagcttctttatttactcggcttaagtcgtctccaagaataactaagcatgagaggccagtgtaggtcattgcaatgtggccactatcataaggatgagctgttccaggagcattctcttggcctaatctgtctcctagacgctcagtcaccactctcagtgacggttctatgtgataccacttggaatatctagttccttttaccacccagaattcagatgaaggtaatacagcatgaagtgagacctttgatggattgaacggaatacccaggtatgaagagcctcggaaaccacagcgatttagatttgatctgtcttctgtgggaaggacctgcagggaataaatccactctattatatcatctttgttcaccacatctaaggaatccaacatatccagcccggagagtgcaaaaaatgcaattgtcaacctgcttgtctcgagtgaagaatagcgctccggcaaaacctggaggcagcgctggaaaaatcgcacgtgccgatcccgtaagaaatccagccgctctccctcaccgctccctgctagcctctcatcctcagtggccgccatgctgctccggaagcgacgtccgccgcgacccggaatcagtgcccgcggagagaaagaaccctcctgtgcttttctactcaaagccctcgaggcttgtaaacacctcgcaggccttgtgaaaatcaagtccacaaatccctccgtcagaatttttatcttgggaagcgcaaggtcaaaagcatcaagtacgctttgagacaattctggctctgtagaacctgaggatggtatatccgatgttgtagccaccgctggagcctgggtcctctgcacggagactctggtgtgggtcttgaggaggtggtcagtgaattcctgatagggagacttggtgaatacagtctccttccagaggtcagggttcagcctgctgtagaccttagagatggcataaaaaatgaccatgacgaagttgcccaggatggcagtgcagcccctggctgaggtgtagcagtcattgatagctgccatcagcagcagcttcttggccatgggggccgagacgatgccagtgctcctgggcgcagggatgacccgcgccagcacagagccgtggcagcctgtcaccttgcaagggatggtgtggggcttgccgatcttgttcccccagtagcctctgcgcatgggcacaacggagagcttggccaggatgatggccccgcagatggcagtggccacctccttggagcacttaacacccagatcagtgtggccactgtccctgatggcaacaaacgccttgaacctggtgttctggccggtgcaggtctgcttctgcactggcacgtcttcaaaacctccttcctgcatgttgtttggctggttcatatgggcatgtaggtttgcaaccctcattaaggttttatttctagctctagctctcaaactatgtgggatatgtagaagtggcccagagcctgttggtcctatctttttggttcgttcttcccaacctttggtgggtttgtaaagcctagagggatctctactaacattgttttcaaccttttcttttaattttgccagtcttctttgtttttgtgacttttcatcttcctttgcctgtctatctagaattttcagttcaagtttatgtaaatctctttcttgaaatctggaaatttcatcagcagcatttttccttttttctgccttttctgccttttcccttatctccttttcaagcctcaaaaattcttcctgttctttcttctgctgggtataactttctagtagtaattttaacttaaactggcgctggcgttctttctgatgttttttctctttctcttcttcttcttttaactgggaagcacatttcattgacatttctatacttttctgtttcttccaagcttcaactgccaatttctgtttctttctttgttcctctttttgcttttgattatcctcttgtttattatgaaaaagcacaggtgtgttgtctgccttttcctttaacttgaaaatttcctcccttttttgctgctttttagttttccaaatctgaattgactctttttttctttcttctagagccagaaacttttgataccatttttcatgctgttgaacttcatcttgtgtttttccaggaaggtgttctagaacttcttccataaatgttggcttccctttatgtttgtttctcacctttacaaagttctggtgatcataatcatcccaggcaccttgtcgccctcctgtttgctgaaggaatttttcaaaatctagtacctcttctggaagagtacttggtgttactttgtctacaggaactttgcttgagattgctctgaaagctttctctgtttctgaattacccaaagcccatgtgtcaatttttcttgatatggcactcaactcattattagttgtcttctcttctttaattagctcttcatatatcaacctctgctcttctttaaaagtgttaattgcattttcaatttcttccatcatttctctgagcttctcaacaaaatcaggtgtaggcttcacatcttttaattgatgctgaagtttctttacattattatgtattttggccaattgttgctggatttttgctctttctgttttcctgctgtgaatcaatttattttccaattcttctagcatactatgctcaattctgaagtcacttttttggttgtagaaatgactgtgtttatctttttccatgttaattacttgatttttaaatttttctgctgtgcgtacaaattctgctttcttagtctgattaactttctgcttccagttctgaagatgaaaaggacgaattccacctgaagtactaaaacagccatcactctgcat

SEQ ID NO: 12076 - DNA, 289 bp, Homo sapiens
  SIMILAR (2)..(52): 821254mologous to Homo sapiens PRO1546,accession number AF116638,Smith-Waterman Score=74.
atggatgaagctggaaaccgtcattctcagcaaactattacaaggacagaaaaccggacaccgcatgttctcactcatagacttggtggtggcttgattttggaggtcagggtagagctggcaagaaatggttggattatcatggatggtatggttggatggcaagaagtggctgttaatcttttgaaggttgtcctaaaaggatttggtggtggactccaaggtgtttggcctgaacaactagaagaagagagccactattttttgagcactttatttgtgggctcag

SEQ ID NO: 12077 - DNA, 233 bp, Homo sapiens
  SIMILAR (689)..(1096): 781254mologous to Homo sapiens BAT5,accession number AF129756,Smith-Waterman Score=507.
atggaatactatgcagccatgaaaaaggatgcattcatgtcctttgtagggacatggatgaagctggaaaccatcattctcagcagactatcacaaggacaaaaagccaaacactgcatgttctcactcatagcttattatctgaagattctcaaacttatgatcagtgactacaacatagaaggaagttcaggtgttgtgggcctaataccaaatattgtctataaggctag

SEQ ID NO: 12078 - DNA, 804 bp, Homo sapiens; identical to SEQ ID NO: 6323
  SIMILAR (1)..(414): 771254mologous to Homo sapiens putative p150,accession number U93564,Smith-Waterman Score=569.

SEQ ID NO: 12079 - DNA, 2187 bp, Homo sapiens
  SIMILAR (340)..(1332): 781254mologous to Homo sapiens dJ1009E24.1.1 (A novel protein similar to the mouse sialoadhesin, a macrophage sialic acid binding receptor, isoform 1 ),accession number AL109804,Smith- Waterman Score=1337.
atggatgaagctggaaaccatgattctcagcaaactgtcacaaggacagaaaaccaaacaccgcatgttctcagtcatagttgggaattgaacaatgagaacacttggacacaggacagggaacatcacacaccagggcctgttgtgcgcccgggtcctgacccatgggctgtgcttgaggagcctttggagtcttttgcaggaggacagccataccagcttgaggtagaccccactcaagaggcaaaagactcctcaacaagctcatattcaagcacattacaaagtactaacgtcccacaacagtccccagagtgtgatgttccccttcctgtgtccgtgtgttctcattggtcaattcccacctctcaccggctcctccgagtgctggttacagtcgaatgtgagctgtatgtcaggtggccccgttgcaatgctgacttgacttgcaccaaggcagtacagaatggatgggatttgctaaaggtgcccacctgcctccaccttttgctggcagttccaggtgttggactttttattgatgaaggtgtaaagcaaggattttcagtggagacattcagggacacacgtggagttttggtacatggatgtatcatgtcatgcctgtgcaacaacagagtgagaccctatctaggaaaaaaacagaaaagtaagaaaacaacagatgttggtgtggaagtggaggaaagtggccgtggatgcgctgctggtgcggaggaggtcttccagtgcatgcagcaggggagccactcagctgctgaggggcaggaatctagcagcaaggtggagagcggaaggcattcctacaacctgtatttgtgggtcattagtccccgaactccagcatccttgcagaatctgcaaattttaaagtgcatcaggttctggacgtggcatgaggagcgcttcctctacatgctcatggagtatgtgccgggtggcgagctcttcagctacctgcgcaaccgggggcacttctccagcaccacggggctcttctactctgcggagatcatctgtgccattgagtacctgcactccaaggagatcgtctacagggatttgaagccggagaacatcctgctggatagggatggtcacatcaagctcacggactttgggtttgccaagaagctgggcttacagattaatgtggaaaagtctcttgtcggaaaagaggtgggtatggagatgtggtggagaagcgaaggaaagataacagtaacaacaatttgggtgggttcctgcaagcaggaaggtgaggagctgaagccaagatacgtgcccacaccaccgcaaacagggcagactcaggacttggaccctctgtggaacacccgagtacctagcccccgaagtcattcagagcaagggccacggaagggccgtggactggtgggccctcggcatcctgatattcgagatgctttcggggtgggttttgtaagagtggcaagcctcgccaaccccaactctccccaggcatttctgggctctccctccactctcgctggcctgagctcttgccttgacggagatgcaggatacagctttctcacagtctcctgcatctcctgcctgcagtaccttttcgttgaagcagctgcagcccgtgtctgcacctttcctatcgcagctcgatttgctggattcccactcttagcaggatcaagcatttccaaagcacgtgtcttccaatgccagccctggtcttcagaactggggcagctgaatgtattgacacagggtcgccccccaaacccagagagaaacaggaatgcgactcccctaactactgttagaacgctgcgggcagtgtattggacagttcacatgtgtagttcgacgtatgaatgtcctgacgctgcagttagaaactatcacagactggaaggtttaaacaagagaactttatcctctcttagtcctggagaccagaaatttgagatcaaagtatctcaggactgtgctccaaggaaggatcctttctgcctctgccagctcctggggctccaggcatccctggacttgtggccgcatcactacagtctctgcctctgtccccatgtggccttctcctctgtgtgtgtgcctcctcttcagtcccttatgacaatacttgtcattggatttggacctaccctattccaggatgatttcgtctga

SEQ ID NO: 12080 - DNA, 891 bp, Homo sapiens
  SIMILAR (728)..(564): 341254mologous to Homo sapiens MHC class III region complement,accession number S58715,Smith-Waterman Score=74.
atggacgccatgaaatataacgatttacgcgacttcttgacgctgcttgaacagcagggtgagctaaaacgtatcacgctcccggtggatccgcatctggaaatcactgaaattgctgaccgcactttgcgtgccggtgggcctgcgctgttgttcgaaaaccctaaaggctactcaatgccggtgctgtgcaacctgttcggtacgccaaagcgcgtggcgatgggcatggggcaggaagatgtttcggcgctgcgtgaagttggtaaattattggcgtttctgaaagagccggagccgccaaaaggtttccgcgacctgtttgataaactgccgcagtttaagcaagtattgaacatgccgacaaagcggctgcgtggtgcgccctgccaacaaaaaatcgtctctggcgatgacgtcgatctcaatcgcattcccattatgacctgctggccggaagatgccgcgccgctgattacctgggggctgacagtgacgcgcggcccacatagagagcggcagaatgtgggccagctggaaaaagtggggttaaggattaagaaaatgtggcacatatacaccatggaatactatgcagccataaaaaaggatgagttcatgtcctatgcagggacatggatgaagctggaaaccatcattctgagcaaactatcacaaggacagaaaaccaaacaccgcatgctctcgctcataggctggtcaagagctggattgtctaccccgcccgacctgtttgcgaataaaagaaaaaggatatgcttccgaatgaaaaaagatgacctgtcttcggtaatcgccaggctctttggtagtctgaggtggcagaagatcgccttagactgggagttccagatcagcgtgggcaacata

SEQ ID NO: 12081 - DNA, 1197 bp, Homo sapiens; identical to SEQ ID NO: 3217
  SIMILAR (535)..(1191): 471254mologous to Macaca fascicularis unnamed protein product,accession number AB046024,Smith-Waterman Score=510.

SEQ ID NO: 12082 - DNA, 1281 bp, Homo sapiens; identical to SEQ ID NO: 5683
  SIMILAR (64)..(879): 781254mologous to Homo sapiens putative p150,accession number U93574,Smith-Waterman Score=1058.

SEQ ID NO: 12083 - DNA, 583 bp, Homo sapiens
  SIMILAR (277)..(384): 801254mologous to Homo sapiens PRO1546,accession number AF116638,Smith-Waterman Score=174.
atggggagaaaccagagaagaaatgctgaaaattccaaaaaccagaatgcctcttttcctccaaaggaacacaactccttgccagcaagtgaacaaaactgggtggagaatgagtttgacaagttgacagaagtagccttcagaaggtcggtaataacaaacttctccgagctaaagaagcatgttctaaaccattgcaaggaagctaaaaaccttgaaaaaagggacatggatgaagctggaaaccatcattctgagcaaactatcacaaggacagaaaaccaaacaccgcatgttctcactcataagtgggaattgaacaaggagaacacatggacacagggaggggaacgtcacacaccagggcctgttgaggggtggggctctgtgggaggagtagcattagaagaaatatgtaatgtaaatgatgaggatgacgtcaccaaagatcgcattaatggcatgtggaagaagacacacaagaagtttgttcatgacttcaaaggatttgtcaaggatgatgaggttgcaaaaagaaataaggctatgattgagatggcagacaaatttaacttgggtgtgg

SEQ ID NO: 12084 - DNA, 840 bp, Homo sapiens
  SIMILAR (1)..(420): 911254mologous to Homo sapiens putative p150,accession number U93564,Smith-Waterman Score=676.
atgggcaaggacttcatgtctaaaacaccaaaagcaatggcaacaaaagccaaaattgacaaatgggatctaattaaactcaagagcttctgcacagcaaaagaaactaccatcagagtgaacaggcaacctacagaatgggagaaaatttttgcaacctactcatctgataaagggctaatatccagaatctacaaagaacttaaacaaatttacaagaaaaaaacaaacaaccccatcaaaaagtgggcaaaggatataaatggacacttctcaaaagaagacatttatgcaggcaaaaaacatatgcaaaaatgctcatcatcactggtcatcagagaaatgcaagtcaaaaccacaatgagataccatctcatgccagttagaatggtgatcattaaaaagttaggaaacaacagggacatggatgaagctggaaaccatcattctgagcaagctatcacaaggacagaaaaccaaacaccgcatgttctcactcatagtcaggcaccgtgtatgaaatctaacaatgcgctcatcgtcatcctcggcaccgtcaccctggatgctgtaggcataggcttggttatgccggtactgccgggcctcttgcgggatatcgtccattccgacagcatcgccagtcactatggcgtgctgctagcgctatatgcgttgatgcaatttctatgcgcacccgttctcggagcactgtccgaccgctttggccgccgcccagtcctgctcgcttcgctacttggagccactatcgactacgcgatcatggcgaccacacccgtcctgtggatctacccactagtcaattcaccatcttgttga

SEQ ID NO: 12085 - DNA, 1017 bp, Homo sapiens
  SIMILAR (828)..(694): 731254mologous to Homo sapiens Human secreted protein, SEQ ID NO: 7217,accession number G03136,Smith-Waterman Score=167.
atggcatggctgtcagtggatcttgagactgagaaggtgcagggcttgcttatggaccccacagttggaatgtggaagtgtcagccaggcacgccaactgccgcagcagggcggacggctccaggcaccggcataggcactggctccatgcaaggctgcggctggagcaggcatactacaagcggcttctcctgcagttgccagcatctggatgaagggaatgtggtggctcctgaaaacctggagatgccagcaactgcagatcctctacgggttggggcacagcagtctgaggtcgacctgggacaactgagcttgctgtggggaggggcatctgccatcactgaggctttagtaggcggttttcccctgacagtgctaaggaggctgggaagtctgggctggttgcagcaaagcagctgtggccagactgcttctctagattcctcctcactagaaagcaacaacatcaacatcaacataaaggacccccacacaaaaaccccatcaaaaggtcatcagtctcaaagatcaaaggtagataaatctagaaagatgaggaaaaaccagtgcaaaaatgctgaaaattccaaaaatcagaatgcctcttgtccttcaaatgattgcaactcctgtccagcaagggcacaaaactggacagagaatgagattgatgaattgacagaagcaggcttcagaagggacatggatgaagctggaagccatcattctcagcaaactatcacaaggacagaaaaccaaacaccacatactctcactcataggtgggaattgaacaatgagaacacatggacacagggaggggaaatcacaccagatgatgaattagagcggttgttatcgaatctgccaccagagggcgatccaggtaaaaaagatcttcgggctactcttcagcccggtgacctgatcttcccccaaactcagatccttgctgcctcccagaaacagcagacacctaagtccaatgtagcttgccaggatctcagggaatga

SEQ ID NO: 12086 - DNA, 1265 bp, Homo sapiens
  SIMILAR (1272)..(439): 991254mologous to Cloning vector pSacBII RepL,accession number U09128,Smith-Waterman Score=1401.
atgagtgaactcccattcacaactgctacaaagagaataaaatgcctaggaatccaacttacaagggatgtgaaggaactcctcaaggagaatttcaaaacactgctcaacgaaataaaagagggcacaaacaaatggaaaaacattccatgctcatggatacgaagaatcaacatcgtgaaaatggccataccgcccaaggtaatttatagattcaatgccatccccatcaagctaccaatgactttcttcacagaattggaaaaaactacattaaattttttatggaaccaaaaaagagcctgcattgccaaggcaatcctaagcaaaaagaacaaagctggagacatcacgctacctgatttcaaactatactacaaggctacagtaaccaaaacagcatggtactggtaccaaaaaagagatatagaccaatggaacagaacagaggcctcagacgtaacatcacacatctacaaccatctaatctttgacaaacctgagaaaaacaagaaatggggaaaggattccctatttaataaatggtgctggaaaaactggctagccatatggagaaagctgaaactggatcccttccttacaccttatacaaaaattaattcaagatggattaaagacttaaatgttagacctaaaaccgtaaaaaccctagaagaaaacctaggcaataccattcaggacataggcataggcaaggacttcatgactaaaacaccaaaagcaatggccacaaaagccaaaatagacaaatgggatctaattaaactaaagagcctctgcacagcaaaagaaactatcaccagagtgaacagggacatggatgaagctggaaaccatcattctgagcaaactatcacaagaaccgaaaaccaaacaccgcatgttctcaatcataggttggaattgaacaataagaacacttggacacagggaggggaatatcacacactggggcctgtcactgggtgggggactgggggagttgtgaaaagaagaggtagtaccaattctgctaaactagtcaatgaggaggaggaacttttccccaactcattcggtgaagccagcatcactgtgataccaaaacctgccaaaaacacaagaagaagaagaaactaccaaccaatgtcgctgaagaacatacacacaaaaattctcaacaacatactggcaaaccaaaaccagcaacacatcaaaaagtttaattcaccacgatcaagttggctttactcctgggatgcaag

SEQ ID NO: 12087 - DNA, 674 bp, Homo sapiens
  SIMILAR (105)..(359): 671254mologous to Homo sapiens Human secreted protein, SEQ ID NO: 6834,accession number G02753,Smith-Waterman Score=314.
ctaatgcgatgaattgacccaccgatccttaactgggtatataccaaaaggaattataaatcatgctactataaggacatatgcaccaagtatgtgtacctgcggcactattcacaatagcaaacacttggaaccaacccaaatgtacatcaatgatagactgggttaagaaaatgtggcatatatacaccatggaatactatgcagccataaaaacagatgagttcatgtcctttggcagggacatggatgaagctggaaaccatcattctgagaaaactatcacaaggacagaaaaccaaacaccgcatgtactcactcataggtgggaatttaacaatgagaacatttggacacagtgcagggagccatcacacaccagggcctatcatgaggtgtggggctgggggagggatagcattaggagaaatacctaatgtaaatgacgagttaatgggcacagcaaaccaacatggcacatgtatacctatgcaacaaaactgcacattgtgcacatgtaccctaaaacttaaagtatagtaataaaaaaaaattcaccaaacaccacaaaaaaaatcaagattgtcaaagaaaatttccacgtcccccgaaatcaaataaatagttagacaagcaggagttaaccagatatggccccattggcaaagtgtcca

SEQ ID NO: 12088 - DNA, 534 bp, Homo sapiens
  SIMILAR (179)..(262): 821254mologous to Homo sapiens PRO1546,accession number AF116638,Smith-Waterman Score=119.
gcgtcgacggcgggggtgtcttactatgttgctcaggctggtctcaagttactgggcctaagcctctcaaagtgccgggactacaggtgtgagccaccatgcccagagtagatgagtttatacaaagttatggcaatggcaaggaaagctatgagtctgtaacatctacttctttttggatgagttcatgtactttgcagggacatggatgaagctggaaaccatcattctcagcaaactatcacaaggacagaaaaccaaacaccgcatgttctcactctgaggcaatgttttgaaaagaaacagaaaatccttgcaaacgtccaactgcaaggaatatgtggccccagcagctgtgctctaagatccattgccatgtttgtgccgaggttgggcttcccattggctgctttgcatggggcagggatgcggaggcaggctctttattgggggacagaagactgtgctgaccatgactctggcttgaggacccatggcctttccgaaccttccttagactgcacagtggcctag

SEQ ID NO: 12089 - DNA, 1769 bp, Homo sapiens
  SIMILAR (1)..(162): 661254mologous to Homo sapiens PRO1546,accession number AF116638,Smith-Waterman Score=173.
atggaatactatgcagccataaaaaaggatgagttcatgtcctttgtagggacgtggatgaagctggaaaccatcattctcagcaaactatcacaaggccaaaaaaccaaacaccgcatgttctcactcatagaatttcatctgggatatcacattacatggttctcgttgcatcaccgtaagctcctcttggatgtgacagctttgggagaagtaatcaaactccaaatggtgctgcaaactgaactacgcatggacacgccattcttccgaggacccttagatcgaccccaggaggagtcccagctgctgttccccattcaacgcccttttcagcagcagggctgctgtggtttgctgggggatcacttcaagccctattcatctggttcacttctgcacctggagttgtcacctgaggaggctggagagcatcaaagatgggtgcctcctccttcctttgggatctctgaccttgaggggcaacaagctgatgccagtaggaacacttctgtatatggtgtctggcgacctctgttggggtgtctcacccagttggggcacacaggaaccaggacccatttaacgaagcactttgttccttggtggagggggggcctcaggcccagggagatctgggatctgtccctgagcctctggctggagtttttggagttcctgcagggaagccccacccagtgaggaaggatgagtcagggtcaggtacaatctcctattctattctggccactgtggttagtggagagaatgtgttaaaagcctccctaaagaaggaagaattagatcacactgatggatgtgttgctgtgattgaaggtcagtcctggaaagagcatggtaatatggaaaaatcaagcttcctcactctgagtggcaaatgtttagggagtggatcagagagctgtctgcagcagcagaatatggtgatcacacttattcctttttcactctgtcgtcgttcatctaccatgggcagggacatggatgaagctggaaaccatcattctcagcaaactatcacaaggacagaaaaccagacaccgcatgttctcactcataggtgggaattgaacaatgagaacacttggacacagggcagggaacattttctcagttttggaggcttggcatctaagatcaagatgccagcaagtgaatgcatatgtcatttctctgactctggggtttccaaactgcaagctacagaatccataaaagagtcttattcattcaacaagcatataatgagtacctgctatgtggcagacactgttctagtactcagtgataaaaacaaacaattcttaccttgccctagaatggaaaagagatctgcttttcagttaatattcactgactgcctgctggtgccaatcattgtactaggtgctggagatacatccatggatcagctctacgtggcctctggtctgctggtgtttgcaggactgatttctgctgtctgccttgtggccatagccagagctgctgattctgcgctggatacagccaaggccctggactgtgactcctattacagccctgcagctctttttggagtgggaaggggtcattttcctggggttagaactctctttagttttctcaacacaggattactgaactctgaagaggaagaggaagattcatcaggtcctcaagccaggaggctttctggtgagctgctctggctgtgcacggaccctaaatcagcaaacagattacctcttatccctttctcaatgtag

SEQ ID NO: 12090 - DNA, 642 bp, Homo sapiens
  SIMILAR (1)..(957): 1001254mologous to Escherichia coli IS5 39.3kDa protein,accession number U70214,Smith-Waterman Score=1661.
ttttgttgtaaaactgtaaaataagcaaggccaaatatttattgtttggcaacacatagagatatatagagttttacatgtaaaattacctataaatgtcaacagcacattgacatggtaaatacgaagttcaaaatgggatatccctggcatggaatagagagctgggatggcggagggccacacgggaagctgcaatagaatttttgatgtttgcttcattctctaggtgatgtgttcactggtgttcatcttatcatgtttttaaattgacaagcatgttacatatacaccacagaatactatgcagccataaaaaatgatgagttcatgtcctttgtagggacatggatgaagctggaaaccatcattctcagcaaactgtcacaaggacaaaaaaccaaacaccgcatgttctcactcataggtgggagttgaacaatgagaacacatggacacaggaaggggaacatcacacaccagggactgttgtggggcggggggagtggggaagggtaccagctgtctttttaattaatgagagttgcaggtacatgatgctcacaaatattgcaccacacaccccgtacacccatggcaggccagacgctcacttccattgtgccgtgggatgcagacaag

SEQ ID NO: 12091 - DNA, 3868 bp, Homo sapiens
  SIMILAR (770)..(1318): 941254mologous to Escherichia coli 37KD protein, similar to YI22-ECOLI,accession number D85613,Smith-Waterman Score=913.
atgagccggagttgccgcgcggcttgcgggcgagccggctgtcagcaccaaggccgggcggcgggctcgccttccccgctgttgctgcggcttcgcttcttctactcagggcttgacaccctgatcaggatgccggcatcccctggccctggcgccttcgaccccggcatcccttttcggaccttccctgaaccagttcttcctgtccccgctccagcccaggcgcagatcgtgcatgcgggccaggcatgtgtggtgaaagaggacaatatcagcgagcgtgtctacaccatccgggagggggacaccctcatgctgcagtgccttgtaacagggcaccctcgaccccaggtacggtggaccaagacggcaggtagcgcctcggacaagttccaggagacatcggtgttcaacgagacgctgcgcatcgagcgtattgcacgcacgcagggcggccgctactactgcaaggctgagaacggcgtgggggtgccggccatcaagtccatccgcgtggacgtgcagtacctggatgagccaatgctgacggtgcaccagacggtgagcgatgtgcgaggcaacttctaccaggagaagacggtgttcctgcgctgtactgtcaactccaacccgcctgcccgcttcatctggaagcggggttccgataccctatcccacagccaggacaatggggttgacatctatgagcccctctacactcagggggagaccaaggtcctgaagctgaagaacctgcggccccaggactatgccagctacacctgccaggtgtctgtgcgtaacgtgtgcggcatcccagacaaggccatcaccttccggctcaccaacaccacggcaccaccagccctgaagctgtctgtgaacgaaactctggtggtgaaccctggggagaatgtgacggtgcagtgtctgctgacaggcggtgatcccctcccccagctgcagtggtcccatgggcctggcccactgcccctgggtgctctggcccagggtggcaccctcagcatcccttcagtgcaggcccgggactctggctactacaactgcacagccaccaacaatgtgggcaaccctgccaagaagactgtcaacctgctggtgcgatccatgaagaacgctacattccagatcactcctgacgtgatcaaagagagtgagaacatccagctgggccaggacctgaagctatcgtgccacgtggatgcagtgccccaggagaaggtgacctaccagtggttcaagaatggcaagccggcacgcatgtccaagcggctgctggtgacccgcaatgatcctgagctgcccgcagtcaccagcagcctagagctcattgacctgcacttcagtgactatggcacctacctgtgcatggcttctttcccaggggcacccgtgcccgacctcagcgtcgaggtcaacatctcctctgagacagtgccgcccaccatcagtgtgcccaagggtagggccgtggtgaccgtgcgcgagggatcgcctgccgagctgcaatgcgaggtgcggggcaagccgcggccgccagtgctctggtcccgcgtggacaaggaggctgcactgctgccctcggggctgcccctggaggagactccggacgggaagctgcggctggagcgagtgagccgagacatgagcgggacctaccgctgccagacggcccgctataatggcttcaacgtgcgcccccgtgaggcccaggtgcagctgaacgtgcagttcccgccggaggtggagcccagttcccaggacgtgcgccaggcgctgggccggcccgtgctcctgcgctgctcgctgctgcgaggcagcccccagcgcatcgcctcggctgtgtggcgtttcaaagggcagctgctgccgccgccgcctgttgttcccgccgccgccgaggcgccggatcacgcggagctgcgcctcgacgccgtaactcgcgacagcagcggcagctacgagtgcagcgtctccaacgatgtgggctcggctgcctgcctcttccaggtctccgccaaagcctacagcccggagttttacttcgacacccccaaccccacccgcagccacaagctgtccaagaactactcctacgtgctgcagtggactcagagggagcccgacgctgtcgaccctgtgctcaactacagactcagcatccgccagttgaaccagcacaatgcggtggtcaaggccatcccggtccggcgtgtggagaaggggcagctgctggagtacatcctgaccgatctccgtgtgccccacagctatgaggtccgcctcacaccctataccaccttcggggctggtgacatggcctcccgcatcatccactacacagagcgccagatccgctggcccccagtcctggctctgaggaccctgtcctctggtcccaagcagggtatcctctgcagagccccacacctcagttctgacttggtttccccgcttgctttctcagccatcaactctccgaacctttcagacaacacctgccactttgaggatgagaagatctgtggctatacccaggacctgacagacaactttgactggacgcggcagaatgccctcacccagaaccccaaacgctcccccaacactggtccccccaccgacataagtggcacccctgagggctactacatgttcatcgagacatcgaggcctcgggagctgggggaccgtgcaaggttagtgagtcccctctacaatgccagcgccaagttctactgtgtctccttcttctaccacatgtacgggaaacacatcggctccctcaacctcctggtgcggtcccggaacaaaggggctctggacacgcacgcctggtctctcagtggcaataagggcaatgtgtggcagcaggcccatgtgcccatcagccccagtgggcccttccagattatttttgagggggttcgaggcccgggctacctgggggatattgccatagatgacgtcacactgaagaagggggagtgtccccggaagcagacggatcccaataaaggtgcaagacgggaaggagctgcctgcgatggcctgaaattccacctttcatcccctatggatgacggagagcttacagatgaccctattgaatgcaagcacctttggatccatagagtggacagtaaaggtgctcagtacatgttggctgagctgaactgcatacatgtggcccccaggttcctggtctttatggacgaagggcacaaggttggtgaaaaggactccgggggccagcccttccaagtttacactgatttctccttttaccctcatgctatccctgagaagatgtcaataatgcccacgttacaggtgggaaaactgaggcttagagaggaggaggaatctgcctacggtcacacagctgcaaaggctagagctgggaccaggagctggtctcttaaccgaccacctgagctcaagagcttttctctctggaccaacatgacccaaagtgtgcgcgagcctatcacaggtcccctgcaatgccaaacatacacgcacagcaatacacaacacctggggacatggatgaagctggaaaccatcattctcagcaaactgacacaagaacagaaaaccaaacaccacatgttctcactcataactgggagctgaacaatgagaacatatggacacagggaggtgaacatcacataccgggacctgaggtcaagcagaatggcactgagaaagagattgtttcatttcttgaccagaaggttactggtggcccttcaaaaggaagtcccaagagagttgtggtaagaaaaggcatcccagagattcaatttagagaagataatgaggaattaagagaaagttt

SEQ ID NO: 12092 - DNA, 1701 bp, Homo sapiens
  SIMILAR (61)..(873): 881254mologous to Homo sapiens cytokeratin 18,accession number X12881,Smith-Waterman Score=1205.
atggatgaagctggaaaccatcactctcagcaaactatcgcagggacagaaaaccaaacactgcatgttctcactcatacgtcggaattgaacaatgagaacacttggacacagggtacccccgaacctaaaataaaagttaaaaaagaaaaagaacagtctcttggtggatggacactgatgatagcagagacagctgctaggcatttgttccaagacaaacagcgacagattaaagtctccggaggagccaagatggccgaacaggaacagctccggtctacagctcccagcctgagcaacacagaagacggaataaccaatacagagaagtgcttaaaggagctgatggagctgaaaaccaaggctccagaactacgtgaagaatgcagaagcctcaggagccgatgcgatcaattggaagaaagggtatcagcgatggaagatgaaatgaatgaaatgaagcgagaagggaagtctagagaaaaaagaataaaaagaaatgagcaaagcctccaagaactatgggactatgtgaaaagaccaaatctatgtctgattggtgtacctgaaagtgatggggagaatggaaccaagttggaaaacactctgcaggatattatccaggagaacttccccaacctaaaccaaaaacgagcccatatagccaagacaattgtaagccaaaagaacaaagctggaggcagcacgctaactgacttcaaactatactacaaggctgcagtaaccaaaacagcatgggacatggatgaagctggaaaccatcattctcagcaaactaacacaagaacagaaagccaaacaacgcatgttctcactcataggtgggaactgaacaatgagaaccacgggtacttcacccgggtgaagaccttcaaagtcacatacacagagaactgtgtaagctacaccaggatttccagtgaacaggactacacctgcatagcagagaatgctgtcagtaatttatccttctctgtctctgcccagaagctttgcgaagattccctatctttgtctactcagcgaacacagggccccgcagagtccgcaaggaacctagagtatgtttcagtgtctccaacgaacaacactgtgtatgcttcagtcactcattcaaacagggaaacagaaatctggacacctagagaaaatgatactatcacaatttactccacaattaatcattccaaagagagtaaacccactttttccagggcaactgcccttgacaatgtcgtggcggaaggatccagctggtcaatcggagtgcctctagggagtgaccgacgtgagatggcggtaacaatgaggtgccacgccgcagccgtccgtatggccgcaagacgatcgctgcaccagatatccgtccacatttgcgcagcaaaagcaaaaatctgggctgaggatgagatggctgcattgacagaagtaggcttcagaaggtgggtaatagcaaactgtggtgagttaaaggagcatgttctaactcaatgcaaagaagctaagaattatgataagacaatacaggagctgatagccagaatagccagtttagagaggaacaaacccgacctgatggagctgaaaaccacaacacgagatactgatcacaagtatcaacagcagaacagaccaagtggaggaaagaatcatagaactcgaagactatctttgtga

SEQ ID NO: 12093 - DNA, 808 bp, Homo sapiens
  SIMILAR (205)..(444): 861254mologous to Homo sapiens dJ120N9.1 (KIAA0656 protein (similar to clathrin assembly lymphoid myeloid leukemia protein (CALM))),accession number AL109915,Smith-Waterman Score=351.
atggccttcctagaaacttctgcacccctgtatgaacacatatggacacttcaggttgctttctccactgttggtctgggagagaccctgaaagttgccatgatcagcatgtccacatcatctgggtattttcttcagctattacaatactgctgctcctcaaccatcaccatcactggatacaagggcttcctaagagacctgaaggtggagacaagggccgatggtgtaatgaggacaatggctcccgaaaagctgctaaagagtatgccaatactacagggacaaattgatgcactgcttgaatttgatgtgcatccaaatgaactaacaaatggtgtcataaatgcagcatttatgcttcttttcaaagatcttatcaaactttttgcttgctacaatgatggtgttattaacttactcgggacatggatgaagctggaaaccatcattctcagcaaactattgcaacgacagaaaaccaaacactgcatgttctcactcataggtgggaatcgaacaatgagaacacttggacacaggaaggggaacatcacacactgggccctgttggcgggtgggggtgctgcggaaggatagcattaggagaaatacctaatgtaggcctagataatatattacttagccttgagaaactgagaaatcccccactgtgtcaccttctagagcccctgtcaaccctttgcaactccaagagacaagtcactcctactttccagaaaacattcagaagcaagcaccagcccttccccagaggtcaagcagcagaaagggccttccactgcag

SEQ ID NO: 12094 - DNA, 883 bp, Homo sapiens
  SIMILAR (624)..(719): 811254mologous to Homo sapiens PRO1546,accession number AF116638,Smith-Waterman Score=159.
atggagcagctctcaccgatggccagctcctaccactctgaccacgctgctgtctccctggccatcttctttgactacaaaggaataaaactaggtatcaagctggcggctgttcccagtgccttgcccacccctgccgggccgtcggactcggcggggcccctgtggcatccctgtccagtccctgtcaccacccagtttttccctctggacccaggaattcaaagtaagcaaggaggtccgctgctccagttggctgcaaataattacaaccttaagcccaagcagcactttgggtcctggtttgggaccatgaagcggctcgggacatggatgaagctggaaaccatcattcttagcaaactatcacaaggacaaaaaaccaaacaccgcatgttctcactcacagaaagccgtctgagacatcttgcaccacacaaatctccgacttggccttcatacagccttttgtgaaagcaaatataattacagagcaaaagagaggaacaaaacagcagattttgaatctccccctgaatggccagaaaaatgagcaggcaactggagatgaggacatggatgaagctggaaatcatcattctcagcaaactaacacaagaacagaaaaccgaacaccgcatgttctcactcataagtgggaactgaacaatgagaacacatggacacgaggaggggaacatcacacaccagggcctgttggcagctctgtgtgggccccagccaatttcacaccagtacccctctcatctcccacccaacactcccatgttgacatcactgcagactccactaatgcccacgctctggaatgcacaatccagaggagcaagggggtgaatcttagaccaagcacatcccggga

SEQ ID NO: 12095 - DNA, 1074 bp, Homo sapiens
  SIMILAR (593)..(778): 821254mologous to Homo sapiens putative p150,accession number U93564,Smith-Waterman Score=275.
atgaggttttacggacagctggctgaagacccagggcagcaaaaagctggggaaacaacaaggcatactgaagactatatttctcagctgcctttgcagagacaagggatccccgaacttgcccttcagaaagatctttttattaacaagatttatggaaaagagttcaatgtctgcaggtcgactctagaggatccccgagttcatgtcctttgtagggacatggatgaagctggaaaccatcattctgagcaaactattgcaaggacagaaaaccaaacaccgcatgttctcactcataggcgggaattgaacaatgagaacacttggacacagggtggggaacatcacacaccagagcctgtcataggacctatgggaactctgctagactccactggtctgaacactgacacttggaagccttataactgcatctgtccagcttcagacagagtgcctgatcagatattgcctgaggacacttgcagacaggaatataattttggcaatactgaaaatggtgtcatgatgcaaccaagagaggctactgaagctgaggacactgacgcccacagcactcaagtgactgttccaggtcaaatagctgagaataaaatacctaggaatccaacttacaagggatgtgaaggacctcttcaagaaaaactacaaaccactactcaaagaaataaaagaggacaaaaactaatggaagaacattccatgctcatggataggaagaatcaacatcatgaaaatggtcgtactgcccaagggacatggatgaagctggaaaccgtcattctcagcaaactatcacaaggacagaaaaccaaacaccgcatgttctcactcataggtgggaattaaacaatgagaacatttggacacaggatggggaacatcacacactgggcctgtcatgggatgggggaaggcattctgttgctcctgagataggaatctggcaggacttgttttaccagaaaccaatcgctaagaccccactggtgaaacaggatgaggtgaagaagccagtcaaaacctgccaaaacaaagatggccacaaaa

SEQ ID NO: 12096 - DNA, 446 bp, Homo sapiens
  SIMILAR (148)..(234): 371254mologous to Homo sapiens Extended human secreted protein sequence, SEQ ID NO. 471,accession number Y36086,Smith- Waterman Score=48.
agcccttccttctttaactcggtgtctgaggggttttgtctacggctcgtcctgctacatttcttggttccctgactgggaagcgaggtgattaacggacagttgaggcagcctgttaggcggcttaggcctgccctgtggagcatccctgcgggggactccggccagcttgagcgatgcggatcctgagagcgctcccgggtaagcaaattccctggtggaacgcctcaccagagcagcgtgtggcaggcccccgtggaggatcaacgcagtggctgaacaccgggaaggaactggcacttggagtctggacatttgaaacttggtaagactagtcttgggagcttgcccactccatttgagtggaagcgaggcctgatcacccacggcatgcccgttctggcactttggtttttgtttttgacttgacttggattgcttgatac

SEQ ID NO: 12097 - DNA, 1245 bp, Homo sapiens; identical to SEQ ID NO: 8703
  SIMILAR (814)..(1029): 521254mologous to Homo sapiens Gag protein,accession number AF164612,Smith-Waterman Score=232.

SEQ ID NO: 12098 - DNA, 3313 bp, Homo sapiens
  SIMILAR (1)..(1755): 911254mologous to Homo sapiens putative p150,accession number U93563,Smith-Waterman Score=2724.
atgaacaaggtgattctaaaatctatatggaaatgccatggaccaagaagagccaaaataaacctgaaaaagaacaagaataagagtttcctgaagtgtggcctatggagactagcattagaatcactggaggagcttaaagatatagagacagggatagggcctgagattctgactttgttcttaactcttgaaatgagaagcgtgaatccgtggtggtttcatgacctgcataatcacactacctgtttttctgtcacagattgccttctctcagcacagcaattttatggacctggtcctggatgttcagttcctgtaccagctaaccagtcattttggactcgagaggaatattctaacttaaagctccccagagcatctcataaagctgtggtcaatggaaacattatgtgggttgttggaggatatatgttcaaccactcagattataacatggttctagccaccatgtatgtgttcggtggtttcaatagtctcctcctcagcgacatcctggtattcacctcggaacagtgtgatgcgcatcggagtgaagccgcttgtttagcagcaggacctggtattcggtgtctcttgaccatgacagatgtgaccagcacacagattgttacagctgcacagccaacaccaatgactgccactggtgcaatgaccattgtgtccccaggaaccacagctgctcagaaggccaggtatgagaattgccccaaggataaccccatgtactactgtaacaagaagaccagctgcaggagctgtgccctggaccagaactgccagtgggagccccggaatcaggagtgcattgccctgcccgaaaatatctgtggcattggctggcatttggttggaaactcatgtttgaaaattactactgccaaggagaattatgacaatgctaaattgttctgtaggaaccacaatgcccttttggcttctcttacaacccagaagaaggtagaatttgtccttaagcagctgcgaataatgcagtcatctcagagcatggcccgtgtcaccgtgtgttctcagtcctcgcatgagagcctggttgacactggttctctctgctttggggaccgtatctggctgtgcgctatgtggagggctgagctcgtgtcttcctggaacaccagtactctgggactgaaggctgctgcctgcatcaacccactcaatggtagtgtctgtggaaggcctgcaaaccacagtgctaagcagtgccggacaccatgtgccttgaggacagcatgtggagattgcaccagcggcagctctgagtgcatgtggtgcagcaacatgaagcagtgtgtggactccaatgcctatgtggcctccttcccttttggccagtgtatggaatggtatacgatgagcacctgcccccctgaaaattgttcaggctactgtacctgtagtcattgcttggagcaaccaggctgtggctggtgtactgatcccagcaatactggcaaagggaaatgcatagagggttcctataaaggaccagtgaagatgccttcgcaagcccctacaggaaatttctatccacagcccctgctcaattccagcatgtgtctagaggacagcagatacaactggtctttcattcactgtccagagaataaaatacctaggaatccaacttacaagggacgtgaaggacctcttcaaggagaactacaaaccactgctcaacgaaataaaagagggcacaaacaaatggaagaacattccatgctcatggatagaagaatcaatatggtgaaaaaggtaatttatagattcaataccatccccatcaagctgccaatgactttcttcacagaattggaaaaaactactttaaagttcatatggaaccaaaaaagagcccacatcgccaagtcaatcctaagccaaaagaacaaagctggaggcatcacactacctgacttcagactatactacaaggctacagtaaccaaaacagcatggtactggtaccaaaacagagatttagaccaacggaacagaacagagccttcagaaataataccacacatctacaactatctgatctttgacaaacctgacaaaaacaagaaatggggaaaggatttcctatttaacaaatggtgctgggaaaactggctagccatatgtagaaagctgaaactggatcccttccttacactttatacaaaaattaattcaagatggattaaagacttaaatgttagacctaaaaccataaaaaccctagaagagaacctaggcaataccattcaggacacaggcatgggcaaggacttcatgactaaaacaccgaaagcaatggtaacaaaagctaaaattgacaaatgggatctaattaaactaaagagcttctgcacagcaaaagaaactaccatcagagtgaacaggaaacctacagaatgggagaaaatttttgcaacctactcatctgacaaagggctaatatccagaatctacaaagaactcaaacaaatttacaagaaaaaaacaaacaaccccatcaaaaagtgggcaaaggatatgaacagacacttctcaaaagaagacatttatgcagccaacagacacgtgaaaaaatgctcatcatcactggccatcagagaaatgcaaatcaaaaccaccatgagatatcatctcacaccagttagaatggcgatcattaaaaagtcaggaaacaacgggtgctggagaggatgtggagaaataggaacacttttatactgttggtgggactgtaaactagctcaaccattgtggaagtcagtgtggcgattcctcagggatctagaactagaaataccatttgacccagccatcccattactgggtatatacccaaaggaatataaatcatgctgctacaaagacacatgcacacgtatgtttattgaggcactactcacaatagcaaagacttggaaccaacccaaatgtccaacaatgatagactggattaagaaaatgtggcacatatacactgtggaatactatgcagccataaaaaatgatgagttcatgtcctttgtagggacatggatgaagctggaaaccatcattctcagcaaactatcgcaaggacaaaaaaccaaacacagcatgttctcactcataggccttgcagtattaaaacatgtgctaacaccacgaataaaggcaactcacgttgcttttgattgcatgaagaattatttagatgcaatttatgatgttacggtggtttatgaagggaaagacgatggagggcagcgaagagagtcaccgaccatgacgg

SEQ ID NO: 12099 - DNA, 3769 bp, Homo sapiens
  SIMILAR (592)..(738): 661254mologous to Homo sapiens Human secreted protein sequence encoded by gene 10 SEQ ID NO:63,accession number B25674,Smith-Waterman Score=166.
atggagtgggtactgcttggatctccttctagaaaacctgttggagaagcatggttgactgcagatccaccatatttgtaccgaggccatctttctaccagtctagttacagccagcttccattgcaacttctacagaaagttcaggaaaataacgactttcaacattatagaatttcaagttagaagtgatcattttcaactgatgaatctcattgaggaagatgaggcatcaagaggtagaagactaactcagcaggtgactatggaaatggtgtcagacaaaaagcaaattcgagtgattttcttattcaatttaaaaatgggtcataaagcagcagagacaactcgcaatatcaacaacgcatttggccaaggaactgctaacaaatgtacagtgctcaagaagttttgcagaggagacgagagccttgaagatgaggagcatagtgaccagccatcagaagttaacaactgccaactgagagcaattattgaagctgatcctcttacaaccacacaagaagttgccaaagagcttgacgtcgaccattccagggtcgcttggcatttgaagcaaattggaaaggtgaaaaagctcaataactttctgaatcctggtgaaaccattatatctgaggactatgctcagcaaatctatgagatgcaccaaaaactgccacacctgcaactggcattggtcaatagaaagggcccaattcttctccatgacaacgcccaaccacacgtcgcacaaccaatgcttcaaaagttcaatgcattgggctaccaagttttggctcatccttcatattcacctgacctctcatcaacagactaccacttcttcaagcatctccacaactttttgcagagaataaaatacctaggaatccaacttacaatggatgtgaaggacctcttcaagaagaactacaaaccactgctcaatgaaataaaaggggacacaaacaaacggaagaacattccatgctcatggataggaataatcaatatcatgaaaatggccatactgccagaggtaatttatagattcaatgccatccccatcaagctaccaatgactttcttcacagaattggaaaaaactactttaaagttcatatggaaccaaaaaagagctcgcattgctgagtcaatcctaagccaaaagaacaaagctggaggcatcacactacctgacttcaaactatactacaagactacagtaaccaaaacagcatggtactggtaccaaaacagagatatcgaccaatggaacagaacagagccctcagaaataataccacacatctacaactatctgatctttgacaaacctgacaaaaacaagaaatggggaaaggataccctatttaacaaatggtgctgggaaaactggctagccatatgtagaaagctgaaactggatcccttccttacaccttatacaaaaattaattcaagatggattaaagacttaaatatgagacctaaaaccataaaaaccccagaagaagacctaggcattaccattcaggacataggcatgggcaaggacttcatgtctaaaacaccaaaagcaatggcaacaaaagccaaaattgacaaatgggatctaattaaactaaagagcttctgcacagcaaagggaactaccatcagagtgaacaggcaacctacagaatgggagaaaatttttgcagtctactcatctgataaagtgctaatatccagaatctacaaagaactcatacaaatttacaagaaaaaaacaaacaaccccagtaaaaagtgggtgaaggatatgaacagacacttctcaaaagaagacatttatgcagccaacagacacaggaaaaaatgctcaccatcactggccatcagagaaatgcaaatcaaaaccacaatgagatatcatctcacaccagttagaatagcgaccattaaaaagtcaggaaacaacagagacatggatgaagctggaaaccatcattctcagcaaactatcgcaaagacagaaaaccaaacaccgcatgttctcactcataggtgggaattgaacaatgagaacacttggacacaggaaggggaacatcacactctggagactgttgtgggggacatggatgaagccggaaaccatcattctcagcaaaatatcacaaggacagaaaaccaaacaccacatgttctcactcataagcgggagttgaacaatgagaacacatggacacagggaggggaacataacataccagggcctgttgtgggttcctggagagccttgaacactggactgagaagctttgactttatcccagggacagtaagagagcctgtaaagattttaggcagaaggttgacatcggatttgcagattaggaacagccctttagaggctgctgtacaagatgcagaaaaggcctttgacaaaattcaacagccctttatgctaaaaactctcaataaaatagctattgatgggacgtatctgaaaataataagagctatttatgacaaacccacagccaatatcatactgaatgggcaaaaactggaagcattccctttgaaaacgggcacaagacaggggtgccctctctcaccactcctatgcaacatagtgttggaagttctggccagggcaatcaggcaggagaaggaaataaagggtattcaattaggaaaagaggaagtcaaattgtccctgtttgcagatgacatgattgtatatctagaaaaccccattgtctcagcccaaaacctccttaagctgataagcaacttcagcaaagtctcaggatacaaaatcaatatgcaaaaatcacaagcattcttatacaccaataacagacaaacagagagccaaatcatgagtgaactcccagtcacaattgcttcaaagagaataaaacacctaggaatccaacttacaagggctgtgaaggacctcttcaaggagaactacaaaccactgctcaatgaaataaaagaggacacaaacaaatggaagaacattccatgctcatggataggaacaatcaatatggtgaaaatggccatactgcccaagaaagaagttcttcagatgcgaggtttcaacaaaaccactgtggttacacagttcatcctggtgggtttctccagcctgggggagctccagctgctgctttttgtcatctttcttctcctatacttgacaatcctggtggccaatgtgaccatcatggccgttattcgcttcagctggactctccacactcccatgtatggctttctattcatcctttcattttctgagtcctgctacacttttgtcatcatccctcagctgctggtccacctgctctcagacaccaagaccatctccttcatggcctgtgccacccagctgttctttttccttggctttgcttgcaccaactgcctcctcattgctgtgatgggatatgatcgctatgtagcaatttgtcaccctctgagggacatggatgaagctggaaaccatcattctcaggaaactattgcaaggacagaaaaccaaacactgcatgttctcactcataggtgggaattgaacattgagaacacatggacacaggaaggggaacatcacacactggggcctgttgtggggtgtgaggaaccttcaccaccccattttgtggtacaaccatcatttactgatcaaaacagaaaactgatcgtggtcattgtttcttctctctccctgaaacgctatttcccatacaacccaaaaagtctcg

SEQ ID NO: 12100 - DNA, 2509 bp, Homo sapiens
  SIMILAR (388)..(852): 971254mologous to Homo sapiens PRO1868, an A33 antigen homologue,accession number Y96735,Smith-Waterman Score=805.
atggaatactatgcagccataaaaaatgatgagttcaagtcctttgttgggatatggatgaagctggaaaccatcattctcagcaaactatcacaaggacaaaaaaccaaacaccgcgtgttctcactcagagactataagctctcccattttcttatttctcttggcttcatacttcttaagagaaaagatgtgattgggttgtccagtcatcatccaggtgagcagtgctctcatgactcacctctcaggtccttgatggtctttgggccagagctgatctctggtcatagtcccttagagccagtggtggtgcctcgtcgaagtcatggctgcctgataggggctgtaaatctcaaatccagcaatcgaaccccagtggtacaggaatttgaaagagacttggcgggtcgtgcagaaatactggggaagacatccctgaagatctggaatgtgacacggagagactcagccctttatcgctgtgaggtcgttgctcgaaatgaccgcaaggaaattgatgagattgtgatcgagttaactgtgcaagtgaagccagtgacccctgtctgtagagtgccgaaggctgtaccagtaggcaagatggcaacactgcactgccaggagagtgagggccacccccggcctcactacagctggtatcgcaatgatgtaccactgcccacggattccagagccaatcccagatttcgcaattcttctttccacttaaactctgaaacaggcactttggtgttcactgctgttcacaaggacgactctgggcagtactactgcattgcttccaatgacgcaggctcagccaggtgtgaggagcaggagatggaagtctgtcacactgataaaagaggtgggttcccatggtcttgggcagctccccacctgtggtttttgcaggatacagccttgctccccgctgctctcacgggctggtgttcagtgtctgtggcttttccaggtgcacagtgcaagctgtcagtggatctatcattctggggtctggaggatggtggccctcttctcacagctccactaggcagtaccccagtagggactctgtgtaggggatctgaccccacatttcccttccacgctccccagtcgtgtgttcagccagaagcaacatatggcctacacttctacttggttcaactgctaccatttccagagacttgcctgacccttttccaataatcgtattgaggtaggtatccctcttcggtgttcccacagctccttgtccttgatcacactgtttaccacaccaaatggttatcgttagtttgtcttcttgactgggcagattagctagatacagagtgctgattggtgcatccaccaaccccaagctagacacagtgctgattggtgcatatacaatcctccctctggacacaaaagttctccaagtccctcctgactcaggagcccagctggcttcctgtagtggatcccgcaccagggccaagggcggagctgcctgccagtcccacaccacgggcgtgcactcctcagcccttgggcggtcgatgggactggcccctggacaagggggcggcacccgtccgggagacttggtggcagcccaccgcggtgggggggcttgggcatggctggctgcaggtcccgagccctgccccacggggaggtggtgcccggggccagcgggccgctccgagtgcagggcttgtggagcccgcgtccacctggaactggcactggcctgccatagccacaggcagtcccggttcccgcccacgcctatccctccacacctcctgcattcacataagacccacatttgctcctggataaatattccccagctgtcactcttgctgccgaaaactgttccacttctccaggcttctttgtgccccccaccccccaggaggacagcatgttcctcttctccttgcttctttgtccccccaatgacaggcccctgtgtgtgatgttccccaccctgtgtccaagtgttctcattgttcagttcccacctatgagtgagaacatgcggtgtttggttttctgtccttgtgatagtttgctcagaatgatggtttccagcttcatccatggcccatgctgttttggttactgtagccttgtagtatagtttgaagtcaggtagcatgatgcctccagctttgttcttttggcttaggattgtcttggcaatgtgggctcttttttggttccacatgaacttgaaggtagtattttccatttctgtgaagaaagtcattagtagcttgatggggatggcattgaatctataaattaccttgggcagtatggccattttcaggatattgattcttcctatccataagcatggaatgttcttccatttgtttgtgtcatcttttatttcattgaacagtggtttgtagttcttcttgaagaggtccttcacatcccttgtaagttgtattcctaggtgttttattctctttgtagcaattgtgaatggaagttcactcat

SEQ ID NO: 12101 - DNA, 3200 bp, Homo sapiens
  SIMILAR (2305)..(2955): 861254mologous to Homo sapiens putative p150,accession number U93574,Smith-Waterman Score=1034.
caaattctgtgaagaatctcgttggtatctgataggaattgcattgaatctgtaaattcctgtgggcactatggccattttaatgatattgactcttcctatccatgaacatgaaatatttttcttttttttttctttgggcttttttttttattggactctaagttttagggtagtacatgtgcacaacgtgcaggttttgttaccatatgtatacatgtgccatgttggtttgctgcaccccgttaactcatcatttaacattaggtatatctcctaatgctatccctcccccatctccccccaccccatgacaggccccagtgtgtgattgtgtgatgtccctcaacctggggtccaagtgttccccattgttccagttcccacctatgagtgagaagcatgcggtgtttggtttttttgtccttgtgataagtttgctgagaatgatggttttccagcttcatccagtgtcccctacaaagtaggacacgaactcatcatttttttatggcttgcataggtattccatgggtgtatatgttctacatttttttcttaatccaggtctatccattggatgggacattttggggttgggttccaagtctttgctattgtgaatagtgccacaataaacatatgtgtgcatgtatctttatagcagcatgatttataatcctttgggtatacacccagtatatacccagtaatgggggtggctgggtcaaatggtatttctagttctagatccctgaggaattgccacaccgacttccacaatggttgaactagtttacagtcccaccaacagtgtaaaagtgttcctatttctccacatcctctccagcacctattgtttcctgactttttaatgatcaccattctaactggtgtgagatggtatctcattgtggttttgatttgcatttctctgatggccagtgatgatgagcattttttcatgtgttttttggctgcataaatgtcttcttctgagaagtgtctgttcatatcctttgcccactttttgatggggttgtttgtttttttcttgtaaatttgtttgagttcattgtagattctggatattagccctttgtcagatgagtaggttgcaaaaattttctcccattctgtaggttgcctgttcactctgatggtggtttcttttgctgtgcagaagctctttagtttaatgagatcccatttgtcaattttggcttttgttgccattgcttttggtgttttcgacatgaagtccttgcccatgcctatgtcctgaatggtattgcctaggttttcttctagggtttttatggttttaggtctaacatgtaagtctttaatccatcttgaattaatttttgtataaggtgtaaggaagggatccagtttcagctttctacatatggctagccagttttcccagcaccatttattaaatagggaatcctttccccattgcttgtttttgtcaggtttgtcaaagatcagatagttgtagatatgtggcattatttctgagggctctgttctgttccattgatctatatctctgttttggtaccagtaccatgatgttttggttactgtagccttgtagtatagtttgaagtcaggtagcgtgatgcctccagttttgttcttttggcttagggatgacttggcaatgagggctctcttttggttccatatgaactttaaagtagttttttccaattctgtgaagaaagtcattggtagcttgatggggatggcattgaatctgtaaattaccttgggcagtatggccattttcacgagattgattcttcctcctacccatgagcatggaatgttcttccatttgtttgtatcctcttttatttccttgagcagtggtttgtagttctccttgaagaggtccttcacatcccttgtaagttggattcctaggtatgttattctctttgaagtgattgtgaatgggagtccactcatgatttggctctctgtttgtctgttattggtgtataagaatgcttgtgatttttgcacattgattttgtatcctgagactttgctgaagttgctcatcagcttaaggagattttgggctgagacagtggggttttctagatatacaatcatgtcatctgcaaacagggacaatttgacttcctcttttcctaattgaataccctttatttccttctcctgcttgattgccttggccagaacttccaacactatgttgaataggagtggtgatttttgcaatctactcatctgacaaagggctaatatccagaatctacaatgaactcaaacaaatttacaagaaaaaaacaacccaatcaacgggctaaggatatgaaaagacccttctcaaaagaagacattgatgcagccaacaaacacatgaaaaaatgctcatcatcactggccatcagagaaatgcaaatcaaaaccacaatgagataccatttcacaccagttagaatggcgatcattaaaaagtcagggaacaacaggtgctggagaggatgtggagaaataggaacacttttacactgttggtgggactgtaaactcattcaaccattgtggaagtcaatgtggcgattcctcagggatctagaattagaaataccatctgaccgagccatcccattactgggtatatacccaaaggattataaatcatgctgctataaagacacatgcacacgtatgtttattgcggcactattcacaatggcaaggtcttggaaccaacccaagtgtccaacaatgatagactggattaagaaaatgtggcacatatacaccatggaatactatgcagccataaaaaatgatgagttcatgtcctttgtagggacatggatgaaactggaaaccatcattctcagcaaactatcacaaggacaaaaaaccaaacaccacatgttctgactcataggtgggaattgaacaatgagaacatatggacacaggaaggggaacatcacactccggggaatgttgtggggtgggaggaggtggggagggatagcattaggagatatacctaatgctaaatgatgagttaatgggtgcagcacaccaacatggcacatgtatacatatgtaacaaacctgcacgttgtgcacatgtaccctagaacttaaaagtataataataataaaattaaaaaaatatatatatataaaca

SEQ ID NO: 12102 - DNA, 321 bp, Homo sapiens
  SIMILAR (2)..(148): 801254mologous to Homo sapiens Human secreted protein sequence encoded by gene 2 SEQ ID NO:250,accession number Y91577,Smith-Waterman Score=207.
ccctgcccccagaggtggagcctacagaggcaggcagacctccttgagctgtggtgggctccacccagtttgagcttcctggctgctttgtttacctaagcaagcctgggcaatggcgggcgccctccccaagcctcgctgctgccttgcagtttgatctcagactgctgtgctagcaatcagcgagactccgtgggcgtaggaccctccgagccatgtgcgggatataatctcctgttgtgccgttttttaagccagtcggaaaagcacagtattcgggtgggagctgtagactgtagctgttcctatttggccatcttg

SEQ ID NO: 12103 - DNA, 522 bp, Homo sapiens
  SIMILAR (121)..(276): 961254mologous to Homo sapiens bK415G2.1 (synapsin III),accession number Z83846,Smith-Waterman Score=245.
atggtgggcgcccctcccccagccttgctgccgccttgcagtttgatctcagactgctgtgctagcaatcagcgagactccctgggcgtaggaccctccgagccaggtgcgggatataatctcgtggtgcgccgttttttaagccggtcggaaaagcgcagtattcgggtgggagtgacccgattttccagcctgaaggttggaacagctatgttgcacaaacagcaaagatggcagcccacccctccctctgggagctccatcccagccccatcctgtgcctataaaaaccccgagaccctagcaggcatacacacaagctgctggacctcaagaggagaagattggcggaagaagacacaggtggctggatgtccagaggtgcacatcagcggaggaacacacaggtggctggacgtggagaggggcacattagtaggccctgacaggctggcaggccaccgacaggcagaacaacgtggaatctggctggggcagtcggaggagagcccaggctactga

SEQ ID NO: 12104 - DNA, 480 bp, Homo sapiens; identical to SEQ ID NO: 7586
  SIMILAR (31)..(357): 701254mologous to Homo sapiens NAG13,accession number AF194537,Smith-Waterman Score=367.

SEQ ID NO: 12105 - DNA, 471 bp, Homo sapiens
  SIMILAR (663)..(553): 861254mologous to Homo sapiens PRO1546,accession number AF116638,Smith-Waterman Score=156.
atgagtgaactcccattcacaactgcttcaaagagaataaaatatgtaggaatccaacttacaagggatgtgaaggacttcttcaaggagaactacaaaccactgctcaatgaaatgaaagaggacacaaacaagtggaagaactttccatgctcacgggtaggaagaatcaatatcaggaaaatggccatactgcccaagctctgcatggcaaggagaatgtcccctgcagagctcctatcaggtgacttgttgctgaagtcagcaatggggcaggtatcggactttggagaagaagtgggagaaatggaagggcttatcaaatggcacaacaggagattatatcccgcacctggcttggagggtcctatgcccacggagcctcactcattgctagcacagcagtctgagatcaaactgcaaggtggcagcgaggctgggggaggggcacctgctattgctcaggtttga

SEQ ID NO: 12106 - DNA, 363 bp, Homo sapiens
  SIMILAR (502)..(876): 871254mologous to Homo sapiens gag,accession number AF156961,Smith-Waterman Score=578.
atggtgggcgcccctaccccagcctcactgctgccttgcagtttgatctcagactgctgtgctagcaatgagcgaggctccgtgggcgtaggaccttccaagccaggtgcaggatataatctcctgccctacttcttgcttcccaaggtctaccaggactcagggctggggtcggaaggaagaaagttggagtacgtggcttttgcaactctccctgggccatatgacattcttctctctttgggttcattgaacagggaatatacagccctcttcttccgtaaagcagcttatctccgggactgcattacccttcatccaggagcctggatccttgacatcatttcttcgctggatccttaa

SEQ ID NO: 12107 - DNA, 1309 bp, Homo sapiens
  SIMILAR (99)..(269): 821254mologous to Homo sapiens Human secreted protein, SEQ ID NO: 6834,accession number G02753,Smith-Waterman Score=248.
atggcagaaggggaagaaggcacttcttacatggcggcaggtgagagagtagtggccatcgccctgatagacggttttcgccctttgacgttggagtccacgttctttaatagtggatcttgttccaaactggaacaacactcaacctatctcggggattttgccgatttcggaaccaccatcaaacaggattttcgcctgctggggcaaaccagcgtggaccgcttgctgcaactctctcagggccaggcggttccagaaccaaaacagcatggtattggtcccaaacaaaaatataggtccacgggaccgaacagagccctcagaaataatgccgcatatttacaatttcttatctttggcaacctggagaaaaccaagccatggggaaaggattcccttttaattaaagtctttgaagctgctgtcctttggatagagtgttttgcttttatcttctatgatgcccgtggggtcttgattgtggtacaagtggactcttgttccaaactggaacaacactcaaccctatctcgggctattcttttgatttataagggattttgccgatttcggaaccaccatcaaacaggattttcgcctgctggggcaaaccagcgtggaccgcttgctgcaactctctcagggccaggcggtgaagggcaatcagctgttgcccgtctcactggtgaaaagaaaaaccaccctggcgcccaatacgcaaaccgcctctccccgcgcgttggccgattcattaatgcagctggcacgacaggtttcccgactggaaagcgggcagtgagcgcaacgcaattaatggattttgccgatttcggaaccaccatcaaacaggattttcgcctgctggggcaaaccagcgtggaccgcttgctgcaactctctcagggccaggcggtgaagggcaatcagctgttgcccgtctcactggtgaaaagaaaaaccaccctggcgcccaatacgcaaaccgcctctccccgcgcgttggccgattcattaatgcagctggcacgacaggtttcccgactggaaagcgggcatttgatctcagactgctgtgctagcaatcagccagactccgtgggcgtaggaccctccgagccaggtgcgggatataatctcgtggtgcgccattttttaagcccgtcagaaaaacacagtattcgggtgggagtgacccgattttccaggtgccgtccatcaccccttcctttgactcagaaagggaactctctgaccccttgcgcttcccagttgaggcaatgccttgccctgcttcggctcaggcacg

SEQ ID NO: 12108 - DNA, 1335 bp, Homo sapiens
  SIMILAR (253)..(864): 861254mologous to Homo sapiens gag,accession number AF156961,Smith-Waterman Score=922.
atggcgggcgcccctcccccagcctcgctgccaccttgcagtttgatctcagactgctgtgctagcaatcagcgagactccgtgggcgtaggaccctccgagccaggtgcgggatatagtctcctggtgtgccgttttttaagcccgtcggaaaagcgcagtattggggtggtagtgacccgattttccaggtgccgtctgtcacccctttctttgactaggaaagggaactccctgaccccttgcacttccccagtgaggcaatgcctcgccctgcttcggcttgcacacggcgttacccgtgacaaaaccactaaaggcggtgcttccggtaaagctggtcagccaccaaaaccaggtgctactaatactggtgcgggtgcttctgctgcaaaatctctgttcgaaataatgcagatacctgtgcttggagttgaccccagttttcgtaactggggactagcacggggaatgctcgacttagagacgggaatactctctggattagacctgaagctggtagaaaccaaacctgatggaaccaagcaagtaaggcagaacagcaaagatatgcaagctgctgaggacattactactggtgtcatcgactggttcaaagaagcaaaggtcatctttgtagaggttcccgttggctcacaaagtgccaatggaatgaaatcctatggtgtttgtgtaggcatcttaggagcactcagggcactaggacatgagattattgaagttactcctatcgagaacaaagtagctctgtccggtattaagactgcttctaaagatgtgatgattagagcagctacaggattttatccagaggccaactggctcaaggataccaaagaatttaatgagaattttatcaaaggtataacaatgcaagtaattctgactcaacctgaaatcgaagctgctctgactggttatgtaaacgacctgatgtctgtacgtgaaggcatggaaattaaagtaaccttcaaagctactcgtggtgatgatggtgctactgcaatcgtagatattgtccctgctggttcccaatctgttgaagtggttgaggaaccaaagaaagagtcaaaggaacgcaagcatcgtccagtaacccagaccaatactgctgctgtcagtgctctggcttctgctactggtaagaaaaaagaagaagtagttgaagtagaaactactactgaaactgttgatgaaactgttgaagtagctgaagaagctgctgctcaggaagaagaaaaagaagtacaggaagaagaggctaaagaaccagtacaagccaaaccttctctgtttgcaggtctgaaacgttaa

SEQ ID NO: 12109 - DNA, 1897 bp, Homo sapiens
  SIMILAR (995)..(588): 851254mologous to Homo sapiens gag,accession number AF156961,Smith-Waterman Score=625.
atggcgggcgcccctcccccagcctcgctgccgccttgcagtttgatctcagactgctgtgctagtaatcagcgagactctgtgggcgtaggaccctccgagccaggtgcgggatataatctcgtggtgtgccgttttttaagccggtccgaaaagcgcaatatttgggtgggagtgacccgattttccagggcctttgaagatgtcaaggtcttttggcgagtcacacttaacaaaacagtcgtcgtgctccagaaggatggggtaaacctgatggaggaacttcagtctgtgtcagggaccacaacctgtacaatgggtcaaacaaaatgctttatcagcattgaactcaaaccagaaaaggtaccacaggttgaagtgtatttttttgtggaactatatgaagctactgctggagcagcaataaacaacagtgccagattcgcacagattaaaatcttagaaagtgatgaatctcaaagccttgtgtatttttctgtgggttctcggctggcagtggctcacaagaaggccactttaatcagtctgcaggtggccagagattctgggacaggactaatgatgtctgttaactttagtacccaggtcttcctatcactgggctctaatttcactttgcaactggtgactgtgatgcttgtcggtggacgtttctatggaatgccaacaattcttcaggaagcaaaatctgctgtccttccagtctctgagaaagctgccaattctcaggtcggatttgaatccactgcttttcaactcatgaacatcactgctggcacaagccacgttatgatttctaggagaggcacatatggagctctctcggttgcctggaccactggatatgctcctgggttagaaattcctgaattcattgttgttggcaacatgaccccaacactggggagcctttcattttcccacggtgaacaaaggaaaggagttttcctgtggacgtttcctagccctggttggccagaggcctttgttcttcacctatcaggagtgcagagcagtgctcctggcggagctcaactccgtggatttttcaccattgctgatggagagagtgaagctagctttgatgttcatttgctaccagatgaggtacctgagatagaggaagattatgtgatccagcttgtttctgtagagggaggagccgaactggatctggagaagagtatcacatggttctctgtttatgcaaatgatgacccacatggagtatttgccctgtattcggatcgccagtcaatacttattgggcagaaccttattagatccatccaaattaacataacccggcttgctggaacatttggagatgtggctgttgggcttcgaatatcatcggatcataaagaacagccgattgttaccgaaaatgcagagaggcagctggtggtcaaagatggtgccacatataaagtggacgtggtgccaataaagaatcaggctgacagacaactcatacaggagagctctggctggcatctggcaggtgccccgctgggtcgaagcttccagaggaaagaagcaggcagcaatctttgctgttctgcagcctctgctggtgatatccaggcaaacagggtctggagtggacctccagcaaactccagcagacctgcagcagagggacctgactgttagaaggaaaactaacagaaaggagcagcacatccactcagagacctcatccaaaggtcaccaacatcaaagaccaaaggtaggtaaatccacaaagagggggagaaaccagagcaaaaatgctgaaaattccaaaaaccagaacgctgcttctcctccaatggatcacaacttcttgctagcaagggaacaaaactggacagagaatgagtttgatgattga

SEQ ID NO: 12110 - DNA, 1530 bp, Homo sapiens
  SIMILAR (466)..(2133): 951254mologous to Homo sapiens putative p150,accession number U93564,Smith-Waterman Score=2811.
  misc_feature (1)...(1530): n = a,t,c or g
acccagttcgagcttcccggctgctttgtttacctaatcaaacaactaactcggcaatggcaggtgcccgtcccccagcctcgctgccgccttgcactttgatctcagactgctgtgctagcaatcagcgagactccgtgggtgtaggaccctccgagccaggtgcgggatataatcttgtggtgtgccattttttaagcccatcggaaaagcgccgtattcgggtgggagtgacccgattttccaggtgccgtccgtcacccctttctttgactaggaaagggaactccctgaccccttgcgcttcccgagtgaggcaatgcctcaccctgcttccgctcatgcacggtgcgctgcacccactgtcctgcacccactgtctgacactccccagtgagatgaacccggtccctcacgatggaaatgcagaaatcacccgtcttctgcgttcgntcacgctgggagctgtagaccggagctgttcctatgtcagccatcttggctcctcccctgcacttttcaaataagagcgctggtgccgctggcagcgccgtggcttcagcaacggtcatctctactgcgccaagctcgggtcgtgcccgggacaaattgagactatcccagagctcggacacaaggagaagtaaatttcaaattgggccagagaggaagctgagacccatttgggttggggaaggggaaggaggagaagcctgtctaacttcaaaggcgctggaaatcagatccttatctccgggtcccggaccccgctgggcgccgcggaggcctccccctgctcctctgggtgcttggcctatccaaggccaagccagcggccgtggctgtgggactctggcctgcacactgtcccgaacccgctccgtgcctgggctgttacacactgccctgcaagcttcctccactcctagtggcactgaagcaggaatgagctcccgtttggagatgctggctttacagacaggagccactgggaaagctcgcttatgttttcagctggtgatcttatttcattatggtgaaagttggaacctcttacgtgccgatcaacgtctcattttcgccaaaagttggcccagggcttcccggtatcaacagggacaccaggatttatttattctgcgaagtgatcttccgtcacaggtatttattcgcgataagctcatggagcggcgtaaccgtcgcacaggaaggacagagaaagcgcggatctgggaagtgacggacagaacggtcaggacctggattggggaggcggttgccgccgctgctgctgacggtgtgacgttctctgttccggtcacaccacatacgttccgccattcctatgcgatgcacatgctgtatgccggtataccgctgaaagttctgcaaagcctgatgggacataagtccatcagttcaacggaagtctacacgaaggtttttgcgctggatgtggctgcccggcaccgggtgcagtttgcgatgccggagtctgatgcggttgcgatgctgaaacaattatcctga

SEQ ID NO: 12111 - DNA, 1422 bp, Homo sapiens
  SIMILAR (39)..(260): 361254mologous to Rattus norvegicus putative,accession number L33267,Smith-Waterman Score=92.
atgatgagtccccaggaagaaccagaacaagacagagggatgaaatggatgaaggaatggcaggagattatagccctgtatgagaaggacaacacctacttagtggaactctctagcctcctggtttggaatgtcaactatgagatcccctcactgaagaagcagattgccaagtgccagcagctgcagcaagaatacagctgcaaggaggaggagtgccaggcaggggctgctgagatgggggagcagttctaccactcctgcaagcagtatggcatcatgggcgaaaatacccgaggagaactgctggccctggtgaaggacctgccaagtcagctggctgagactggggcagcggcgcagcagtccctgggggaagccatcgaagtgtaccaggcctctgtggggtttgtgtgtgatagccccacagagcaggtgttgccaatgctgtggttcgtgcagaagcggggaaactcaacggtgtacgagtggaggacagggacagagccctctgtcgtggagcgaccccacctcgaggagcttcctgagcaggtggcagaagacgcgattgactggggcgactttgggatcacagtggtggaagcaggaatccaggctccagaaggtgttgccaggggcccagatgctctgacacttcttgaatacactgagacccagaatcagttccttgatgagctcatggaacttgagatcttcttagcccagagagcagtggagttgagtgagaaggcagatgtcctgtctgtgagccagttccagctggctccagtcatcctgcagggccagaccaaagagaagatggttatcatggtgtcagtgttggaagatctgattggcaaacttaccagtcttcaactgcaacacctgtttatgaacctggcctcaccaaggtatgtggaccgagtgactgaattcctccagcaaaacctgaagcagtcccagctgctggctttgaagaaagagctgatggtgcagaagcagcaggaggcacttgaggagcaggaggctctggagcctaagctggacctgctgctggagaagaccaaggagctgcagaagctgattgaagctgacatctccaagaggcaaaagaccaggccgactggaagacggaaagccacaggaaggaagcggcacctgatggtgatcttggcactctccatgttctctacaagaagctgtggtgattggccctgtggcctgtcagtgtatgggatgcttgtatcatgtaagcgttgttcggattgttatcgatgtcataatgaggcgcattatcggatatgcggatgggttatggtactcccaattagtagtgtattcgcacgtcgaaatgttatggtagcgatcggaaaggaatcaaatggcaccaaatggaatcgtatggattcagatgcagcgtag

SEQ ID NO: 12112 - DNA, 574 bp, Homo sapiens
  SIMILAR (1368)..(4): 771254mologous to Homo sapiens putative p150,accession number U93574,Smith-Waterman Score=1770.
cgggtcgacgatttcgtccgccagactcgcccttctgcacaggccgccctggctgagaagatggcggccaaccagcccccgcctctgatgatgaagcacagccagacggacctcgtgagccgcctgaagacctcgcaagatcctcggcgtgggcggggaggatgacgacggggaggtgatcgctccccgatcagccaggccttaggcactgaaatcaagtttaccattcgggagcctttggggctcacggtctggcagttcgtctctgctgtgctcttctccggcattgccatcatggcgcttgccttccctgaccagctctatgatgcggtctttgatggagcccaggtgaccagcaagacccccatccgcctctacggcggtgccctcctcagcatctccctgatcatgtggaacgctctctacacggctgagaaggtcatcattcgatggaccctgctcaccgaagcttgctatttcggggtccagttcttggtggtcactgccacgctagctgagacgggcctcatgtccctggggatccggctgaccaggagcagtcgacgcggccgcg

SEQ ID NO: 12113 - DNA, 547 bp, Homo sapiens
  SIMILAR (106)..(71): 501254mologous to Mycoplasma capricolum ribosomal protein S14 (AA 1-61),accession number X06414,Smith-Waterman Score=43.
gagtcaggctcgacgcctatagaacgcctgcggaaccgcgccggaattcacgcgtcgagaccacgacgtccgcctcaggctgccgggtcaacgggcctgaagactttaagtttgcatctgtgtttcgactcctgaccctggatagtgaagaggtgccggaggcctgctgccggagggaaccccaaagtcgggacggggtcctgctgagccggtgaggagtgcctcctgggaaggagcctattcctaaacaagcagggctgttacacggggatcctcaacaccttcgagacctacgtctacttggccggagcccttgccatcggggtactggccatcgagcttttcgccatgatctttgccatgtgcctcttccggggcatccagtagagggtatggcctgaagcctgaagacttgccccacccaccactgcccagcacccaatgtcctcccgggcccctccccgctgtcctcttggccccaaggggaagaagatgaggccatcagagatggccaagaagaagggccaggggaatagagctatttttt

SEQ ID NO: 12114 - DNA, 2030 bp, Homo sapiens
  SIMILAR (158)..(571): 271254mologous to Caenorhabditis elegans Similarity to Human protein-tyrosine phosphatase epsilon (SW:PTPE_HUMAN), contains similarity to Pfam domain: PF00102 (Protein-tyrosine phosphatase), Score=218.3,,accession number Z72517,Smith-Waterman Score=112.
  misc_feature (1)...(2030): n = a,t,c or g
caccgccagccaaagcagtcccttccatttcaggcaccggcctgggcccgggagacaccgcaaggctatttaagatggtgtggtttgcccatctacgttgatcgtcccaagaaaggggcaccgtctgcagaacttgccaggaaagtcatcctgggcggcgcgggccacgccagggtctccccgcgcggcttcctcccccggcgccttctctcgggcgcgcgtgcgccccctgcaggcggcccccgggagagcctcgcgggggagccgggagcctggtttccccgccaacccccatcccgcccgccccggcggccaccctgggggcgaggcagcccggcgcgtgggaggggacggcgcgccattggcttgtgcgcggaaccgagaggagggaccagcgcgggccgccagactcgcccttctgcagaggccgggctggaggagaagatggcggccaagcagcccccgcctctgatgaagaagcacagccagacggacctcgtgagccgcctgaagacccgcaagatcctcggcgtgggcggggaggatgacgacggggaggtgcatcgctccaagatcagccaggtcttaggcaatgaaatcaagtttaccattcgggagcctttggggctcagggtctggcagttcgtctctgctgtgctcttctccggcattgccatcatggcgcttgccttccctgaccagctctatgatgcggtctttgatggagcccaggtgaccagcaagacccccatccgcctctacggcggtgccctcctcaatgctgcgcccacaccccggcctctgatgaagctctctgctggggatgtgctgccatcttgtggccattggtggaatacacccagtgggttggagcttgcagtcgccaccatctgcaaggagcgctcataagggacttccttaaagcgagtccttaccgggctcaggttttctgtctgggagtccgtgtaaaagaaaacccaatcataggaccaggcatctccctgatcatgtggaacgctctctacacggctgagaaggtcatcattcgatggaccctgctcaccgaagcttgctatttcggggtccagttcttgggctgggaacctcccatttgcctaaggatctccttaccccccatcaccaagcacagcccacatttcaccagccagcaaaatgcaaatgtcattagcgctctgcaagctgctcacccgagaattcttcaccaaggagctcaccaagcactaccagggcaataacgacacagacgtcttctctgccacctggaactcggtcatgatcacatttggttgctgcggggtcaacgggcctgaagactttaagtttgcatctgtgtttcgactcctgaccctggatagtgaagaggtgccggaggctngctgccggagggaaccccaaagtcgggacggggtcctgctgagccgggaggagtgcctcctgggaaggagcctattcctaaacaagcaggtcttagacctacctcactgggaagcacattaggacctggagagtctctcctcaagctggaaaaggcaatagagggggagtttgggaaatggacagtggaatacggcagcccctgggggtctttggagtctgaaggttttggaccaggccagtggtctggagatatggctctgagagagggtagaggagggattgaagaagtgagagactggaacaagttgtctactgcaaggatccaaggagtagaagctgccgccctggagtggagcaggggacactggggtggagacgaggggctgatgcaggagggaccctcaaacttgagcttccatcagaatctcctggagggcttgtcaaaacccagggtgccgggcctcaccactctcaagtttctgattcagtgggtctggagtggaggtctgaaaatctgcatatccaggttcccaggagatgctggtgatgctggtctgaggatcatgtttgagaaccactatttaaaccctgagcaacttgagggccatgacaagtggcaccttacaccctaa

SEQ ID NO: 12115 - DNA, 336 bp, Homo sapiens
  SIMILAR (153)..(308): 901254mologous to Plasmid F 96 pct identical to gp:AB021078_30,accession number AP001918,Smith-Waterman Score=269.
atggaagaacattccatgctcatggataggaagaatcaatatcgtgaaaatggctgtactgcccaagtgagccccatccagatccccagacgcctcccgctgctgctcacccacgagggcgtcctgctgcccggctccaccatgcgcaccagcgtggactcggcccgcaacctgcagctggccacggcctgccttgagcgcgaggctcagttcggggcggccttcgcggctcggttccgcctctctggtgctatcacttgcaaaatggggatgtcagatacctgccccatgaccatgaatgagatcgttcatgaagtagtgcctgacacctggtga

SEQ ID NO: 12116 - DNA, 1161 bp, Homo sapiens
  SIMILAR (61)..(1158): 991254mologous to Homo sapiens L-type amino acid transporter 2,accession number AB037669,Smith-Waterman Score=1913.
atgagggagcagttctgcttgtgtgccttgggcatcatgcagccagatacagcccctgaagtgctcctcacatgggtcaactgttccagtgtgcggtgggccacccgggttcaagacatcttcacagctgggaagctcctggccttggccctgattatcatcatggggattgtacagatatgcaaaggagagtacttctggctggagccaaagaatgcatttgagaatttccaggaacctgacatcggcctcgtcgcactggctttccttcagggctcctttgcctatggaggctggaactttctgaattacgtgactgaggagcttgttgatccctacaagaaccttcccagagccatcttcatctccatcccactggtcacatttgtgtatgtctttgccaatgtcgcttatgtcactgcaatgtccccccaggagctgctggcatccaacgccgtcgctgtgacttttggagagaagctcctaggagtcatggcctggatcatgcccatttctgttgccctgtccacatttggaggagttaatgggtctctcttcacctcctctcggctgttcttcgctggagcccgagagggccaccttcccagtgtgttggccatgatccacgtgaagcgctgcaccccaatcccagccctgctcttcacatgcatctccaccctgctgatgctggtcaccagcgacatgtacacactcatcaactatgtgggcttcatcaactacctcttctatggggtcacggttgctggacagatagtccttcgctggaagaagcctgatatcccccgccccatcaagatcaacctgctgttccccatcatctacttgctgttctgggccttcctgctggtcttcagcctgtggtcagagccggtggtgtgtggcattggcctggccatcatgctgacaggagtgcctgtctatttcctgggtgtttactggcaacacaagcccaagtgtttcagtgacttcattgagctgctaaccctggtgagccagaagatgtgtgtggtcgtgtaccccgaggtggagcggggctcagggacagaggaggctaatgaggacatggaggagcagcagcagcccatgtaccaacccactcccacgaaggacaaggacgtggcggggcagccccagccctga

SEQ ID NO: 12117 - DNA, 611 bp, Homo sapiens
  SIMILAR (244)..(609): 781254mologous to Mus musculus Hhl,accession number AF118565,Smith-Waterman Score=456.
tttcgtctcagttccctccgttctcctcgggctccagttttggcggagcgaacgggaccggcccggcttcagagcgcgaggtggagggtggaacgcgggcgcctgaaggagttgttgtctcggcagcgcccgcggagacgtgaagaggtggttgtgggaagagaagtttgcagaactgaaatggaggtcagagcttcattacagaagatagtttctaatggtgatgaacaattggaaaaagccatggaagagattttgagagatttcgagaaaaggccaagcagtcttcttgttgattgtcaaagttccagtgagatttcagaccattcgtttggagatattccagccagccaaacaaataagccatctcttcagttaattttggatccgtctaacacagaaatttctacacccagaccatcttctccaggtggactacctgaagaagatagtgttttatttaataaactgacctacttaggatgtatgaaggtttcttccccacgtaatgaagtagaggctttacgggcaatggcaaccatgaaatcttccagtcaatacccctttcctgttaccctgtatgtaccaaatgttccagaaggttctgtgag

SEQ ID NO: 12118 - DNA, 497 bp, Homo sapiens
  SIMILAR (336)..(494): 791254mologous to Mus musculus Hhl,accession number AF118565,Smith-Waterman Score=206.
tttcgttcgggctccagcggtggcggagcgaacgtgactcggcccggcttcaaagcgcgaggcggagggtggaacgcgggcgcctgaaggagttgttgtctcggcagcgcccgcggagacgtgaagaggtggttgtgggaagagaagtttgcagaactgaaatggaggtcagagcttcattacagaaggttagtggatcatctgattctgtggctacaatgaacagtgaagaatttgttttggttcctcagtatgcagatgataattctacaaaacatgaagaaaaacctcaactgaagatagtttctaatggtgatgaacaattggaaaaagccatggaagagattttgagagattccgagaaaaggccaagcagtcttcttgttgattgtcaaagttccagcgagatttcagaccattcgtttggagatattccagccagccaaacaaataagccatctcttcagttaattatggatccgtctaacacagaaacg

SEQ ID NO: 12119 - DNA, 807 bp, Homo sapiens
  SIMILAR (1)..(465): 901254mologous to Homo sapiens ART-4,accession number AB026125,Smith-Waterman Score=750.
atgttccggagaaaccctctgcccaacatcgatcatgaactgcaggagccgctgattgacagaggtgaggacgttccaagagaggaggaggaggaggaagaaaacgggtttgaagacagaaaagatgacagcgatgacgacgggggtggctggataacccccagtaacatcaagcagatccagcaggagctggagcagtgcgacgtccccgaggacgtgcgggttggctgcgtgaccacagacttccccaggcagaatgttctgctgcagatggggctgcacgtgctggcggtgaactgcatgctgattcagctacgtctgggctgccacggctgtttcaagacaacgtctgacatgagccgagtgttctgttcacactgtgggaacaagaccctgaagaaagtgtccgtgaccatcagtgacgacggcaccctgcacatgcacttctcccgcaaccccaaggtacataaacttacattgaagagcgactatactggttcatatagccaatatttaagagtcccaaaagtggacgatgatttaaatgaaagaaacctcatttattggaatgactggattcgtcggaccgatgtgcagagcattgctccactgaagataagatcaatagaacatacaattggcggtcccacaactgcattgactgattccactggctatttggggctggagagaagccccaggcctgaatccagtcttccggtgggggctaccttgccggagttcatcaagaacaggactccttttcggcttaaacccctgtggtggactctaaaggcccccctgtga

SEQ ID NO: 12120 - DNA, 1294 bp, Homo sapiens
  SIMILAR (1)..(210): 911254mologous to Homo sapiens putative p150,accession number U93565,Smith-Waterman Score=343.
atggctccagtggagcacgttgtggcggatgctggggctttcctgcggcatgcggctctgcaggacatcgggaagaacatttacaccatccgggaggtggtcactgagattcgggacaaggccacacgcaggcggctcgctgtcctgccctacgagctgcggttcaaggagcccttaccggaatacgtgcggctggtgactgagttttcaaagaaaacaggagactaccccagcctctctgccacggacatccaagtgcttgcactcacataccagttggaagcagagtttgttggggtgtctcacctaaaacaagaaccacagaaggttaaggtgagctcatcgattcagcacccagaaacacctctgcacatttctggtttccatctgccctacaagcctaaacccccacaagaaacagaaaaaggacactcagcttgtgagcctgagaacctggaatttagttccttcatgttctggagaaaccctttgcccaacatcgatcatgaactgcaggagctgctgattgacagaggtgaggacgttccaagtgaggaggaggaggaggaagaaaacgggtttgaagacagaaaagatgacagcgatgacgacgggggtggctggatgaacccccagtaacatcaagcagatccagcaggagcttgagcagttttgacgtccccgaggacgtgcgggtttggcttgcctgaccaccagacttcgccatgcagaatgttctgctgcagatggggctgcacgtgctggcggtgaactgcatgctgattcgtgaggcccggagctacatcttgcgctgccatggctgtttcaagacaacgtctgacatgagccgagtgttctgctcacactgtgggaacaagaccctgaagaaagtgtccgtgaccgtcagcgacgacggcaccctgcacatgcacttctcccgcaaccccaaggtgctgaacccccgcggcctccggtactcgcttcccactcccaaagggggcaaatacgccatcaacccccatctcaccgaggatcagcgcttccctcagctgcgactctcccaaaaggccaggcagaaaaccaacgtgttcgcccctgactacatcgccggggtgtcaccctttgtcggagaatgacatctccagccgctcagctaccctgcaggtccgggacagcaccttgggagctgggcggagacgcttaaatcccaacgcttgcagaaagaagtttgtgaagaaaaggtgaagagcgagttcccgcaggcaaattggatgggcgtctggccgccgtggaa

SEQ ID NO: 12121 - DNA, 350 bp, Homo sapiens
  SIMILAR (53)..(337): 891254mologous to Mus musculus TGF-beta receptor binding protein,accession number AF188297,Smith-Waterman Score=411.
  misc_feature (1)...(350): n = a,t,c or g
gaagccgatcctactgcagggccatgagcggtccattacgcagattaagtataaccgcgaaggagacctcctctttactgtggccaaggacccttctggagaggtgttggtgaatgttaaggagcactcccggcagatcaacgacatccagttatccagggacatgaccatgtttgtnaccgcntccaaggacaacacagccaagctttttgactccacaactcttgaacatcagaagactttccggacagaacgtcctgtcaactcagctgccctctcccccaactatgaccatgtggtcctgggcggtggtcaggaagccatggatgtaaccacaancttncaccagg

SEQ ID NO: 12122 - DNA, 381 bp, Homo sapiens
  SIMILAR (307)..(777): 891254mologous to Homo sapiens putative p150,accession number U93563,Smith-Waterman Score=712.
atggagtcttcagaaacccttgggtctggagaggtgttggtgaatgttaaggagcactcccggcagatcaacgacatccagttatccagggacatgaccatgtttgtgaccgcgtccaaggacaacacagccaagctttttgactccacaactcttgaacatcagaagactttccggacagaacgtcctgtcaactcagctgccctctcccccaactatgaccatgtggtcctgggcggtggtcaggaagccatggatgtaaccacaacctccaccaggattggcaagtttgaggccagctacagcagcggcggcgaagatggttacgtccgtatccattacttcgacccacagtacttcgaatttgagtttgaggcttaa

SEQ ID NO: 12123 - DNA, 1539 bp, Homo sapiens
  SIMILAR (1)..(81): 1001254mologous to Homo sapiens profilin II,accession number L10678,Smith-Waterman Score=139.
atggtgccctgcatcccagctgcttcagttccagctgtggctaaaaggggccaaggtacagctctggctatggcttcaaaaggtgcaagccccaagccttggcaacttccacatgatgttagtcctgcgggtgcacagaagtcaagaactgagcattggaacctcttcctaggtttcagaggatgtatggaaacacctggatgtccaggcagaacttttgctgtgggtagggagagctctcatggagaacctcttgctagggcaatgcagaaggagcagatcagaactggggatacttctacttatggggaaaaggtaagctggagacttttagtggtccctatcactgttgcagacgccagcagttattgctacagggtggtcctccaatcctcacagaccttgagtccaatttggacaattgccaggaatacacacaggaactgtgaaagatatgtcgatagatcagtcgatatctccatcctcactggttattttgactactggtggatgccgtttcttcatagtgtcgatggtctctacattttggtatggttttccagtggcagttttccttttaacagtcaggcccctattctgaagctctgcttgagtatactggaggtccactctagacgctgtttgcctgggtatcaccagaggagcctgcagaacagcaaagattgctgcctgctccttcctctagaaccttcctctcccagagcgacacctgccaaatgccagccagagctctactgtatgagtgtctgcatgccctattcttcttggtcacgggacaagaacccagaacccaccaaagagcaggagctaaaaagggcagtaacacactccaggccagctcaccgagctgcggatgggcctccagatggacacagagctgcctggtgtctttctagggacaccactcaattccacacggaacccgtcaggccatggatacctgagcagactagcatcagttgctgtagccccaacaagggaggacaggctcttttgcacatccctaggatagaggccacagcagcagtcctgaggagtggccagactataccacatgagacccccatgcccctgctacttcttgtcatgcaaggcttgctggcttgggctcccagtgcagcagccctgttcccacctggccagcgcaggcagtcacagttctgtgttcctctggaaagcagccatacttcacgctgcgcaaccccctacatctgctgctcctcacagcacaaggcttgggctcccagcacagcagccccacacctacctgaacactgtgaattagaaaatactactttacatgtcataaggaaccaaaaaagagcccgtatagccaagacaatcctaagcaaaaagaacaaagctggaggcatcatgctacctgacttcaaactatactacaaggctacagtaaccaaacagcatggtactggtaccaaaaacagatatatagaccaatggaacagaagagaggctctgagaaataacgccacacatctacaaccatctgatctttga

SEQ ID NO: 12124 - DNA, 2514 bp, Homo sapiens; identical to SEQ ID NO: 828
  SIMILAR (1716)..(1285): 501254mologous to Homo sapiens profilin II,accession number L10678,Smith-Waterman Score=288.

SEQ ID NO: 12125 - DNA, 1080 bp, Homo sapiens
  SIMILAR (670)..(2496): 961254mologous to Homo sapiens putative p150,accession number U93567,Smith-Waterman Score=3100.
atgtatgtgagactactgaagaaacagttttacaaacaagccatgactaacaaattagctacaagattagaaattatgcttcaggggttatgcagcttctggctgcaagagtctgaaccttcccaaattgctcctgggggtaacattactactgtagaacctaagctttttgactccacaactcttgaacatcagaagactttccggacagaacgtcctgtcaactcagctgccctctcccccaactatgaccatggctggatcaagcatgctgcaactggcttccatcttgggtgccagcatctagatgaggtggacatggcagcacctgaaaactcagagataccagcaactgcagagccccaaggggttgtcacagcttctgtcactccttggggagtcccaagggtggacagagtaagtgttctggagagcaccagggtgaattgcaaaacccctgtggagcatggaagccaggatacctccaaagagtgtggagcaaatcatcctgcctctgccacactatttcccctgccaggagcagatcagaactggggatacttctacttatggggaaaagacgccagcagttattgctacagggtggtcctccaatcctcacagaccttgagtccaatttggacaattgccaggaatacacacaggtgcattccccggaagagaaatttccttgacacccttgctcatgagacatacatttctatggcatggcatcatcttgaaactggacctacatctggagtgtgtcctgctttgaggccagtagccactaaaccattctaccgcttacgtgccacagtcatttcactaaattcacataggtgcctacagcaccaatactccagctgtctagaacctaggcccaaaggaatgactgggactctgatgtctgaacagatgaggcatcctgtcacccagggaaacaggcaagcatgcacagtggagaggctccttgcagctgctgggcctgtgtgcacccattcttggcttgagaactggaccagaagtagcaccactccgttggagagggttacacacagctgcctgatctgctcatga

SEQ ID NO: 12126 - DNA, 1466 bp, Homo sapiens
  SIMILAR (442)..(1359): 931254mologous to Homo sapiens putative p150,accession number U93572,Smith-Waterman Score=1564.
ggcacgaggttgcggccttcctcgcgtcaccgccgggatgaagccgatcctactgcagggccatgagcggtccattacgcagattaagtataaccgcgaaggagacctcctctttactgtggccaaggaccctatcgtcaatgtatggtactctgtgaatggtgagaggctgggcacctacatgggccataccggagctgtgtggtgtgtggacgctgactgggacaccaagcatgtcctcactggctcagctgacaacagctgtcgtctctgggactgtgaaacaggaaagcagctggcccttctcaagaccaattcggctgtccggacctgcggttttgactttgggggcaacatcatcatgttctccacggacaagcagatgggctaccagtgctttgtgagcttttttgacctgcgggatccgagccagattgacaacaatgagccctacatgaagatcccttgcaatgactctaaaatcaccagtgctgtttggggacccctgggggaggtgcatcatcgctggccatgagagtggagagctcaaccagtatagtgccaagtctggagaggtgttggtgaatgttaaggagcactcccggccagatcaacgacatccaggttatccagggacatgaccatgtttgtgaccgcgtccaaggacaacacagccaagctttttgactccacaactcttgaaccatcagaagactttccggacagaacgtcctgtcaactcaagctggccctctcccccaactattgaccatgtggtcctggggcggtggtcaggaaagccattggatgttaaccacaaccttccacccaggatttggcaagttttagggccaggtttctttccattttggcctttgaaaggaagagtttgggaagagtcaaggggtcactttgggacctattcaacagtgttgccttccatcctggatgggcaagagttacagcagcgggcgggcgaaggatggttacgtccgtattccattaatttcggacccacagtaatttcgaattttgagttttgagggtttaagaagctggatctcctgccgggcgtggttggctcatgcctgtaatcccaccactttttttttaaggcaggcggatcacctgaggtcaggagtttaagaccagcctgaccaacatggagaaacctcgtctctactaaaaatacaaaaatacaaaaattagccaggcatggtggcacacgcctatagtcccagctactcaggaggctgaggcaggagaatcacttgaacccaggaggcataggttgcagtgagctgagatcacgtcattgcactccatcctgagccacaagagcaaaactccgtctcaaaaaaaaaaaagaagaaggtggatctccaaccaggccagagaagattctcacagaaggttttgaactctaagaaataaattggtttggtaataaatggcttctggtcaga

SEQ ID NO: 12127 - DNA, 600 bp, Homo sapiens
  SIMILAR (1)..(180): 811254mologous to Homo sapiens L7a protein,accession number X52138,Smith-Waterman Score=248.
ctagtccacaagaagagaggcaccactgctgccttcgcacaggttaacttggaagacaaaggagctttggctaagctggtggaaactatcaggaccaattacagcgacagatacgatgagatctgctgtcactggggaggtaatgtcctgggtcccaagtctgtggctcgcatcaccaagcgagctcatcatgcaggtttgttcttctaagaaaggattccctatcaccatattgcaggctcctgcaaggccaaattccccagggccaccaccagtgttcattgttgccctgttgctctttctgtccacaccagtggtacgaggagaccctatctcaactctcactccctgagataaatgtgaaatggacaacttatctgtgtctccctccctcgcttgctgccccttctgggaacaggaccccactgaggacaatcgattcacttggctggttggcaaattgcaagaacccctctgcctatgccactgatgcacaatgtctagggctggcacaatgcaaactcctccaagagccagttctgtccctccaggcacacagatactatccatcacagagctggcggcctcaagaatggccat

SEQ ID NO: 12128 - DNA, 458 bp, Homo sapiens
  SIMILAR (225)..(1): 1001254mologous to Homo sapiens PRO1477,accession number AF130059,Smith-Waterman Score=387.
  misc_feature (1)...(458): n = a,t,c or g
gtcgccttcacacaggtgaactcggaagacaaaggcgctttggctaagctggtggaagctatcaggaccaattacaatgacagatacgatgagatccgccgtcactggggtggcaatgtcctgggtcctaagtctgtggctcgtatcgccaagctcgaaaaggcaaaggctaaagaacttgccactaaactgggttaaatgtacactgttgagttttctgtacataaaaataattgaaataatacaaattttccttcnnnnnnnnnnnnnggggggcccctttaaaaagaaaaaattttaatacccgggggtgggaaaggaaaacttttttttagggggccccaaaataaatttccggggccgggttttaaaaacgggggagggggaaaaacccgggggtacccaaattaaaaccccttggaaaaaaaanngnnnnggcccaccgaggatggagaacc

SEQ ID NO: 12129 - DNA, 219 bp, Homo sapiens
  SIMILAR (4)..(2082): 941254mologous to Homo sapiens putative p150,accession number U93572,Smith-Waterman Score=3427.
atggaactcagggccgaatacctcagggagaagctgcagcgggacctggcggcggagcatgtggcgcttctggcggtgtcggccaagttcgaggggaagccgctgcttcagagacaccgcctggtgaacgcgtgcctagcagaagcgctcctgcgcatccatgcctttgaacagaaaaccctaatcccagagcagtgggcccgtgagcggcagaaatga

SEQ ID NO: 12130 - DNA, 500 bp, Homo sapiens
  SIMILAR (76)..(333): 1001254mologous to Homo sapiens My016 protein,accession number AF060511,Smith-Waterman Score=447.
ttcgcggccgcgtcgaccggcgcccgagctggggttgtgtccctgctgggctgccgttccagctggactgccgccatggaactcagcgccgaatacctccgcgagaagctgcagcgggacctggaggcggagcatgtggaggtggaggacacgaccctcaaccgttgctcctgtagcttccgagtcctggtggtgtcggccaagttcgaggggaaaccgctgcttcagagacacaggctggtgaacgcgtgcctagcagaagagctcccgcacatccatgcctttgaacagaaaaccctgaccccagaccagtgggcacgtgagcgacagaaatgagggactgggatctgcacagccattaaattataaatctggaaaaaaaataagaccagctgaaagattctgtgctcatacagctttgcggaggtgcttgaatgtggagtgccggggcggttcaacctggagctgtcactgaaaagcgagcaactggtgctgctcac

SEQ ID NO: 12131 - DNA, 174 bp, Homo sapiens
  SIMILAR (1)..(132): 791254mologous to Macaca fascicularis hypothetical protein,accession number AB047968,Smith-Waterman Score=183.
gttgaaagacttgaagccaaagtagttgaacccttgaaaacttatgggaccattgtgaaaatgaaacgggcagaaacggaattacagagagctgcaatggatgctagccgaacaagtcgtcatctggaggaaactattaacaactttgaaaggcagaaaatgaaggatataaag

SEQ ID NO: 12132 - DNA, 2293 bp, Homo sapiens
  SIMILAR (147)..(269): 971254mologous to Homo sapiens Human secreted protein clone dh1073_12 protein sequence SEQ ID NO:106,accession number Y94950,Smith-Waterman Score=207.
atggtgatagtgatggatggagaaagggatagaggacagatcctggatatatattttgaacgtagaaccaataggcaggtctataccgcaattgcttcttgcctggaccactacaagagcctctttttggtctcttcctccctcgctccttccagtatgttctccgcacgcagccagagtgatcatgccattgctcttactcaactccagtggctttgtgtcactttcaagacacagcctggtgtctcactgtggcctccaaggccctcacagccaggcccatggctgcctccccatcatcgttacttcatctctcccctgcctgctgtctcaggtcttgaaatccccttctttgggcccccgcaaggtccccggccgtgcgcgaggcagcatgatgaggcgcaccctggaaaaccactaacagcccgagcccagctgcccagggccgcccataatggagggctggggaacgctcaaacgaaacaactgcaaacagctgtttcaaatgtggagaagcattttggagaactgtgccaaattttcgctgcctatgtgcggaaaactgccaggctgagagacaaagcagacctcctggtgaatgaaattaacgcgtatgctggtacagagaccccgcatttaaagctgggcctgatgaactttgcagatgagtttgccaaacttcaggattatcgacaagcagaggttgaaagacttgaagccaaagtagttgaacccttgaaaacttatgggaccattgtgaaaatgaaacgggatgacctcaaagcaacactcacagcaaggaatcgagaagctaagcaattaactcagttagaaagaacacgtcagcgaaacccatctgatcgacatgttatttcacaggcagaaacggaattacagagagctgcaatggatgctagccgaacaagtcgtcatctggaggaaactattaacaactttgaaaggcagaaaatgaaggatataaagactatattttctgaatttatcacaatcgaaatgttatttcacggcaaagctttagaggtttacactgctgcctaccagaatatacaaaacattgatgaagatgaagatttagaggttttccaaaattctctgtatgcaccagattattcatctcgtttagatattgtaagagcaaattcaaagtcacctcttcagagatcactgtcagctaagtgtgtatctggaacaggacaggtatccacttgtcgactaagaaaggatcaacaagcagaagatgatgaggatgacgagttagatgttacagaagaagaaaattttcttaagtaaactacacatttccattttcatcataaatgacttgaaatccacaatgactaaattgtagaactttatactcactttgctatgttaagcctcaaagtgaagtccaactggaaacagaaaaataattaaaggaaacttatgctgaccaaaaatgaaggctttaaaaaatattgcataccagtcatttcaacatcctacctagtgttacatgatttttgtgtaagtgcctttttttttaaagatggtgtatttcaaagtatttcatattaatgtactatatctacttgaagttccaatagtacattatgacagaaaccaaaagatctaacaattctgcttagctttttggttaagactccatgctttcattaccagaaaagggtcttacgtagtcattatgattcatggaattctattccatgaagccttaagaaaaaaaactttttttaactttccctgaaactttatcatttgataagtaaatttacttttcaagaagagtataaccaaagagtaaagataatgtgacactaaggttatcaatggttttatggaatacacataagggcataaatttcagctgttaaaaaggctacattcaatctgactctggttttaaaacaaaactgctgtcataattatacatgatactgcaacttttggaaggctaatttggtggaatgttgccctcatccatagaacacccatagatcattaaaaatcctataaaaattttacccaagctaccatatagttaataaaagggtatacagtcacttttatttctggaaaaaataaaacattgagcctttcaggggatctgatgcttctcttttggtaaggaaaacttttatttcatggatcccaggcaggcatataaaagttacggaatttataaaatcatttgggataattagaaaatgcaattattcataacagaaaaataaagactttctagaaagcttcaaaaaaaaaaaaaaaaaaa

SEQ ID NO: 12133 - DNA, 1269 bp, Homo sapiens
  SIMILAR (832)..(1188): 861254mologous to Homo sapiens zinc finger protein,accession number U69274,Smith-Waterman Score=571.
atgcaggaccccaacgcagacactgagtggaatgacatcttaacgcaaaaagggtatcttaccccccaaggaaagtctgaaagaattggaagaggaggcagaagaggagcagcgcatcctccagcagaatctgccccgatatttgtttacctggaaggagatatcaaggctcagtttattggtcctctggtgtttggtggcatgaacctgacaagagatgagttggaatggaaactgtctgaatctggagcaattatgatggacctggaggaaaaccctaagaagccgattgaagatgtattgctgtcatcaatatcttttgtccagatctcttttttggcatccttaactgaattggaacagttgtcgattatgaacaatccttgtgtgatggcaacaccatccatcccaggatttgactatcggccgtacatcgtcagctggtgcctaaacctcagagtcctagatggatatgtgatttctcagaaggaaagtgaagggtcctacccgcttccaaaatgtccacccgcattcctgacgtcactggatcggctccatcaagccagaaaacgagagtgcgctccaatcagggctcagtccccgcccttgccttgcgtcacttccggtggtgcagcagccattttgtcagtcgccagcggatcccgcgcgctggagaagtgcagttccccctggttaccaactcgcccgcttttccttcggactaagggagccgtcgaagagcgctcgccaaaggcgcagccgtttctccctacggtgccgccgctcctcctgcagccgcccgtaggcgccctcagggagccgcggtccgcgatgtcaagcgaggaaagctaccgggccatcctgcgttacctgacgaacgagcgcgagccgtatgcgccgggcaccgagggcaatgtcaagcgtaaaatccgaaaagctgccgcctgctacgtggtgcgcggcgggactctgtattaccagcggcggcagcggcaccgcaagaccttcgcggagctggaggtggtgctgcagccggagcgacgccgggacctcatcgaggcggcgcacctgggtcccggcggcactcaccacacccggcatcagacctggcactacttgtccaagacgtactggtggcgagaaaggatacacaacaaaatcagtgaagggagaaggtgcatggaacaaagtctgaaggaaacaagcacaggtttccaagaactgtcccacagtggaattattcttagttcctccagcactgaattgtga

SEQ ID NO: 12134 - DNA, 877 bp, Homo sapiens
  SIMILAR (157)..(390): 411254mologous to Arabidopsis thaliana putative protein,accession number AL161578,Smith-Waterman Score=140.
attgaccgctttgacgcgccctgcggtttggaagagctggaggatcatgaagacgagtttaatgaggaggatgaacgtgctattgaaatgtacagacggcggagactggctgagtggaaagcaactaaactgaagaataaatttggagaagttttggagatctcagggaaggattatgttcaagaagttaccaaagctggcgagggcttgtgggtcatcttgcacctttacaaacaaggaattcccctctgtgccctgataaatcagaacctcagtggacttgccaggaagtttcctgatgtcaaatttatcaaagccatttcaacaacctgcatacccaattatcctgataggaatctgccccacgatattggtttaccctggaaggagatatcaacggctcagtttattggtcctctgagtgtttggcggcatgaacctgacaagagatgagttggaatggaaactgtctgaatctggagcaattatgacagacctggaggaaaaccctaagaagccgattgaagacgtgttgctgtcctcagtgcggcgctctggtcctcatgaagagggacagcgattccgagggtgactgaggctacagcttctatcacatgccgaactttcttgtgacaaattgtctggattttttaaaaaaggaaaaagcaagaatgaatccttgtggtttttagttttgtataaattatgtttcaaatctttacattttggaaataatcattgctggagattctgttaaatattttggaactctttttttttttaaattatagtatttcctctaaaaaaaattaaaaccagccatttgtatggcaaatgtcaaaaaaaaaaaaaaaaaaaaaaaaaaagggcggccgct

SEQ ID NO: 12135 - DNA, 523 bp, Homo sapiens
  SIMILAR (39)..(401): 381254mologous to Deinococcus radiodurans DNA-binding response regulator,accession number AE002072,Smith-Waterman Score= 99.
tctctggtcaaacattctatacgtgggtctggaattaacctctcttttgtacccacaggtttccaaatagtcccctttcatctttttgaaacaagtctttggctctaagcctctggctttctgtactttaatataatcttcaagttcatcttgaaaagagtcatatgtcttctttgaatgcttcattaggttgacaaaacgggattttccttatcaggctgagaatttggtggagaaatctgatcatattcactcagtttttcagcatgaattttcaaatagtgagactacacaataactggtgagctcataatgcaaaatcctttgttatttgaactgtaacactactccacagacatcttttataaaaggtatctgtaaacaaagttcagtctttgttcattcaatgtggtatcttctctgaggcaggggcgggcgtctacaactactgtcccccaccccgccaacgccgccagccaggggataagccgcggtggagaccattctgatgttggacgtgtcc

SEQ ID NO: 12136 - DNA, 773 bp, Homo sapiens
  SIMILAR (337)..(2): 1001254mologous to Homo sapiens BM-003,accession number AF208845,Smith-Waterman Score=614.
ctgagaaacagtccctcgtgaactgacagtagctcagagagtctagtctcaatctgctgtcatgggctggtaaccactgaggcaaccgattttccactgtttgtggaatattgcatgatcttgggtaggtctggatggtttcagatgggagtctctggtcaaacattctatacgtgggtctggaattaacctctcctttgtacccacaggtttccaaatagtcccctttcatctttctgaaacaagtctttggctctaagcctctggctttctgtactttaatataatcttcaagttcatcttgaaaagagtcatatgtcttctttgaatgcttcattaggttgacaaaacgggattttccttatcaggctgagaatttggtggagaaatctgatcatattcactcagtttttcagcatgaattttcaaatagtgagactacacaataactggtgagctaaaaaccgcaattcagagatcaaaaatcaatttttgtccaattctccactctcactcatctcataatgcaaaatcctttgttatttgaactgtaacactactccacagacatcttttataaaaggtatctgtaaacaaagttcagtctttgttcattcaatgtggtatcttctctgaggcaggggcgggcgtctacaactactgtcccccgccccgccaacgccgccagccaggggataagccgcggtggaggtggcggagaggcaggaacaaccgctgctcggcgaattcacacggccttcaattgtacgccc

SEQ ID NO: 12137 - DNA, 2179 bp, Homo sapiens
  SIMILAR (1015)..(1182): 891254mologous to Mus musculus t-BOP,accession number U76371,Smith-Waterman Score=263.
atgagtttctccggcaagtaccaactgcagaacccggaaaaacttgaaacctttatgaaagccatcgattcatccgtaatcaatataatggaaaattctaagacttctgactcttttcaacatgaactggaggattatattagaaagcagaaagccagaggattgcaaccaaccctttgctttacaaaggtgacggaggactccgcgtgccaagaaaggggccccactgagcctcgggggccggagcagcagggactccccttctggaggccccacgtgttccccgcttccttggaaagactgaggaccgtggaaagccgggtacctccctggcctaaaattccttatgcgccacgaagactggaatctgtaaaccacagtcaaaataatcaggaccatttcttcaaacaccggtggcttccaagcccatctgggcagggagagaacacaggcgtccgcggtgcgcacggcaaggaaggttcctgttgcctcttctgggagccccgcggcagcgcccagcaggcgggccgtggggaccgtagcctggagaagaagcaccgggaagtgggaagacaaaaagcgcccgggaggagcagcaaaccccaagagaagccccgcccgaaagggactcacaccaagggaccagggcacgatgaaagcccaaggggcctccaggccttgcagaaaaggcccaaacgcatcaagagaaataccccggggggaaaatcccgttttgtcaacctaatgaagcattcaaagaagacatatgactcttttcaagatgaacttgaagattatattaaagcctcggtccccacggtccgcctgctgggcgctgccgcggcgctcccagaagaggcaacaggaaccttccctgccgtgcgccccgcggacgcctgtgttctctccctgcccagatgggcttggaagccacccgtgtttggaagaaatggccctgattatttcgactggggtttacagattccactcttcctgggcgccatatggaattttaagccaagggaggccatgcgggtgcagacggagatggagctacgcatgttccgccagaacgaattcatgtactacaagatgcgcgaggctgccctgaacaaccagcccatgcaggtcatggccgagcccaacaatgagccatccccagctctgttccacaagaagcaatgaggactgcccagtggaggaggggcgatgtggctggggagctagggagagactctggaggtggtgggtctctggggagacccctaaatgaaggaaagtttgaggtaatgcttaacattgttgcttgtgagaatttactgccctgtgtttcccgagagccattttggctcaattcaagtctattcaattcaagttaactctagcccagcccgagatcaactcctcctacaaatattattggatgataggccctagaacccaataaaggagctccaaatgtcgttgggtggggaagcaaaatgtagagaaacattttaaagcacactgtaattaataaatgcaattataaactatatggaggagggtgcagaggagcgaatgtgtctggtgtgtgatgtgtgtgtgtgcagtgggggtatcacacgagagtatgacatctgagttgagggtagcaggtgcctggagtctcaggtggctgctcacccatctgtgcaggtgtctctggggctgctggtctcacctgtggtctgcagtagacacaattggctgagcaggatatgtgatactgtgtggttggtgtggagttttgaagaaggggctgtgtttgggccacgtaggctctactcagagacttgaaaccacttcagaatggtgcatatgtcgaaagagctggctgggggccttgcccaaaccaactgaggtcttaaagtccggggaaaaaaagtctgggttccaactagaattctagaaatatttctagaacacacagagagggaataagtccctctatcacccttattaccaagccttgtggttccctgtgattttagataatgtctgatatttttctggctatttgcctagtaggatttaaaaaatattttcaaagtgaagctgagagagaatcttggaaacacacatacctgttgatcatgggccctgcagaattggcccttgggggctttatttggttacgtgtgcctgggtggtctttacc

SEQ ID NO: 12138 - DNA, 462 bp, Homo sapiens
  SIMILAR (1)..(459): 1001254mologous to Homo sapiens dJ526F5.1 (novel protein similar to UBE2N (ubiquitin-conjugating enzyme E2N (homologous to yeast UBC13))),accession number AL109622,Smith-Waterman Score=788.
atggccgagctgccccacaggatcatcaaggaaacccagcgtttgctggcagagccagttcctggcatcaaagcagaaccagatgaaagcaacgcccgttattttcatgtggtcattgctggggaatcaaaggattccccctttgagggagggacttttaaacgtgaactattacttgcagaagaatacccaatggcagcccctaaagtacgtttcatgaccaaaatttatcatccaaatgtagacaagttggaaagaataagtttagatattttgaaagataagtggtccccagccctgcagatccgcacagttctgctatcgatccaggccttgttaaatgctcccaatccagatgatccattagcaaatgatgtagtggagcagtggaagaccaacgaagcccaagccattgaaacagctagagcatggactaggctatatgccatgaatagtatttaa

SEQ ID NO: 12139 - DNA, 516 bp, Homo sapiens
  SIMILAR (1)..(72): 951254mologous to Mus musculus Map kinase kinase,accession number X98067,Smith-Waterman Score=127.
atgtgtgactttggcatcagtggctacttggtggactctgtggccaagacgatggatgccggctgcaagcctacatggccgagggcggatgactgtggacggagcgtggagatggagggttctgatgcggatgcagagatgatgtggggcggcgcgcacaacaacgcacacgaccacgcactaccaccgcgcctccaacgacacatctactacctcgccacacacccgctacccacacgcaacgacacgcgacttacaacgcgaactaccacgacaacacatcgaagacgcgaactcactatcaccgcatccacctccatacgctacgacgaccgcgccgacacaccgcacaacgacccgcgacaacccgatcggctaatcaaaactcacacgacaccacaacgcgacgaccaaccacgatcgacatcacgcacacaacaacacgctgcaccgcgcgacacacaacgcgacgtcgtacaacaacaaacgacaacacgcacatcgacgaacaactga

SEQ ID NO: 12140 - DNA, 1906 bp, Homo sapiens
  SIMILAR (127)..(1167): 1001254mologous to Homo sapiens MAP kinase 3b,accession number U66839,Smith-Waterman Score=1807.
actcactatagggctcgagcggccgcccgggcaggtgtctgcccgcagccatgagcgtgctcggccccggtggagcccgcagtcctctagattagtctccaccgccgtccaggacccacttgcagcatggagtcgcccgcctcgagccagcccgccagcatgccccagtccaaaggaaaatccaagaggaagaaggatctacggatatcctgcatgtccaagccacccgcacccaaccccacacccccccggaacctggactcccggaccttcatcaccattggagacagaaactttgaggtggaggctgatgacttggtgaccatctcagaactgggccgtggagcctatggggtggtagagaaggtgcggcacgcccagagcggcaccatcatggccgtgaagcggatccgggccaccgtgaactcacaggagcagaagcggctgctcatggacctggacatcaacatgcgcacggtcgactgtttctacactgtcaccttctacggggcactattcagagagggagacgtgtggatctgcatggagctcatggacacatccttggacaagttctaccggaaggtgctggataaaaacatgacaattccagaggacatccttggggagattgctgtgtctatcgtgcgggccctggagcatctgcacagcaagctgtcggtgatccacagagatgtgaagccctccaatgtccttatcaacaaggagggccatgtgaagatgtgtgactttggcatcagtggctacttggtggactctgtggccaagacgatggatgccggctgcaagccctacatggcccctgagaggatcaacccagagctgaaccagaagggctacaatgtcaagtccgacgtctggagcctgggcatcaccatgattgagatggccatcctgcggttcccttacgagtcctgggggaccccgttccagcagctgaagcaggtggtggaggagccgtccccccagctcccagccgaccgtttctcccccgagtttgtggacttcactgctcagtgcctgaggaagaaccccgcagagcgtatgagctacctggagctgatggagcaccccttcttcaccttgcacaaaaccaagaagacggacattgctgccttcgtgaagaagatcctgggagaagactcataggggctgggcctcggaccccactccggccctccagagccccacagccccatctgcgggggcagtgctcacccacaccataagctactgccatcctggcccagggcatctgggaggaaccgagggggctgctcccacctggctctgtggcgagccatttgtcccaagtgccaaagaagcagaccattggggctcccagccaggcccttgtcggccccaccagtgcctctccctgctgctcctaggacccgtctccagctgctgagatcctggactgagggggcctggatgccccctgtggatgctgctgcccctgcacagcaggctgccagtgcctgggtggatgggccaccgccttgcccagcctggatgccatccaagttgtatatttttttaatctctcgactgaatggactttgcacactttggcccagggtggccacacctctatcccggctttggtgcggggtacacaagaggggatgagttgtgtgaataccccaagactcccatgagggagatgccatgagccgcccaaggccttcccctggcactggcaaacagggcctctgcggagcacactggctcacccagtcctgcccgccaccgttatcggtgtcattcacctttcgtgttttttttaatttatcctctgttgattttttcttttgctttatgggtttggcttgtttttcttgcatggtttggagctgatcgcttctcccccaccccctagggg

SEQ ID NO: 12141 - DNA, 429 bp, Homo sapiens
  SIMILAR (356)..(427): 871254mologous to Homo sapiens putative neuronal cell adhesion molecule,accession number AF063936,Smith-Waterman Score= 98.
acacaccaaggggggccagctcagcctctgtgcccaccctagctagcaccctgggtgaaggtgaggcctgggtgtggagcacaaaaccacaggcactcactcagggtatcagagcagaaccaccatgcacacttgttctggttgtgcgctgtgcagggtgcccggccctgaggctgtcagggctgagtctacttggaggaaagggcttctttttctaattcctaggaaggtgctgctttcataagcacatgcccttggccagaggccagagggctgtcaggattttgggggtcggggtcacaggtggaaggtagaaagatagagcttccactgggtcctcacatcgtggcctccttctctacctgcagcccctgccccacccccactgtcagtgcgagtcctgggcagctcctccttgcagctgctgtg

SEQ ID NO: 12142 - DNA, 1308 bp, Homo sapiens
  SIMILAR (949)..(1098): 901254mologous to Mus musculus punc,accession number AF026465,Smith-Waterman Score=234.
atgcagtaccgtatgctgtttggggccttctcacctgatgctccctccccgcctaccccccacgcaatgtccccttctcccaacttagtggacagtacagcacagtgtgagggatttcaaacattccgtgcatcagaaccatctggaaagattgccaatggcagcctcctggccccattccctgatgttctgattccgagatgggctctgaaagaagatacctggctgggctccagagagtatacccacacttcaggcaggagcgtgccatatctctatcaccagtccgttgggctgtctcttggctacccgcatacctcctctgttcttcgctcctctttaccttatcttacctgcgctccctcttctttcacagtgtgtataactctcttatcatcattgcttcgtctcttcccacgcgtacttccacccgtggtgaagatcactgccacatcagctgccctcccgcacattcctgctcttgctccttgtcttctggagctggttgagcataggcccagggacctacggtttgaggacgactccaaagagcgagtcatccccgtcactccggcctgcgggacgttccgctggaatcccggactgcctgcctgttcccttgcggtggtcacgtgggcaagcggctttgtatcagccgccgttcgaacaatgggctgtcaaaccacagctggactgcgctactcctctcatgccgagtggcagatcaacccccttcagctggcctctgcagccttctcagccacgtgcgtgcagagtgccgggctctgtgctgcctggcgtgagggtgcacaggaatctaaggctggatctctggctcatttccccctgggaatcccatcctatgctgatctccaggacttccccattgctggcagccctgcagagcccgcagcagagggacggatgtctggaacgtcctggtctcctggctcgggctctggggcctacaaggagccagccatcctcgtggggcctgagaacctcaccctgacagtgcaccagaccgcggtgcttgagtgtgtcgccacgggcaacccgcgccccattgtgtcctggagccgcctgggctggccacccaacccaacagccaaagagcaagaacagagggcaaaaacagagagccagcggaagcagccgagagacaaagcgagagagaaccagccaaaggccgctcgccccaagcgagccgccccaaagagccacgaagcagcccgaaagacaaaccccccgacagcaagcacaaaacggcaagcagcccccacgaacacaccaaaagagagctcataa

SEQ ID NO: 12143 - DNA, 2695 bp, Homo sapiens
  SIMILAR (205)..(1656): 941254mologous to Mus musculus punc,accession number AF026465,Smith-Waterman Score=2396.
atgcaaagagcctgtggaagatcttaccagatggagaaaggcaatgccaagggcttgagcctggtcgcacctctggtgggggcagggcggtgctgggagattccttcccagatcgctgtggacaaagggccccaaggtactgtttataagggctgtacctacgtggggatgtgtgtgattgattacctgcacagaaccagagccatgtcggacttccacgtgcatccccaggccaccgtgggtgaggagggtggtgtggcccgcttccagtgccaaatccatgggcttcccaaacccctgatcacttgggagaagaacagagtcccaattgacacggacaatgagaggtacacattgctgcccaagggggtcctgcagatcacaggacttcgagctgaggacggtggcatcttccactgtgtggcctcaaacatcgccagtatccggatcagccacggggccaggctcactgtgtcaggctcgggctctggggcctacaaggagccagccatcctcgtggggcctgagaacctcaccctgacagtgcaccagaccgcggtgcttgagtgtgtcgccacgggcaacccgcgccccattgtgtcctggagccgcctggatggtcgccctatcggggtggagggcatccaggtgctgggcacaggaaacctcatcatctcagacgtgacggtccagcactctggcgtctacgtctgtgcagccaacagacctggcacccgggtgaggagaacggcacagggccggctggtggtgcaagccccagctgagtttgtgcagcatccccagtccatctccaggccagctgggaccacagccatgttcacctgccaagcccagggtgagccaccgcctcatgtcacgtggctgaaaaatggacaggtgctggggccaggaggccacgtcaggctcaagaataacaacagcacactgaccatttctggaatcggtcctgaggatgaagccatttatcagtgtgtggccgagaacagtgcgggctcatcacaggccagtgccaggctgaccgtactgtgggctgaggggctccccgggcctccccgcaatgtgcgggcagtctctgtgtcttccactgaggtgcgtgtgtcctggagtgagccgctggccaacaccaaggagatcatcggctacgtcctgcacatcaggaaggctgctgacccaccggagctggagtatcaggaggcagtcagcaagagcacctttcagcacctggtcagcgacctggagccctccacagcctacagtttctacatcaaggcctacacaccaaggggggccagctcagcctctgtgcccaccctagctagcaccctgggtgaagcccctgccccacccccactgtcagtgcgagtcctgggcagctcctccttgcagctgctgtgggagccttggccccggctggcccagcacgagggcggcttcaagctgttttaccgcccagcaagcaagacctccttcaccggccccatcctgctgcctggaaccgtctcctcctacaacctcagccagctcgaccccactgcagtgtatgaggtgaagctgctcgcctacaaccagcatggagatggcaatgccacagtccgctttgtgtctttgaggggagcatctgagaggacagccttgagcccaccatgtgactgccggaaggaggaggccgccaaccagacgtccaccacaggcatcgtcatcggcatccacatcggggtcacttgcatcatcttctgtgtcctcttcctcctgttcggccaaaggggcagggtcctcctgtgtaaagatgtggaaaaccagctgtcccctccacagggtccccggagccagagggaccctggcattctggccctaaatggggcgagacggggacagcggggccagctgggccgagacgagaaacgtgtggatatgaaggagctggagcagctgttccccccggccagcgcagcagggcagccggaccccagacccacacaggatcctgcagcccccgctccgtgtgaggagacccagctctccttgctgccacttcaggggtgcggcctgatggaggggaagacgacggaggcgaagaccacagaggccacggctccctgcgccggcctggcggctgccccaccacccccagatggaggccctggcctcctcagtgaaggccaggcttccaggcctgcagcggcccgggcccggcccctggaatgtaccatgtgtgggatgggtcttggccactctgccgaactggcatttgctgtggagccaagtgatgatgttgccgtccccgggcagcctatagtgctggactgcagggtggaggggacccctccagtgcgaatcacctggaggaagaatggggtagagctgccagagagtacccactccaccttgctggccaatgggtccttgatgatccgtcacttcaggctggagccgggaggcagcccttcggatgaaggtgactatgagtgtgtggcccagaaccgctttgggctggtggtcagccggaaggctcgcatccaagctgcaatgcaggggaaggctggtgcagcctctgagcagatggctgggtgtgaggaagggaagcgtggacagagggtggggaccccgacttggaaaccgaagccccaggtgagtgacctgcccaaggacatggctggtcctccagtctgggcag

SEQ ID NO: 12144 - DNA, 261 bp, Homo sapiens
  SIMILAR (100)..(5): 391254mologous to Homo sapiens erythroid differentiation and denucleation factor 1,accession number AF048849,Smith-Waterman Score=53.
attgtggccgccatcctcgccatcgctggcattgtgatgatgacctacgctgatggcttccacagccactccgtcatcggcatcgcactggtggtggcctcagcatcgatgtctgccctctacaagccacatcgttgcagcacctgggataaaatgagtggtgcccatccgcacagtcagattcctgacatcattgatggcagcgaacaagttcagtgtttgctcagatcatttgccaccctatggggtgggaagacttga

SEQ ID NO: 12145 - DNA, 627 bp, Homo sapiens
  SIMILAR (427)..(570): 891254mologous to Saccharomyces cerevisiae beta- isopropylmalate dehydrogenase,accession number X03840,Smith- Waterman Score=209.
ttgttcaatcaactggctggcaagttggagctgactcggagttcagctgagtctgtgagccacggactttggttcctcagtccctccttaagcgggtctccctgcatggctgcatggattttctcatgcctgatcattgtagatgggatggagaagggaggtagggcacagatatggcttggtattgatggcccaagttgctggaaatggggagagagtggggatcccatcctggagatgaaaaaggttttgttcaagctcctcctgggcagtgctaagtttggagaagccgccttatttttgtccatcttgggtgtgtttaacatcctcttcatcacctgcattcctattatcctctactttaccaaagtggaatactggagctcttttgatgacattccatggggaaacctttgtggattttcagttcttttattgagtgaccacgttggtcaagaaatcacagccgaagccattaaggttcttaaagctatttctgatgttcgttccaatgtcaagttcgatttcgaaaatcatttaattggtggtgctgctatcgacctgcaggggggggggggaaagccacgttgtgtctcaaaatctctgatgttacattgcacaagataa

SEQ ID NO: 12146 - DNA, 986 bp, Homo sapiens
  SIMILAR (803)..(165): 241254mologous to Arabidopsis thaliana putative integral membrane protein,accession number AC012395,Smith-Waterman Score= 161.
ttagcgggcgaaggaagggcgggctcttctgttcttgctcctgaggtccctgaacctcaggttcggcagccgcccctctgcaggctccctcccttccttccctcactttgaagtccgggtgagccagcttgatcaacccagacatccccactccctctggcaggagcaggaggagaaaaccccaggccgatgatgatgatggcgatgacccggaccccattgaagacgatctgactggtgtagtgatcaatcactgcattcacaggtatgctgaggacgattccaagagacatcagagtgggatatgtaacggcaattccaaaatttaatacaatattgaatgtcaataaaagaactgaaaatccacaaaggtttccccatggaatgtcatcaaaagagctccagtattccactttggtaaagtagaggataataggaatgcaggtgatgaagaggatgttaaacacacccaagatggacaaaaataaggcggcttctccaaacttagcactgcccaggaggagcttgaacaaaaccttgtagagggcagacatcgatgctgaggccaccaccagtgcgatgccgatgacggagtggctgtggaagccatcagcgtaggtcatcatcacaatgccagcgatggcgaggatggcggccacaatcctcactcccatgaatctgtccctgagaacgatccatgagagcaagaacacaaaagctttgttgcagcagaacaacacggagacatccgtagtgtttattttctttattgcatgtaagtacaggtagtttgtgagtgtccaaagaacaccaaagggtgctgccttggtaaaaaacaccttcaaagtcaagccattgtctccaaaaaatcgacagcattcccagcccagagcctggtagcccatctgggtggctagatccagaagagaaataacaattactaccgttcggctctcaggaagccacatcccttctcctttctccat

SEQ ID NO: 12147 - DNA, 906 bp, Homo sapiens
  SIMILAR (127)..(897): 851254mologous to Homo sapiens Human tumour-associated protein PRO347,accession number Y06483,Smith-Waterman Score=1145.
gcacccttttcctcgtgcagcccagcctgactcctggagattgtgaatagctccatccagcctgagaaacaagccgggtggctgagccaggctgtgcacggagcgcctgacgggcccaacagacccatgctgcatccagagacctcccctggccgggggcatctcctggctgtgctcctggccctccttggcaccacctgggcagaggtgtggccaccccagctgcaggagcaggctccgatggccggagccctgaacaggaaggagagtttcttgctcctctccctgcacaaccgcctgcgcagctgggtccagccccctgcggctgacatgcggaggctggactggagtgacagcctggcccaactggctcaagccagggcagccctctgtggaatcccaaccccgagcctggcgtccggcctgtggcgcaccctgcaagtgggctggaacatgcagctgctacccgcgggcttggcgtcctttgtcgaagtggtcagcctatggtttgcagaggggcagcggtacagacacgcggcaggagagtgagctcgcaacgccacctgcacccactacatgcagctcgtgtgggccacctcaagccagctgggctgtgggcggcacctgtgctctgcaggccaggcagcgatagaagcctttgtctgtgcctactcccccagaggcaactgggaggtcaacgggaagacaatcgtcccctataaaaagggggcctggggctcgctctgcacagccagtgtctcaagcctgcttaaagcctgggaccatgccagggggctactggggggcccccgggaaaccttggggaaggagccgacagaaccctggaccgccttaaaataagaaacacgccattgtggggtgtagccctgggctacacgcgcaaac

SEQ ID NO: 12148 - DNA, 1519 bp, Homo sapiens
  SIMILAR (283)..(1251): 931254mologous to Homo sapiens Human T139 protein,accession number Y41266,Smith-Waterman Score=1666.
atgccggtgctgcagggagctctttccacgctggcagcgctgacgtcccccgcgcccgcggccagcggggcggagaagaggaggagctgccaggcggcgccgccggctgccgaacctgatggctcagaccctgggcaaccagtggtgctcccagctgtgacctccgtggttgggtactcctgcctgggaccccaggaggggctgcggtggtcgttggctggcagctggcaccctttccagggcccttttgtcaaagtcctagaaaacttcatttccgtaaaggactggagtgacagcctggcccagctggctcaagccagggcagccctctgtggaaccccaaccccgagcctggcgtccggcctgtggcgcaccctgcaagtgggctggaacatgcagctgctacccgcgggcttggtgtcctttgtcgaagtggtcagcctatggtttgcagaggggcagcggtacagccacgcggcaggagagtgtgctcgcaacgccacctgcacccactacacgcagctcgtgtgggccacctcaagccagctgggctgtgggcggcacctgtgctctgcaggccaggcagcgatagaagcctttgtctgtgcctactcccccagaggcaactgggaggtcaacgggaagacaatcgtcccctataagaagggtgcctggtgttcgctctgcacagccagtgtctcaggctgcttcaaagcctgggaccatgcaggggggctctgtgaggtccccaggaatccttgtcgcatgagctgccagaaccatggacgtctcaacatcagcacctgccactgccactgtccccctggctacacgggcagatactgccaagtgaggtgcagcctgcagtgtgtgcacggccggttccgggaggaggagtgctcgtgcgtctgtgacatcggctacgggggagcccagtgtgccaccaaggtgcattttcccttccacacctgtgacctgaggatcgacggagactgcttcatggtgtcttcagaggcagacacctattacagagccaggatgaaatgtcagaggaaaggcggggtgctggcccagatcaagagccagaaagtgcaggacatcctcgccttctatctgggccgcctggagaccaccaacgaggtgattgacagtgacttcgagaccaggaacttctggatcggaaccctgggccatggcggctgccagcagatggcaaggggcccaggtagggagcacatgggggctgccagcgctgggaagaggggccagaaaggcagctggcagcagactccagggtctgagtgggccaaccttgactaccccggcccagggctcacctacaagaccgccaaggactccttccgctgggccacaggggagcaccaggccttcaccagttttgcctttgggcagcctgacaaccacgggtttggcaactgcgtggagctgcaggcttcagctgccttcaactggaacgaccagcgctgcaaaacccgaaaccgttacatctgccagtttg

SEQ ID NO: 12149 - DNA, 792 bp, Homo sapiens
  SIMILAR (157)..(402): 951254mologous to Homo sapiens Human T139 protein,accession number Y41266,Smith-Waterman Score=418.
tgctgggattataggtgtgagctcagctcggtaccctctgtatctccacccaaatctcctgctcgacgttgctcttccccacttcttggacggacgacggccacgggggacggtgcttcgatcatgagggcggacttcccccttgctgtcctcttgatagactggagtgacagcctggcccaactggctcaagccagtgcagccctctgtggaatcccaaccccgagcctggcgtccggcctgtggcgcaccctgcaagtgggctggaacatgcagctgctgcccgcgggcttggcgtcctttgttgaagtggtcagcctgtggtttgcagaggggcagtggtacagccacgcggcaggagagtgtgctcgcaacgccacctgcacccactacacgcaggtgagtgtgctgcagtatcccaatccggagcaggagtatttctattgcgactacaggattgaaattaagcccgggaaaccaagcctggggggccagtggccacacctacgtggaaagggcggggttaccccagtgttggttgaaaatcggaccgtccccaaaaggtacccggggggggtccacttcacaagcgaaaaagaagaacaaaagctgctcggaccactggagggaaacggccccaaaattgtccttgagagactggacatgactcttgccaaccatgtttggctgaaggcccagacaagaactaatgacatctcaaggcagaaagccgcagtcgcagactgggccagacctgagggcctgggaccactggcactgctgggcaaatga

SEQ ID NO: 12150 - DNA, 566 bp, Homo sapiens
  SIMILAR (25)..(378): 941254mologous to Homo sapiens Q1Z 7F5,accession number M81806,Smith-Waterman Score=604.
gccactgaagatcctggtgtcgccatgggccgccgccccgcccgttgttaccggtattgtaagaacaagccgtacccaaagtctcgcttctgccgaggtgtccctgatgccaagattcgcatttttgacctggggcggaaaaaggcaaaagtggatgagtttccgctttgtggccacatggtgtcagatgaatatgagcagctgtcctctgaagccctggaggctgcccgaatttgtgccaataagtacatggtaaaaagttgtggcaaagatggcttccatatccgggtgcggctccaccccttccacgtcatccgcatcaacaagatgttgtcctgtgctggggctgacagatccacatctcaaagaagtggggcttcaccaagttcaatgctgatgaatttgaagacatggtggctgaaaagcggctcatcccagatggctgtggggtcaagtacatccccagtcgtggccctctggacaagtggcgggccctgcactcatgagggcttccaatgtgctgcccccctcttaatactcaccaataaattctacttcctgtccaa

SEQ ID NO: 12151 - DNA, 917 bp, Homo sapiens
  SIMILAR (206)..(826): 481254mologous to Homo sapiens Q1Z 7F5,accession number M81806,Smith-Waterman Score=356.
atgggctatggtgttactgccttcttcatatgggcattcagcagggtcctgagttcttgtcctgcatccaagaagaatgagcttatgctgacagccatggatatatgcgctctttcccttcggtgtgccactgaagattctgggtgtcgccccatgggcccgccgccccggcccgttgttacccggtattgtaagaacaagccgttacccaaagttcttcgcttctgccgaaggtgtcccctgatgccaagattcgcatttttgaccctggggcggaaaaaaggcaaaaagtggaatgagttttccgcttttgtggccacatggtgtcagatgaataataaccagctgtcctcttacagccctggaaggctgcccgaaatttgtgcccaataagtaccatggtaaaaagtttgtggcaaagatggcttccaatatccgggttgcggctccacccctttcacgtcatcccgcatcaaacaagatgttgttcctgtgctggggctgacaggctccaaacaggcatgcgagggtgcctttggaaagccccagggcactgtggccagggttcacattggccaagttatcatgtccattccgcaccaagctgcagaacaaggagcatgtgacttgacgccctgcgcagggccaaagttcaagtttcctggccgccaagaagatccacatctcaaagaagtggggcttcaccaagttcaatgctgatgaatttgaagacatggtggctgaaaagcggctcatcccagatggctgtggggtcaagtacatccccagtcgtggccctctggacaagtggcgggccctgcactcatgagggcttccaatgtgctgcccccctcttaatactcaccaataaattctacttcctgtccacctaaaaaaaaaaaaaaaaaagtcgacgc

SEQ ID NO: 12152 - DNA, 369 bp, Homo sapiens; identical to SEQ ID NO: 7968
  SIMILAR (2)..(364): 911254mologous to Homo sapiens p40,accession number U93569,Smith-Waterman Score=577.

SEQ ID NO: 12153 - DNA, 394 bp, Homo sapiens; identical to SEQ ID NO: 6145
  SIMILAR (76)..(372): 871254mologous to Homo sapiens p40,accession number U93569,Smith-Waterman Score=438.

SEQ ID NO: 12154 - DNA, 717 bp, Homo sapiens
  SIMILAR (97)..(714): 781254mologous to Homo sapiens p40,accession number U93569,Smith-Waterman Score=814.
atggggaaaaaacagagcagaaaaactggaaagtctaaaaagcagagcacctctcctcctccaaaggaacacagttcctcaccagcaacggaacaaagccggacggagaatgactttgacgagttgagagaagaaggcttcagacgatcaaactactccgagctacaggaggaaattcaaaccaaaggcaaagaagtgacgggggagaatggaaccaagttggaaaacactctgcaggatattatccaggagaacttccccaatctagcaaggcaggccaacgttcagattcaggaaatacagagaacgccacaaagatactcctcgagaagagcaactccaagacacataattgtcagattcaccaaagttgaaatgaaggaaaaaatgttaagggcagccagagagaaaggtcgggttacccacaaagggaagcccatcagactgacagctgatctctcgccagaaactccacaagccagaagagagtgggggctaatattcaacattcttaaagaaaagaactttcaacccagaatttcatatccagccaaactaagcttcagaagtgaaggagaaataaaatcctttacagacaagcaaatgctgagagattttgtcaccaccaggcctgccctaaaagagctcctgaaggaagcactaaacatggaaaggaaaaactggtaccagccactgcaaaatcatgccaaattgtaa

SEQ ID NO: 12155 - DNA, 942 bp, Homo sapiens; identical to SEQ ID NO: 11184
  SIMILAR (250)..(939): 831254mologous to Homo sapiens p40,accession number U93569,Smith-Waterman Score=987.

SEQ ID NO: 12156 - DNA, 1059 bp, Homo sapiens
  SIMILAR (190)..(990): 791254mologous to Homo sapiens p40,accession number U93569,Smith-Waterman Score=1083.
atgggtgatttcctgcattctacagacagaaactacctcattaaattttgggccaaactttcagccaaaaaaacaccagcgaacagcagctctcctttgggcgatcatcagcatccctgtatcaccaagaaccttcagatacctgaaaagtggttaattggacttctgcttccactaaaggcagacctgctaaaggaggatgctggaacccattgcaaagaagctaaaaaccttgatgaaagattagacgaatggctaactagaataaacagtgtagagaagttcttaaatgacctgatggagctgaaaaccatggcacaagaactacattatgcatgcacaagcttcagtagccaatttgatcaactggaagaaagggtatcagtgattgaaaatcaaatgagtgaaatgaagcgagaagagaagtttagagaaaaaagagtaaaaagaaatgaacaaagcctccaaaaaatatgggactatgtgaaaagaccaaatctacgtctgactggtgtacctgaaagtgactgggagaatggaaccaagttggaaaacagtctgcaggatattatccaggagaacttccccaacctagcgaggcaggccaacattcatattcaggaaatacagagaatgccacaaagatactcctctagaagagcaactccaagacacttaattgtcagattcaccaaatttgaaatgacggaaaaaatggtaagggcagccagagagaaaggtcaggttacccacaaagggaagcccatcagaataacagcggatatctcagcagaaactctacaagccagaagagagtgggggccaatattcaacattcttaaagaaaagaattttcaacccagaatttcatatccagccaaactaagcttcataagtgaaggagaaataaaatcctttacagacaaacaaatgctaagagattttgtcaccaccaggcctaccttacaagagctcctgaaggaagcactaaaatggaaaggaacaaccagtaccagccactgcaaaaacatgccaaattgtaaagaccatcgatgctag

SEQ ID NO: 12157 - DNA, 1275 bp, Homo sapiens
  SIMILAR (757)..(1272): 901254mologous to Homo sapiens p40,accession number U93564,Smith-Waterman Score=793.
atgaagttggaggaaagttctggacagttaaaaatccagcttcaggaagtcgaagggacgggccttcgcaatccaccgccgagcaagggaggaattgtaatgtatgggggccctcctccagatttggaaggaaagaaaggggagggacagaaggaggggggagggggcaaaagggagaagcgggaaagtgaccctggcagcgcagccctagttgcaccccggaatgctgaactcgccccggaactggcgcccaaccgtcccaagcaccccttatttcaaattccttataacctgtcgtatggccaaaccacccctggagaaagtggcaagctgacatatttaaatttaaaagttgccttatttcctctgcattctggtcctggaaatggaaaagaacttaaagcttaccagttggacaagggagaaggagaaggggtaattgatgatggtatagataaatgtgaagggagacaagccctgacacaagctcggagccccatgctaacagacccactggtgctaaaacaaggtcctaccccttttggatcaagtcacgccaatggagtattcagttgctctattctctgtttaaatccaaatgctagaggttgttacatctttattgtaaaaaagtttgctcaggggttggtgaacagacgcttctgcagagaattgggcccattaagcatttactattttactttggttggaaacattgttgacactgtagaagctgctttaatagcccttctttgtgacgggcagaaaggaaccaagctggaaaacactctgcaggatattatccaggagaacttccccaatctagcaaggcaggccaacattcagattcaggaaatacagagaatgccgcaaagatactcctcgagaagagcaactccaagacacataattgtcagattcaccaaagctgaaatgaaggaaaaagtgttaagggcagccagagacaaaggtcaggttacccacaaacggaagcccatcagactaccagcggatctcttggcagaaactctacaagccagaagagagtgggggccaatattcaacattctgaaagaaaagaattttcaacccagaatttcatatccagccaaactaagcttcataagtgaaggagaaataaaatactttacagacaagcaaatgatgagagattttgtcaccaccaggcctgccctaaaagagctcctgaaggaagcactaaacatggaaaggaacaactggtaccagccgctgcaaaatcatgccaaaatgtaa

SEQ ID NO: 12158 - DNA, 1587 bp, Homo sapiens
  SIMILAR (718)..(2343): 261254mologous to Rattus norvegicus seven transmembrane receptor,accession number AB019120,Smith-Waterman Score=378.
atggtcaactccggggcttcggccacacgtgaactagaggcaggcaggccggggatatgccggccccagccgtgcactgtgggtgcgatcccccttaaggtcagccttggtggccacgttgctgcctccaccatcccgcccccaaagctgggcagcacagtgcagagagcgactccgtccgctggggaaggggaaagcgctcagtgcaggactttgtcttggaactcagcactggcccccacgagccactgtgaaatccgacattggctggtttcctccgtgtggcagaaccagataaccccaggctggagcctgcggacggagtcgcttgggggacccgcggcccggtgtggcggcctcgtgctctgggccgcctcggcgccagctgcctcggtggcaggcaggccacagccgcaaacttatcgggggaaccagcccccaatatttcaacacctgcagctgagggtccttctgttagaaggaaaactaacaaacagaaacgacatctgcaccaagaccccttctgtacgtcaccatcatcaaagaccaaaagtagataaaaccacaaagacagggaaaaaacagagcagaaaaactggaaactctaaaaagcagagcacctctcctcctccaaaggaacgcagctcttcaccagcaacggaacaaagctggacggaaaatgactttgatgagctgagagaagaaggcttcagacgatcaaactactccaagctacaggaggaaattcacaccaatggcaaagaagttaaaaactttgaaaaaaaattagacgaatggataactagaataaccaatgcagagaagtccttaaaggagctgatggagctgaaagccaaggctcgagaactatgtgacgaatgcagaagcctcaggagccgatgcgatcaactggaagaaagggtcttggtgatggaagatgaaatgaatgaattgaagcaagaagagaattttagagaaaaaagaataaaaagaaatgaacaaagcctccaagaaatatgggactatgtgaaaagaccaaatctacgtcggattggtgtacctgcaaatgacagggagaatggaaccaagttggaaaacactctgcaggatattatccaggagaacttccccaatctagcaaggcaggccaacattcagtttcaggaaatacagagaacgccacaaagatactcctcgagaagagcaactccaagacacataattgtcagatgcaccaaagttgaaatgaaggaaaaaatgttaagggcagccagagagaaaggtcggctcacccacaaagggaagcccatcagactaacagttgatctcttggcagaaactctacaagccagaagagagtgggggccaatattcaacattcttaaagaaaagaattttcaacccagaatttcatatccagccaaactaagcttcacaagtgaaggagaaataaaatactttacagacaagcaaatgctgagagattttgtcaccaccagacctgccctaaaagagctcctgaaggaagcactaaacatggaaaggaacaaccggtaccagccactgaaaaaacatgccaaaatgtaa

SEQ ID NO: 12159 - DNA, 1023 bp, Homo sapiens
  SIMILAR (1)..(129): 691254mologous to Homo sapiens HADHB,accession number D86850,Smith-Waterman Score=151.
atgggtgatttctgcgtttccaaccgaggtaccgggttcatctcactgcttctgctgctgatacccagacaaacagggtctggagtggacctccagcaaactccaacagacctgcagctgagggtcctgactgttagaaggaaaactaacaaacagaaagaacatccacaccaaaaccccatctgtacgtcaccatcatcaaaggccaaagacgaatggctaactagaataaccagtgcagagaagtccttaaaggacctaatggaggtgaaaaccaaggcacgagaactacgtgacgaatgcacaagcctcagtagccgattcgatcaactggaagaaagggtattagtgatggaaaatcaaatgaatcaaatgaagcaagaagagaagtttagagaaaaaagaataaaaagaaacgaacaaagcctccaagaaatatgggactatgtgaaaagaccaaatctacgtgtgattggtgtacctgaaagtgatggggagaatggaaccaagttggaaaacactctgcaggatattatccaggagaacttccccaatctagcaaggaaggccaacattcaaattcaggaaacacagagaatgccacaaagatactcctcgagaagagcaactccaagacacataattgtcagattcaccaaagttgaaatgaaggaaacaatgttaagggcagccagagagaaaggtcgggttacccacaaagggaagcccatcagactaacagcggatctctcggcagaaactctacaagccaaaagagagtgggggccaatattcaacattcttaaagaaaagaattttcaacccagaatttcatatccagccaaactaagcttcataagtgaaggagaaataaaatcctttacagacaagcaaatgctgagagattttgtcaccaccaggcctgccctaaaagagctcctgaaggaagcgctaaacatggaaaggaacaaccagtaccagcactgcaaaaacatgccaaattgtaaagaccatccaggctag

SEQ ID NO: 12160 - DNA, 2055 bp, Homo sapiens; identical to SEQ ID NO: 11688
  SIMILAR (47)..(1468): 781254mologous to Homo sapiens 3-ketoacyl-CoA thiolase beta- subunit of trifunctional protein,accession number D16481,Smith- Waterman Score=1716.

SEQ ID NO: 12161 - DNA, 6237 bp, Homo sapiens
  SIMILAR (1)..(354): 601254mologous to Cricetulus griseus Ribosomal Protein,accession number D26473,Smith-Waterman Score=320.
  misc_feature (1)...(6237): n = a,t,c or g
atggaaatgatccgactagatgaagtccccaatctgagttccttagtatccaatttcgatcagcagcagctcgctaatttctgccggattctggctgtcaccatttcagagatggatacagggaatgatgacaagcacacgcttcttgccaaaaatgctcaacagaagaagagcttgagtttggggccttctgcagctgaaatcaatcaagaaggacaccagtcctctcggtttagggccccacactttgtaacctcatttaaccttaattacttccctgtattaggcagcagtctccagagagacagaagcagtaggatttatgaggctcgggcggaggagctggaagaggagctggaggcagagcgggcagcccgggcccgcgtggagaagcagcgtgcagaggcggcgcgggagctggaggagctgagcgagcggctggaggaggcaggcggcgcatccgcggggcagcgcgagggctgccgcaagcgggaggcggagctggggaggctgcggcgggagctggaggaggcggcgctgcggcacgaggccacagtggcggcactgcggcgcaagcaggcggagggcgcggcggagctgggggagcaggtggacagcctgcagcgggtgcggcagaagctggagaaggagaagagtgagctgcgcatggaggtggacgacctggctgccaacgtggagactctgacccgcgccaaggccagtgcagagaagctgtgccggacctatgaggatcagctaagcgaggccaagatcaaggtggaggagctgcagcggcagctggcggacgcaagcacgcagcgtgggcgactacagacggaaagcggggagctgagtcgcctgctagaggagaaggagtgtctgatcagtcagctgagccgtggaaaggccctggccgcccaaagcctggaagagttgcggcgccagctagaggaggaaagcaaggccaagagtgccctggcccacgccgtgcaggctctgcggcacgactgtgacctcctgcgggagcaacacgaggaggaggctgaggcccaggctgagctgcagcggctgctgtccaaggccaatgccgaggtggcccagtggaggagcaagtacgaagcagatgccatccagaggaccgaggagctggaggaggccaaaaaaaagctggcactgcggctgcaggaggcagaggagggcgtggaggctgccaacgccaagtgctcatcgttggagaaggccaagctgcggctacagacagagtcagaggatgtaaccctggagctggagcgggcgacctcagcagctgctgcgctggacaagaagcagcggcacttggaacgggcactggaggaacggcggcggcaggaggaggagatgcagcgggagctggaggcggcacagagggagtcccgtggcctgggcaccgagctcttccggctgcggcacggccacgaggaggcacttgaagccctggagacgctcaagcgggagaacaagaacctgcagggggcttctgaggagaatggcctgcctcacacgtcagccagaacccagctgccccagtcaatgaagattatgcatgagatcatgtacaaactggaagtgctctatgtcctctgcgtgctgctgatggggcgtcagcgaaaccaggttcacagaatgattgcagagttcaagctgatccctggacttaataatttgtttgacaaactgatttggaggaagcattcagcatctgcccttgtcctccatggtcacaaccagaactgtgactgtagcccgccaccccaggaactgagtatggaagtcgttggccccttactacctttggaatcaatggatttctcaacctactgcccctctaaagcaagagtggacagcgtggctattcccaggggccggcaggaacttcagacaggcaaagccgactgcttactgagcagctggaggattcttccctccacaaggaggaacaagtacttgttactcaacaaccaggagctgaatgaactcagtgccatctctctcaaggccaacatccctgaggtggaagctgtcctcaacaccgacaggagtttggtgtgtgatgggaagaggggcttattaactcgtctgctgcaggtcatgaagaaggagccagcagagtcgtctttcaggttttggcaagctcgggctgtggagagtttcctccgagggaccacctcctatgcagaccagatgttcctgctgaagcgaggcctcttggagcacatcctttactgcattgtggacagcgagtgtaagtcaagggatgtgctccagagttactttgacctcctgggggagctgatgaagttcaacgttgatgcattcaagagattcaataaatatatcaacaccgatgcaaaggtattcctgaagcagatcaacagctccctggtggactccaacatgctggtgcgctgtgtcactctgtccctggaccgatttgaaaaccaggtggatatgaaagttgccgaggtactgtctgaatgccgcctgctcgcctacatatcccaggtgcccacgcagatgtccttcctcttccgcctcatcaacatcatccacgtgcagacgctgacccaggagaacgtcagctgcctcaacaccagcctggtgatcctgatgctggcccgacggaaagagcggctgcccctgtacctgcggctgctgcagcggatggagcacagcaagaagtaccccggcttcctgctcaacaacttccacaacctgctgcgcttctggcagcagcactacctgcacaaggacaaggacagcacctgcctagagaacgtgctgatggtgcgtgaagccgagctgcagcccatgaacccgcctcgcttcgacttactggaggacatggccatgatgacgcacctgaacgaggcctctgtgctgcacaacctgcgccagcgctatgcccgctggatgatctatacctactcaggcctcttctgtgtcaccatcaacccctacaaatggctcccagtctatacggcctccgtagtggctgcttacaagggaaagcgccgctcagattccccgccccatatatatgcggtggcggacaacgcctacaacgacatgctgcgcaaccgagacaaccagtccatgctgatcaccggagagtcgggggccggtaagacggttaacaccaagcgggtcattcagtactttgccatcgtcgctgccctgggagacgggccgggcaagaaggcccaatttctggcaacaaagacggggggcacccttgaggatcaaatcatcgaggccaaccctgccatggaggcctttggcaacgccaagaccctgaggaatgataactcctcccgctttggcaagttcatccgcattcactttggtccctctgggaagctggcatccgcggatattgacagctatctcctggagaagtcgcgggtgatcttccagttgcctggtgagcgcagctaccatgtctactaccagatcctctcagggaggaagccagagctgcagggtgaggggcagtacgatgaaggggacatgctgcttctgtctatgaacccctatgactaccacttctgcagccagggcgtcatcaccgtggacaacatgaatgatggggaggagctcatcgccaccgaccatgccatggacatcctaggcttcagcgtggatgagaaatgtgcctgctataagatcgtgggcgccctcctgcactttggcaacatgaagttcaagcagaagcagcgggaggagcaggcggaggccgatggcactgagagtgctgacaaggctgcctacctgatgggggtcagcagtggggacctcctcaaaggccttttgcacccccgggtgcgtgtagggaacgagtacgtgaccaagggccagagtgtggagcaggtggtgtttgctgtgggggctctggccaaggccacctatgaccggctgttcaggtggctggtgtctcggatcaaccagaccctggacacaaagctgccccggcagttcttcatcggggttctggacatcgctgggtttgagatctttgagttcaacagcttcgaacagctgtgcatcaacttcaccaatgagaaattgcagcagttcttcaaccagcacatgtttgtgctggagcaggaggagtacaagcgggagggcatcgactgggtcttcatcgacttcggccttgacctgcagccttgcatcgacctcatcgagaagccactgggcatcctgtccatcctggaggaggaatgcatgttccccaaggcctcagacgccagcttccgggccaagctctacgacaaccacgcggggaagtcacccaatttccagcagcctcggcctgacaagaagcgcaagtaccaggcccacttcgaggtggtccactacgcaggcgtggtgccttacagcattgtgggctggctggagaaaaacaaggatcccctgaatgagaccgtggtccccatcttccagaagtcacagaataggctcctggcgactctctatgagaattatgcgggctcctgctccactgagccccccaagtctggggtgaaagagaagcgtaagaaggcagcatcgttccagacggtgtcccagctgcacaaggagaacctcaacaagctgatgaccaacctgcgggccacacagccccacttcgtccgctgcattgtccccaacgagaacaaaaccccaggggtcatggatgccttcttggtgctacaccagctgcgctgcaatggggtcctggaggggatccggatctgccgccaagggttccccaacaggttgctctacaccgacttccggcagcgccagaacctccaatacgatgctgaagagaagtggcaatggcactgccacttccagaaacgatcaggaactcgtcttgttcctgatcttagtggtagaagctttcaattttttgccattagcatatcaattattcttcttgtaaaaatacttttagcagttgccctagaatttccagtatatatttacgacgagtctaagtccactctcaatgatattgtgctgtttttcactgagacttttttgacggagagggacaaacaatccaagtggagtggaattcctcagctgctcctcaagctgcacaccaccagccacctccacagtgactttgttgagtgtcaaaacatcctcaagcctctgctggtgatacccagacaaacagggtctggagtggacctccagcaaactctgacagacctgcagctgagggtcctgactgttagaaggaaaactaacaaacagaaaggacatccacaccaaaaccccatctgtatgtcaccatcatcaaagaccaaagaagctaaaaaccttgacaaaagattagacgaatggctaactagaataaacagcatagaaaagaccttaaatgacctgatggagctgaacaccatggctcgaaaactacgtgacgcatgcacaagcttcagtagccaattcgatcaagtggaagaaagggtatcagtgattgaagatcaaatgaatgaaatgaagcgagaagagaagtttagagaaaaaagaataaaaagaaacaaacaaagcctccaagaaatatgggactgtgtgaaaagaccaaatctacgtctgattggtgtacctgaaagtgacggggagaatggaaccaagttggaaaacactcttcaggatattatccaggagaacttccccaatctagcaaggcaggtcaacattcaaattcaggaaatacagagaacgccacaaagatactcctcgaggagaggaactccaagacacataattgtcagattcaccaaagttgaaattaaggaaaaaatattaagggcagccagagagaaaggtcgggttacccacaaagggaagcccatcagactaacagcggttctcttggcagaaactctacaagccagaagagagtgggggccaatattcaacattcttaaagaaaagaattttcaacccagagtttcatatccagccaaactaagcttcataagtgaaggagaagtaaaatcctttacagacaagcaaatgctgagagattttgtcaccaccaggcctgccttacaagagctcctgaaggaagcgctaaacatggaaaggaacaaccgataccaactactgcaaaaacatgccacattgtcaagaccttcgatgctaggaangaactgcatcaactaatgagcaaataaccagctaacatcataatgacaggat

SEQ ID NO: 12162 - DNA, 978 bp, Homo sapiens
  SIMILAR (30)..(689): 731254mologous to Homo sapiens immunoglobulin lambda light chain,accession number X57823,Smith-Waterman Score=795.
atggggaaaaaacagaacagaaaaactggaaactctaaaaagcagagtgtctctcctcctccaaaggaacgcagttcctcaccagcaacagaacaaagctggatggggaatgactttgacgagctgagagaagaaggcttcagacgatcaaattactctgagctacgggaggacattcaaaccaaaggcaaagaagttgaaaactttgaaaaaaatttagaagaatgtataactagaataaccaatacagagaagtgcttaaaggagctgatggagctgaaaaccaaggctcgagaactactggaagaaagggtatcagcaatggaagatgaaatgaatgaaacgaagcgagaaggaaagtttagagaaaaaagaataaaaagaaacgagcaaagcctccaagaaatatgggactatgtgaaaagaccaaatctacgtctgattggtgtaactgaaagtgatggggagaatggaaccaagttggaaaacactctgcaggatatcatccaggagaatttccccaatctagcaaggcaggccaacgttcagattcaggaaatacagagaatgccacaaagatactcctcgagaagagcaatcccaagacacataattgtcagactcaccaaagttgaaatgaaggaaaaaatgttaagggcagccagagagaaaggtcgggttaccctcaaagggaagcccatcagactaacagtggatctctcggcagaaaccctacaagccagaagagagtgggggccaatattcaacattcttaaagaaaaggattttcaacccagaatttcatatccagccaaactaagcttcttaagtgaaggagaaataaaatactttacagacaagcaaatgctgagagattttgtcaccaccaggcctgccttaaaagagctcctaaaggaagcgctaaacatggaaaggaacaaccggtaccagccgctgcaaaatcatgccaaaatgtaa

SEQ ID NO: 12163 - DNA, 1448 bp, Homo sapiens
  SIMILAR (44)..(748): 1001254mologous to Homo sapiens lambda-immunoglobulin light chain,accession number X51754,Smith-Waterman Score=1226.
  misc_feature (1)...(1448): n = a,t,c or g
aacacttttggtgtcacaaacaggattcaaaaacaaaagtgtgccactttttagcaacaagggcagggcgggaggctcgaggacttcccatatccccggatggaaactcccccagttctctcccttggcaattgaatggtcaaggggaaccggactttgcacgcagctggagcgacgaggacggctttccgcttttggcgcggcctttgtctctagctgcagccggcgtttcaggtctcgtcttcactggtctgtgtcctattctcctggaggcccagcctctgtggccctgtgacctgcagttcttcagacaatcagtaaaaacaaacttctccaagctaaaggaggatgttcgaatccatcataaagaagctggaaaccttgaaaaaagattagatgaatggctaactataatagacagtgtagagaagaccttaaatgacctgatagagctgaaaaccatggcccaaaaactacgtgatgaatgcagaagcttgagtatccaatgtgatcaacaggaagaaaaagtatcagtgattgttaaaatgaatgaaatgaagcaagaagagaagtttagagataaaataataaaaagaaatgaacaaagcctccaagaaatatgggactatgtgaaaagaccaaatctacgtctgattggtgtacctgaaagtgatggggagaatagaaccaagttggaaaacactctgcaggatattatccaggagaacttccccaacctagcaaggcaggccgacattcaaattcaggaaatacagagaacgccacaaagatactcttcgagaagagcaactccaagacacataattgtcagattcaccaaagttgaaatgaaggaaaaaatgttaagggcagccagagagaaaggtcgggttacccacaaagggaagcccatcagactaacagtggatctctcggcagaaactctacaagctagaagagagtgggggccaatattcaacattcttaaagaaaagaattttcaacccagaatttcatatccagccaacctaagcttcatcagtgaaggagaaataaaatcctttacggacaaacaaatcctgagagattttgtcaccaccaggcctgccttacaagagctcctgaaggaagcactaaacatggagaggaacaactggtaccagtcactgcaaaaacatgccaaatcngtaaacaccatcaatgttaggaagaaactgcatcaactaacaagtaaaataactagctaacataatgacaggaccaaattcacacataacaatattaaccttaaatgtaaatgggctaaatgctccaattaaaagacacagactggcaaattggataaaggggcccagacccttggcaggtgnagtggctcacacctgtaatccccaccacttttgtgaggctggaagtggngcagatcacgaggttcaggagatcgagac

SEQ ID NO: 12164 - DNA, 909 bp, Homo sapiens
  SIMILAR (1)..(213): 1001254mologous to Homo sapiens immunoglobulin lambda-chain subgroup II,accession number L27689,Smith-Waterman Score=374.
atggtggacactgggttgcttccacctcttggctgttgtgaagaatgctgctatcaaatagaggtgttgcttttcttttattcccttgttcttgaccctcctctggatggagattctgacagtacctcagatgatgaggcagattcagatgaggaagatgaggacgagtgtaaagaactaaattcagattctgaatgtgaggaacaggaaacgcaggaaattaaagaaagggaaaatgaaaaaattgcaacattaaaacctggagcaattggtagcactaagacccagtggaatctgaggcttgtttattcagagagcacctcaataaaccaaggcatatctggcacagccagtgcccttacaaatggcagcaattgtctgccgccttgtgacagggcgaatggaaccaagttggaaaacactgttcaggatattatccaggagaacttccccaacctagcaaggcaggccaacattcaaattcaggaaatacagagaatgccacaaagatactcctcaagaagagcaactccaaaacacataattgtcagattcaccaaagttgaaatgaaggaaaaaatgttaagggcagccagagagaaaggtcggcatacccacaaagggaagtccatcaaactaatagcggatctcttggcagaaactctacaagccagaagagagagggggccaatattcaacattcttaaagaaaagaattttcaacccagaatttcatatccagccaaattaagcttcatacatgaaggagaaataaagtcctttacagacaaacaaatgctgagagattttgtcaccaccaggcctgccttacaagagctcctgaaggaagcactaaacatggaaaggaacaactggtaccagccactgcaaaaacatgcaaaattgtaa

SEQ ID NO: 12165 - DNA, 2167 bp, Homo sapiens
  SIMILAR (193)..(525): 721254mologous to Homo sapiens AD025,accession number AF225420,Smith-Waterman Score=341.
atggatgaagctggaaaccacattctcagcaaactaacacagaacagaaaaccaaacaccacatgttctcactcggatggccctatatttgtcactgagagcagaagggttgagaacttagatcctgacaggaggcccacctttattggagaaatggctctgcaacttaggccacagaacttcttaccacttggaagcaaaatagttgctttaatggtaaccaaatgccctccttcaagacagtatttcaagaaggaggagtatacgtatattatacaaacatatccaatccctttagaagataattatcaatatcatgcagggaagctggaacacacacacaaaatcgagtactatctagaagatcaagccacaaatctcaagagaagcaagacttttgttggaaaacaaaacaaaatcttgagacatgaaggatctgtaatggacacctgtcgattgtgtctgttcagcagctcctctcccacctgtcttccagtacaacaccttatttcattggagagaaaggttctacctcttctccttaaggttttagtggacagccaaaccagtcttcagtctacagggggcagactgacacctcacacggccgggtacccctctgagacgaaacttccagaggaacgatcagacagcaacatttgctgttcagcaatattcgctgttctgcagcctctgctgctgatacccaggcaaacagagtctggagtagacctccagcaaactccaacagacctgcagctgagggtcctgactgttagaaggaaaacaaacagaaaggacatccacaccaaaaccccatctgtacgtcaccatcatcaaagaccaaaggtagataaaaccacaaagatggggaaaaaacagagcagaaaaactgaaaattctaaaaatcagagcgcctctcctcctccaaaggaacgcagctcctcaccagcaatggaacaaagctggacggagaatgactttgacgagttgagagaagaaggcttcagacgatcaaacttctctgagctaaaggaggaagttcgaacccattgcaaagaagctgaaaaccttgataaaaaattagacgaatggctaactagaataaccaatgtagagaaggccttaaatgacctgatggagctaaaaaccatggcacgagaactatgtgacgaatgcacaagcttcagtagccaattcgatcagctggaagaaacggtatcagtgattgaagatcaaatgaatgaaattaagcgagaagagaagtttagagaaaaaagaatgaaaacaaatgaacaacgcctccaagaaatatgggactatgtgaaaagaccaaatctacgtctgattggtgtacctgaaagtgacagggagaatggaaccaagttggaaaacactctgcaggatattatccaggagaacttccccaacctagcaaggcaggccaacattcaaatacaggaaatacagagaatgccacaaagatactcctcgagaagagcaactccaagacacataactgtcacattcactaaagttgaaatgaaggaaaacatgtcaagggcacccagagagaaaggtcaggttacccacaaagggaagcccatcagactaacagctgatctctcagcagaaactctaaaagccagaagagagtgggggccaatattcagtattcttaaagaaaagaattttcaacccagaatttcatatccagccaaactaagcttcataagtgatggagaaataaaatcctttacagacaagcaaatgctgagagattttgtcaccaccaggcctgccctacaagagctcctgaaggaagcactaaacatggaaaggaacaaccggtaccagccactgcaaaaacatgccaaattgtaaagaccatcaatgcttggaagaaactgcatcaactaacgggcaaaataaccagctaacatagtgacgggatcaaattcacacataacaatattaacctttaatgtaaatgggctaaatgcctcaattaaaagacacaggcaaattggataaagagacaagacccatcagtgtgctgtattcaggagacccatctcacatgtagtgacacacatagactcaaaataaagggatggaagaagatctaccaagcaaatggaaagcaaaaaaaaaaaaaaagtcgacg

SEQ ID NO: 12166 - DNA, 1451 bp, Homo sapiens
  SIMILAR (2)..(364): 911254mologous to Homo sapiens p40,accession number U93569,Smith-Waterman Score=577.
atggctctgaagagagcagcagatctcccagcacagcgttcaagctctgctaaaggtcagactgcctcctcaaatgggtcactgacccccatgtctcctgactgggagacaccttccagtaggggccaacagacacctcatacaggagagctccagctggcctctggcaggtcaccaacatcaaacaccaaaggtaaggaaatccatgaagatggggagaaaccagtgcaaaaggcagaaaattccaaaaaccagaatgcctattctcctccaaaggatcacaactccttgccagcaagggaagaaaactggatggagaatgagtttgacaaattgacagaagtaggcttcagaagaaaactgaaactggaccctctccttacaccgtatacaaaaattaattcaagatggattaaagacttaaatgtaagacctaaaaccataaaaaccctagaagaaaaccgagacaataccattgaggacataggcgtgggcaaagacttcatgactaaaacaccaaaagcaatggcaacaagagccaaaattgacaaatgggatctaattaaactaaagagcttctgcacagcaaaagaaactatcatcagagtgaacagaataaccaatacagagaagtgcttaaaggagctgatggagctggaaaccaagcctggagaactacgtgaagaatgcagaagcctcaggagccgatgcgatcaactggaagaaagcgtatcagcaatggaagatgaaatgaatgaaatgaagcgagaagggaagtttagagaaaaaagaataaaaagaaatgagcaaagcctccaagaaatatgggactatgtgaaaagaccaaatctacgtctgactggtgtacctgaaagtgatggggagaatggaaccaagttggaaaacactctgcaggatattatccaggagaacttccccaatctagcaaggcaggccaacattcagattcaggaaatacagagaacgccacaaagatactcctcgagaagagcaactccaagacacataattgtcagattcaccaaagttgaaatgaaggaaaaaatgttaagggcagccagagagaaaggtcaggttaccctcaaagggaagcccatcagactaacagccgatctctcggcagaaaccctacaagctagaagagagtgggggccaatattcaacattcttaaagaaaataattttcaacccagaatttcatatccagccaaactaaacttcataagtgaaggagaaataaaatactttacagacaagcaaatgctcagagattttgtcaccaccaggcctgccctaaaagagctcctgaaggaagtgctaaacatggaaaggaacaaccggtaccagccactgcaaaatcatgccaaaatgtaaagaccatcgaaactaggaagaaactgcatcaactaatgagaaaaataaccagctaa

SEQ ID NO: 12167 - DNA, 4935 bp, Homo sapiens
  SIMILAR (479)..(1177): 931254mologous to Homo sapiens p40,accession number U93567,Smith-Waterman Score=1110.
atgggtcctggggcgcggctggcggcgctgctggcggtgctggcgctcgggacaggagacccagaaagggctgcggctcggggcgacacgttctcggcgctgaccagcgtggcgcgcgccctggcgcccgagcgccggctgctggggctgctgaggcggtacctgcgcggggaggaggcgcggctgcgggacctgactaggtgcaatgatgaaacaataacatacctgttagataagaggttgactgttctcactgcagctaacatcccctactcgtctccggaaaacggtgcgaagagaaggcgccaagacgccttccctccaatacactacaatacccaggacgctttgctacaatacctctccggggttggctggggggcgcctccagctgcgcaagcgcatagggatgcgccctttgtggactccattgcgcaggtgctgttgcgcacttccggtggaagcgctgaagcgagtgggtggagtttacggagccggtgggcggtaggcggtgctacgggtagctgggtgctgtccaaaggcgacagggcgtcgttaggggagcgagtcgtgaccggttgggccacactcaacgtgggacgaagcttcgcctactgtttgactacgtgcgtgcagcctcccctcgatgtcggccctcgaaaagagcatgcacctcggccgccttccctctcgcccacctctacccggcagcgggggcagtcagagcggagccaagatgcgaatgggagaaggaaacagaagaccaagtcagagcctgagagatttgaagatgctgtgttgcttgccggctttaaagtggaggaagaacctgtccagagacctaggaggaaagaatggtttcagggcccaagcccagggcactgctgccctgctcagcctcaggactctgcaccttgtatcctggctactcatgctccagccagggctcaaaatgccccaggcacagcttgggccgctgctctagagggcacaagcactgtaagccttgaccacttccatgtggttggtgtagtggttgtatcaggaggtgagatcattctactcctttctttcagattctacgacaaggtactttctttgcatgaggattcaacaacccctgtggctaaccctctgcttgcatttactctcatcaaacgcctgcagtctgactggaggaatgtggtacatagtctggaggccagtgagaacatccgagctctgaaggatggctatgagaaggtggagcaagaccttccagcctttgaggaccttgagggagcagcaagggccctgatgcggctgcaggacgtgtacatgctcaatgtgaaaggcctggcccgaggtgtctttcagagagtcactggctctgccatcactgacctgtacagccccaaacggctcttttctctcacaggggatgactgcttccaagttggcaaggtggcctatgacatgggggattattaccatgccattccatggctggaggaggctgtcagtctcttccgaggatcttacggagagtggaagacagaggatgaggcaagtctagaagatgccttggatcacttggcctttgcttatttccgggaacagagctcctcaccagcaacggaacaaagctggatggagaatgactttgatgagttgagagaagaaggcttcagacgatcaaactactccgagctacaggaggaaattcgaaccaatggcaaagaagttaaaagctttgaaaaaaaattagacgaatggataactagaataaccaatgcagagaagtccttaaaggacctgatggagctgaaaaccaaggcacgagagctacgtgacgaatgcagaagcctcagtagccgatgcaatcaactggaagaaagggtatcagtgatggaagacgaaatgaatgaaacgaagcgaggagagaagtttagagaaaaaaagaataaaaagaaatgaacaaagcctccaagaaatatgtgactatgtgaaaagagcaaatctacgtctgattggtggacctgaaagtgacggggaaaatggaaccaagttggaaaacactctgcaggatattatccaggagaacttccccaatctagcaaggcaggccaacattcaaattcaggaaatacacagaacgccacaaagatactcctcgagaagagcaactccaagacacataattgtcagattcaccaaagttgaaatgaaggaaaaaatgttaagggcagccagagagaaaggtcgggttacccacaaagggaagcccattagactaacagctgatctctcagcagaaactctacaagccagaagagagtggggaccaatattcaacattcttaaagaaaagaattttcaacccagaatctcatatccagccaaactaagcttcataagtgaaggagaaataaaatcctttacagacaagcaaatgctgggaggttttgtcaccaccaggcctgccctacaagagctcctgaaggaagcactaaacatggaaaggaacaactggtaccagccactgcaaaaacatgccaaattaactagagaagcaagagcaaacacattcaaacctagcagaaggcgagaaataacaaagatcagagcagaactgaaggaaatagagacaccaaaaaccgctcaaaaaattaatgaatccaggagctggttttctgaaaggatcaacaaaattgatagaccgctagcaagactaagaaagaagaaaagagagaagaatcaaatagacacaataaaaaatgatgaaggggatatcaccacccatcccacagaaatacatactatcatcagagaatactataaacacctctatgcaaataaactagaaaatctagaagaaatggataaattcctcgacacctacaccctcccaagaccaaaccaggaagaagttgaatctctgaatggaccaatagcaggctctgaaattcaggcaataattaatagcttaccaaccaaaaaaagtccaggaccagatggattctaccagaggtacaaggaggagctggtaccattccgtctgaaactattccaatcaatagaaaaagagggaatcctccctaactcattttatgaggccagcatcatcctgataccaaagcctggcagagacacaacaaaaaaagagaattttagaccaatatccctgttgaacatcaatgcaaaaatcctcaataaaatactggcaaaccgaatccagcagcacatcaaaaagcttatgcaccatgatcaagtgggcttcatccctggaatgcaaggctggttcaatatacgcaaatcaataaatgtaatccagcatataaacagaaccaaagacaaaaaccacatgattatctcaatagatgcagaaaaggcctttgacaaaattcaacaacccttcatgctaaaaactctcaataaattaggtattgatgggacatatcacaaaataataagagctaactatgacaaacccacagccaatatcatactgaatgggcaaaaactggaagcattccctttgaaaactggcacaagacagggatgccctctctcaccactcctattcaacatagtgttggaagttctggccagggcaatcaggcaggagaaggaaacagagggtattcaattaggaaaagaggaagtcaaattgtccctgtttgcagatgacatgattgtatatctagaaaaccccattgtctcagcccaaaatctccttaagctgataagcaacttcagcaaagtctcaggatacaaaatcaatgtgcaaaaatcacaagtattcttatacaccgataacagacaaacagagagccaaatcatcagtgaactccccattcacaattgcttcaaagagaataaaatacctaggaatccaacttacaaggtacgtgaaggacctcttcaaggagaggtcaatgaaataaaagaggatacaaacaaatggaagaacattccatgctcatgggtaggaagaatcaatatcgtgaaaatggccatactgcccaaggtaatttatagattcaatgccatctccatccagctaccaatgactttcttcacagaattggaaaaaactactttaaagttcatatggaaccaaaaaagagcccacattgccaagtcaatcctgagcaaaaagaataaagctggaggcatcatgctacctgacttcaaactatactacaaggctacagtaaccaaaacagcatggcattggtaccaaaacagagatatagaccaaaggaacagaacagagccctcagaaataatgccgcatgtctacaaccatctgatctttggcaaacctgacaaaaacaagcaatggggaaatgattccctatttaataaatggtgctgggaaaactggctagccatatgtaaaaagctgaaactggatcccttccttacaccttatacaaaaattaattcaagatggattaaagatttaaatgttagacctaaaaccataaaaaccctagaagaaaacctaggcaataacattcaggacataggcatgggcaaggacttcacgtctaaaacaccaaaagcaatggcaacaaaagacaaaattgacaaatgggatctaatgaaactaaagagcttttgcacagcaaaagaaactaccatcatagtgaacaggcaacctacagaatgggagaaaatttttgcaatctactcatatgacaaagggctaatatccagaatctacaaagaattcaaacaaatttacaagaaaaaaacaaacaatcccatcaaaatgtgggcaaaggatatgaacagacacttctcaaaagaagacatttatgcagccaaaagacacatgaaaaaatgctcatcatcactggccatcagagaaatgcaaatcaaaaccacaatgagatatcatctcacgccagttagaatggcaatcattaaaaagtcaggaaacaacag

SEQ ID NO: 12168 - DNA, 1547 bp, Homo sapiens
  SIMILAR (406)..(1080): 861254mologous to Cloning vector pZC320 SopB,accession number U26464,Smith-Waterman Score=971.
ggaaacagctatgaccatgattacgaattcgagctcggtacccttctccttggcggtcttgccgatgtcggccttgctgtcggccagggccagcaggaagagttcgccggcaatgaactgggattttgccgatttcggaaccaccatcaaacaggattttcgcctgctggggcaaaccagcgtggaccgcttgctgcaactctctcagggccaggcggtgaagggcaatcagctgttgcccgtctcactggtgaaaagaaaaaccaccctggcgcccaatacgcaaaccgcctctccccgcgcgttggccgattcattaatgcagctggcacgacaggtttcccgactggaaagcgggcagtgagcgcaacgcaattaatggattttgccgatttcggaaccaccatcaaacaggattttcgcctgctggggcaaaccagcgtggaccgcttgctgcaactctctcagggccaggcggtgaagggcaatcagctgttgcccgtctcactggtgaaaagaaaaaccaccctggcgcccaatacgcaaaccgcctctccccgcgcgttggccgattcattaatgcagctggcacgacaggtttcccgactggaaagcgggcatgatgtggagaatggaaccaagttggaaaacactctgcaggatattatccaggagaacttccccaatctagcaaggcaggccaacgttcagattcaggaaatacagagaacgccacaaagatactcctcgagaagagcaactccaagacacataattgtcagattcaccaaagttgaaatgaaggaaaaaaatgttaagggcagccagagagaaaggtcgggttaccctcaaagggaagcccatcagactaacaagcagatctctcggcagaaactctacaagtcagaagagagggggaggccaatattcaacattcttaaagaaaagaattttcaacccagaatttcatatccagcccaaactaagcttcttcataagtgaaggagaaataaaatcctttacagacaagcaaatgctgagagatttttgtcaccaccaggcctgccttacaagagctcctgaaggaagcactaaacatgggaaagggaacaaccgggtaccagcccgctgcaaaatcatgccaaatttgtaaagaccattcgagactaggaagaaacttggcatcaacttaatggagcaaaattaccagctaacatcataatggacaggatccaaattcacacataacaatattaactttaaatgtaaatggggctaaatgcccccattttaggagacacagactgggcaaattggataaacagtcaagacccatcagtgtgctgtattcaggaaacccatctcatgtgcagagacacacataggctcaaaataaagggagagaggaagatctaccaaggaaatggaaaacaaaaaaaggcaggggttgcaatcctagtctctgataaaacagactttaaaccaacaaagatcaaaagagacaaggccattacataatggtaaagggatcaattcaacaagaagag

SEQ ID NO: 12169 - DNA, 4837 bp, Homo sapiens
  SIMILAR (1)..(570): 951254mologous to Cloning vector pZC320 SopB,accession number U26464,Smith-Waterman Score=907.
atgggggagcagaaaatgaacaaaaggatggagacagtgattggaatcaagcgaatccttggaggcttacacctagatagagcagagagagccagggacagcgagttcaggccaatagcaaatgaaaggaagccaactctccaggcccagacagcccgtgaggtcagcatccagcaacaacattcactaacgacagccctgccaactgtagctggcatcctaggcacatgcacattgaagggtcctagtaagtggaagaaggaggtagataagggagaaccagaaagacaccagcctaagatggacttggcagactttgctggttttgaagatggaggactggagccacaagccaaggaatatggtggcctctggaagcaaagaaaggcagggaatggattctcctcagaacctccagaaggaatgcagcctgctgataccttgattttagcccagagagacccatttcagactctgccctccagaactgttctcgtgtctctccctgaccaggccctcttacacactctgcagaattaccatcgacagtgtacattggatgagattgtgtcaccatcatgcttagaaccactcctatcactgacagaaggaaaactaacaaacagaaaggacatccacaccaaaaatccatctgtacatcaccatcatcaaagatcaaaagtagataaaaccacaaagatggggaaaaaaacagaacagaaaaactggaaactctaaaaagcagagcgcctctcctcctccaaaggaacgcagctcctcaccagcaacggaacaaagctggacggagaacgactttgacgagctgagagaagaaggcttcagaaggtcggtaataacaaacttctcagagctaaaggagcatgttgtaacccatcgcaaggaagctaaaaatcttgaaaaaaaaactagacgaatggataactagaataaccaatgcagagaagtccttaaaggacctgatggagctgaaaaccacggcacaagaactacgcaacgaatgcacaaacctcagtaaccgatgcgatcaactggaagaaacggtatcagcgatggaagatcaaattaataaatgaatgaaatgaagcaagaagggaagtttagagaaaaaagaataaaaagaaatgagcaaagcttccaaagaaataggggactatgtgaaaagaccaaatctacatcctgattggtgtacctgaaagtgacggacagaatggaaccaagttggaaaacactctgcaggatattatccaggagaacttccccaatctagcaaggcaggccaacattcagattcaggaaataccagagaacgccacaaagatactccttgagaagagcaactccaagacacataattgtcagattcaccaaagttgaaatgaaggaaaaaaatgttaagtgcagccagagagaaaggtcggggttacccacaaagggaagcccatcagactaacaacagctgatctctcagcagaaactctacaagcccagaagacagagtggggggccgatattcaacattctctaaagaaaagaattttccaacccagaatttccatatccagccaaacctaagcttcataagtgaaggagaaataaaatactttacagacaagcaaatgctgagagatttttgtcaccaccagggcctgcccttaaaagagctcctgaaggaagaagcacttaaacattggaaagggacaacccggtaccagccacttgcaaaaacattgccaaaatacagatcaacgagacagaaagtcaacaaggatacccaggaattgaactcagctctgcaccaagcggacctaatagacatctacagaactctccacaccaaatcaacagaatatactttttttcagcaccacaccacacctattccaaaattgaccacatagttggaagtaaagctctcctcagcaaatgtaaaagaacagaaattataacaaactatctctcagaccacagtgcaatcaaactagaactcaggattaagaatctcaatcaaagccgctcaactacatggaaactgaacaacctgctcctgaatgactactgggtacataacgaaatgaaggcagaaataaagatgttctttgaaaccaacgagaacaaagacacaacataccagaatctctgggacgcattcaaagcagtgtgtagagggaaatttatagcactaaatgcccacaagagaaagcaggaaagatccaaaattgacaccctaacatcacaattaaaagaactagaaaagcaagagcaaacacattcaaaagctagcagaaggcaagaaataactaaaatcagagcagaactgaaggaaatagagacacaaaaaacccttcaaaaaatcaatgaatccaggagctggttttttgaaaggatcaacaaaattgatagaccgctagcaagactaataaagaaaaaaagagaggagaatcaaatagacacaataaaaaatgataaaggggatatcaccaccgatcccacagaaatacaaactaccatcagagaatactacaaacacctctatgcaaataaactagaaaatctagaagaaatggataaattccttgacacatacactctcccaagactaaaccaggaagaagttgaatctctgaatagaccaataacaggagctgaaattgtggcaataatcaatagtttaccaaccaaaaagagtccaggaccagatggattcacagctgaattctaccagaggtacaaggaggaactggtaccattccttctgaaactattccaatcaatagaaaaagagggaatcctccctaactcattttatgaggccagcatcattctgataccaaagccgggcagagacacaaccaaaaaagagaattttagaccaatatccttgatgaacattgatgcaaaaatcctcaataaaatactggcaaaccgaatccagcagcacatcaaaaagcttatccaccatgatcaagtgggcttcatccctgggatgcaaggctggttcaatatacgcaaatcaataaatgtaatccagcatataaacagagccaaagacaaaaaccacatgattatctcaatagatgcagaaaaagcctttgacaaaattcaacaacccttcatgctaaaaactctcaataaattaggtattgatgggacgtatttcaaaataataagagctatctatgacaaacccacagccaatatcatactgaatgggaaaaaactggaagcattccctttgaaaactggcacaagacagggatgccctctctcactgctcctattcaacatagtgttggaagttctggccagggcaatcaggcaggagaaggaaataaagggtattcagttaggaaaagaggaagtcaaattgtccctgtttgcagacgacatgattgtttatctagaaaaccccatcgtctcagcccaaaatctccttaagctgataagcaacttcagcaaagtctcaggatacaaaatcaatgtacaaaaatcacaagcattcttatacaccaacaacagacaaacagagagccaaatcatgagtgaactcccattcacaattgcttcaaagagaataaaatacctaggaatccaacttacaagggatgtgaaggacctcttcaaggagaactacaaaccactgctcaaggaaataaaagaggatacaaacaaatggaagaacattccatgctcatgggtaggaagaatcaatatcgtgaaaatggccatactgcccaaggtaatttacagattcaatgccatccccatcaagctaccaatgactttcttcacagaattggaaaaaactactttaaagttcatatggaaccaaaaaagagcccgcatcgccaagtcaatcctaagccaaaagaacaaagctggaggcatcacactacctgacttcaaactatactacaaggctacagtaaccaaaacagcatggtactggtaccaaaacagagatatagatcaatggaacagaatagagccctcagaaataacgccgcatacctacaactatctgatctttgacaaacctgagaaaaacaagcaatggggaaaggattccctatttaataaatggtgctgggaaaactggctagccatatgtagaaaactgaaactggatcccttccttacaccttatacaaaaatcaattcaagatggattaaagatttaaacgttagacctaaaaccataaaaaccctagaagaaaacctaggcattaccattcaggacataggcgtgggcaaggacttcatgtccaaaacaccaaaagcaatggcaacaaaagccaaaattggcaaatggtacctaattaaactaaagagcttctgcacagcaaaagaaactaccatcagagtgaacaggcaacctacaacatgggagaaaattttcgcaacgtactcatctgacaaagggctaatatccagaatctacaatgaactcaaacaaatttacaagaaaaaaacaaacaaccccatcaaaaagtgggcgaaggacatgaacagacacttctcaaaagaagacatttatgcagccaaaaaatacgtgaaaaaatgctcatcatcactggccatcagagaaatgcaaatcaaaaccactatgagataccatctcacaccagttagaatggcaatcattaaaaagtcaggaaacaacagtgatctctaccttatgtctgcaggaaccagttgtttaatgggcagacactgggacagtggacaagaaacgtgtgtccaaaatgtcgtgctggacacgtgcagcccctctgaacaactcttaagagctattgctgatcttgtcccgcaaccctga

SEQ ID NO: 12170 - DNA, 636 bp, Homo sapiens
  SIMILAR (3019)..(3558): 831254mologous to Escherichia coli formate dehydrogenase,accession number M13563,Smith-Waterman Score=736.
atgccggtcccaggcacacggcgggcgccgctccacctcctcgcgaccagcctgcaggagcagcagtatgcccgctggatggctggctgccgcctggcctccaaaggccgcaccatggccgacagcagctacaccagcgaggtgcaggccatcctggccttcctcagcctgcagcgcacgggcagtgggggcccgggcaaccacccccacggccctgatgcctctgccgagggcctcaacccctacggcctcgttgccccccgtttccagcgaaagttcaaggccaagcagctcaccccacggatcctggaagcccaccagaatgtggcccagttgtcgctggcagaggcccagctgcgcttcatccaggcctggcagtccctgcccgacttcggcatctcctatgtcatggtcagcaacatgcgccagtggaatgtcaactgggacatccggcaggtggccatcgagtttgatgaacacatcaatgtggccttcagctgcgtgtctgccagctgccgaattgtacacgagtatatcgggggctacattttcctgtcgacgcgggagcgggcccgtggggaggagctggatgaagacctcttcctgcagctcaccgggggccatgaggccttctga

SEQ ID NO: 12171 - DNA, 419 bp, Homo sapiens
  SIMILAR (3)..(107): 1001254mologous to Homo sapiens ribosomal protein L10,accession number AB007170,Smith-Waterman Score=192.
  misc_feature (1)...(419): n = a,t,c or g
atgaatttgaagacatggtggctgaaaagcggctcatcccagatggctgtggggtcaagtacatccccagtcgtggccctctggacaagtggcgggccctgcactcatgagggcttccaatgtgctgcccccctcttaatactcaccaataaattctacttcctgtccannnnnnnnnnnnnnnnnnnnnnnnnnnnnnnnnnnnnngaaaaaaagnnnnnnnnnnnnnnnnnnaaagggggggagagggggggaggggaannnnnnnnnnnnnaaggaaaaannaaangnnnnnnnnnnnnanaaaaggggggaagggggagaggagaggggnnnnnnggannggggangggggnnnnnnnnnnnnnnnnnnnnngnnnanannnngnnaaaggangnaaaggagaggggaagaagaa

SEQ ID NO: 12172 - DNA, 724 bp, Homo sapiens
  SIMILAR (2)..(574): 981254mologous to Homo sapiens Q1Z 7F5,accession number M81806,Smith-Waterman Score=1000.
  misc_feature (1)...(724): n = a,t,c or g
ccgaggtgtccctgatgccaagattcgcatttttgacctggggcggaaaaaggcaaaagtggatgagtttccgctttgtggccacatggtgtcagatgaatatgagcagctgtcctctgaagccctggaggctgcccgaatttgtgccaataagtacatggtaaaaagttgtggcaaagatggcttccatatccgggtgcggctccaccccttccacgtcatccgcatcaacaagatgttgtcctgtgctggggctgacaggctccaaacaggcatgcgaggtgcctttggaaagccccagggcactgtggccagggttcacattggccaagttatcatgtccatccgcaccaagctgcagaacaaggagcatgtgattgaggccgtgcgcagggccaagttcaagtttcctggccgccagaagatccacatctcaaagaagtggggcttcaccaagttcaatgctgatgaatttgaagacatggtggctgaaaagcggctcatcccagatggctgtggggtcaagtacatccccagtcgtggccctctggacaagtggtgggccctgcactcatgagggcttccaatgtgctgcccccctcttaatactcaccaataaattctacttcctgtcccgacagaagatgatagttttcgcgatatcactttgttacctctttttattnnnnnnnnnncccctctaataaagcccccttctcacccc

SEQ ID NO: 12173 - DNA, 240 bp, Homo sapiens
  SIMILAR (1)..(237): 961254mologous to Mus musculus 24.6 kda protein,accession number M93980,Smith-Waterman Score=408.
atgtccatccgcaccaagctgcagaacaaggagcatgcgattgaggccttgcgcagggccaagttcaagtttcctggccgccagaagatctacatctcaaagaagtggggcttcaccaagttcaatgctgatgaatttgaagacatggtggctgagaagcggctcatcccagatggctgtggggtcaagtacatccccaatcgtggccctctggacaagtggctggccctgcactcatga

SEQ ID NO: 12174 - DNA, 1068 bp, Homo sapiens
  SIMILAR (1)..(1065): 1001254mologous to Homo sapiens dJ657E11.3 (aldo-keto reductase family 7, member A3 (aflatoxin aldehyde reductase)),accession number AL035413,Smith-Waterman Score=1913.
atgtcccggcagctgtcgcgggcccggccagccacggtgctgggcgccatggagatggggcgccgcatggacgcgcccaccagcgccgcagtcacgcgcgccttcctggagcgcggccacaccgagatagacacggccttcgtgtacagcgagggccagtccgagaccatccttggcggcctggggctccggctgggcggcagcgactgcagagtgaaaattgataccaaggccattccactgtttgggaactccctgaagcctgacagtctccggttccagctggagacgtcactgaagcggctgcagtgtccccgagtggacctcttctacctgcatatgccagaccacagcaccccggtggaagagacactgcgtgcctgccaccagctgcaccaggagggcaagttcgtggagcttggcctctccaactatgcagcctgggaagtggccgagatctgtaccctctgcaagagcaacggctggatcctgcccactgtgtaccagggcatgtacaatgccatcacccggcaggtggaaacggagctcttcccctgcctcaggcactttggactgaggttctatgccttcaaccctctggctgaccagagccctgagggatgtggcagcttctggggcactctaggccccggggctgattgctgctttccctcagggggcctgctgaccggcaagtacaagtatgaggacaagaatgggaaacagcccgtgggccgcttctttgggaatacctgggcagagatgtacaggaatcgctactggaaggagcaccactttgagggcattgccctggtggagaaggccctgcaggccgcgtatggcgccagcgcccccagcatgacctcggccaccctccggtggatgtaccaccactcacagctgcagggtgcccacggggacgcggtcatcctgggcatgtccagcctggagcagctggagcagaacttggcagcggcagaggaagggcccctggagccggctgtcgtggacgcctttaatcaagcctggcatttggttactcacgaatgtcccaactacttccgctag

SEQ ID NO: 12175 - DNA, 712 bp, Homo sapiens
  SIMILAR (634)..(503): 971254mologous to Homo sapiens dJ794I6.2 (novel protein),accession number AL109976,Smith-Waterman Score=233.
ccgtgtcgacccacgcgtccggcacagggccctttgctgtcacccggatggtccctcccgccccactgctcttcaccagccacagcgcctcagtggccccaagccctcgctcctccggacccttgcacatgctgttcccagaacgctttccctgcaggtccctggagaaatggccatgcgaaggcctcctggatcttccatgtttcactgttgggccagcacccactgtgcgacgttggaggtgacagaccacaggtggcactccacaaactctgtcccttgcattccacttccccagggagggcttcccctccccagagtgggggtgaagtggcagtagcagggacacaggtggcacataggagcctagaaacaggagctttattctctaatgtgcgtccagcaagttccttacaccaatcaaggaaatggtttctctttcaggcatcgactcttttatcaaaagaaaatccatcctgctcagtcccacccaccctgggcagaagctggcgttgagggcagtgtggaggctggcgttgaggctggcgccgaggcctgacaggctgacaagggatgaagtcctttttgtgtgatagtcgtccaagtaatgcccatagtagtacttccagaagactgtggacacacacccacaggcctcagccctctccagcgtgtggcagggggaggccctggagggaggggatctcaggga

SEQ ID NO: 12176 - DNA, 1700 bp, Homo sapiens
  SIMILAR (109)..(1317): 981254mologous to Homo sapiens dJ794I6.2 (novel protein),accession number AL109976,Smith-Waterman Score=2027.
atgaagaaggcccaggtgatttcagcttgtagcccgcccctccttcctgtggaggccccagacattgtggaacagataaaaggtgttcactgtgaccgtcagaacctgtcgacggaggagatcatcgccctcttcatttccatcacgtttgtgctggatgccgtcaagggcacggttaaaatcttctggaagtactactatgggcattacttggacgactatcacacaaaaaggacttcatcccttgtcagcctgtcaggcctcggcgccagcctcaacgccagcctccacactgccctcaacgccagcttcctcgccagccccacggagctgccctcggccacacactcaggccaggcgaccgccgtgctcagcctcctcatcatgctgggcacgctctggctgggctacaccctctaccaattcaagaagagcccctacctgcacccctgcgtgcgagagatcctgtccgactgcgccctgcccatcgcggtgctcgccttctccctcatcagctcccatggcttccgggaaatcgagatgagcaagttccgctacaaccccagcgagagcccctttgcgatggcgcagatccagtcgctgtccctgagggccgtcagcggtgccatgggcctcggcttcctgctgtccatgctcttcttcatcgagcagaacttggtggccgccttggtgaatgcaccggagaacaggctggtgaagggcactgcctaccactgggacctcctgctcctcgccatcatcaacacagggctgtctctgtttgggctgccttggatccatgccgcctacccccactccccgctgcacgtgcgagccctggccttagtggaggagcgtgtggagaacggacacatctatgacacgattgtgaacgtgaaggagacgcggctgacctcgctgggcgccagcgtcctggtgggcctgtccctgttgctgctgccggtcccgcttcagtggatccccaagcccgtgctctatggcctcttcctctacatcgcgctcacctccctcgatggcaaccagctcgtccagcgcgtggccctgctgctcaaggagcagactgcgtaccccccgacacactacatccggagggtgccccagaggaagatccactacttcacgggcctgcaggtgcttcagctgctgctgctgtgtgccttcggcatgagctccctgccctacatgaagatgatctttcccctcatcatgatcgccatgatccccatccgctatatcctgctgccccgaatcattgaagccaagtacttggatgtcatggacgctgagcacaggccttgactggcagaccctgcccacgccccattcgccagccctccacgtcctcccaggctggctctggagctgtgaggggaggtgtaggtgtgtgggtgactgctctgtgctgcgccttctcatggctgactcaggcctggggcatctgggcattgtaggggtgcagtggtatgtgcccacccctctcccattatcctttagctttaggccaagagcgttgctcagggcagcttctgcccagggtgggtgggactgagcaggatggattttcttttgataaaagagtcgatgcctgaaagagaaaccatttccttgattgtgtaaggaacttgctggacgcacattagagaataaagctcctgtttttaggcaaaaaaaaaaaaaaa

SEQ ID NO: 12177 - DNA, 747 bp, Homo sapiens
  SIMILAR (478)..(744): 881254mologous to Homo sapiens Sequence encoded by the breakpoint cluster region (bcr) ofchromosome 22 on pVI-3,accession number P60303,Smith-Waterman Score=384.
atgcagaaggctctgtgtgcagccccagacctgggtaccttcgtcaccgtcctcaccccacctccgggtgcgcagatagggagcaggagagagaggtccaaggtgccctacatcgtgcgccagtgcgtggaggagatcgagcgccgaggcatggaggaggtgggcatctaccacgtgtccggccggtgtggccgcagacatccaggcactgaaggcagccttcgatgtcaacacagaaccatgcacagctcttgggaggagtcagatgagctgctcaaagcccgggacgacccacacagtggtcagcatagcagggacggtgctttagccaaggcagggatggcagataagaaggacatgtcggtgatgatgagcgagacggacatgaacgccatcgcaggcacgctgaagctgtacttccgtgagctgcctgagcccctcttcactgacgagttctaccccagcttcgcagagggcatcgaccgcctggaaagggtggcagagaaggaagcagtcaataagatgtccctgcacaacctcgccactgtctttggccccacgctgctccggccctccgagaaggagagcaagctccctgccaaccccagccagcccatcaccatgactgacagcaggtccttggaggtcatgtctcaggtcgaggtgctgctgtacttcttgcggctggaggccatccctgccctggacagcaagagacagagcatcctgttctccaccgatgtctaa

SEQ ID NO: 12178 - DNA, 510 bp, Homo sapiens
  SIMILAR (67)..(231): 751254mologous to Homo sapiens Sequence encoded by the breakpoint cluster region (bcr) ofchromosome 22 on pVI-3,accession number P60303,Smith-Waterman Score=196.
atgcagaaggctctgtgtgcagccccagacctgggtaccttcatcaccgtcctcaccccacctccgggtgtgcacatagggagcaggagagagaggtccaaggtgccctacatcgtgcgccagtgcgtggaggagatcgagcgccgaggcatggaggaggtgcgccccccccgcatgtctggggtggccgcagacatccaggcactgaaggcagccttcaacgtcagagatggactgggacctttagacatcggtggagaacaggatgctctgtcccttgctgtccagggcagggatggcctccagccgcaagaagtacagcagcacctcgacctgccctcgcggagtggggaagaggagagtggctcagaggggggctcacagctgctgctgcaatctgagctcagccacctacacaccaccgtggccgacactttcattaagaagtttcttgagacgacttgcgtgcatgttgacttcatgatcagccccgctgggaagaacccctga

SEQ ID NO: 12179 - DNA, 4725 bp, Homo sapiens
  SIMILAR (1171)..(4890): 151254mologous to Streptococcus cristatus srpA,accession number U96166,Smith-Waterman Score=172.
ggggggagggtggcggctcgatgggggagccgccccagggggcccccccgccctgtgcccacggcgcggcccctttaaggaggcccgcctggctccgctccatcgcgcatcgcggccgcctccccccggccctcccttcctgcggcgcagagtgcgggccgggcgggagtgcggcgagccggctggcttagcgtccgaggaggcggcggcggcggcggcggcagcggcggcggcggggctggtggggcggtgcggaagcgagaggcgaggagcgcgcgggccgtggccagagtctggcggcggcctggcggagcggagagcagcgcccgcgcctcgccgtgcggaggagccccgcacacaatagcggcgcgcgcagcccgcgcccttccccccggcgcgccccgccccgcgcgccgagcgccccgctccgcctcacctgccaccagggagtgggcgggcattgttcgccgccgccgccgccgcgcggggccatgggggccgcccggcgcccggggccgggcctggcgaggccgccgcgccgccgctgagacgggccccgcgcgcagcccggcggcgcaggtaaggccggccgcgccatggtggacccggtgggcttcgcggaggcgtggaaggcgcagttcccggactcagagcccccgcgcatggagctgcgctcagtgggcgacatcgagcaggagctggagcgctgcaaggcctccattcggcgcctggagcaggaggtgaaccaggagcgcttccgcatgatctacctgcagacgttgctggccaaggaaaagaagagctatgaccggcagcgatggggcttccggcgcgcggcgcaggcccccgacggcgcctccgagccccgagcgtccgcgtcgcgcccgcagccagcgcccgccgacggagccgacccgccgcccgccgaggagcccgaggcccggcccgacggcgagggttctccgggtaaggccaggcccgggaccgcccgcaggcccggggcagccgcgtcgggggaacgggacgaccggggaccccccgccagcgtggcggcgctcaggtccaacttcgagcggatccggaagggccatggccagcccggggcggacgccgagaagcccttctacgtgaacgtcgagtttcaccacgagcgcggcctggtgaaggtcaacgacaaagaggtgtcggaccgcatcagctcccttggcagccaggccatgcagatggagcgcaaaaagtcccagcacggcgcgggctcgagcgtgggggatgcatccaggcccccttaccggggacgctcctcggagagcagctgcggcgtcgacggcgactacgaggacgccgagttgaacccccgcttcctgaaggacaacctgatcgacgccaatggcggtagcaggcccccttggccgcccctggagtaccagccctaccagagcatctacgtcgggggcatcatggaaggggagggcaagggcccgctcctgcgcagccagagcacctctgagcaggagaagcgccttacctggccccgcaggtcctactccccccggagttttgaggattgcggaggcggctataccccggactgcagctccaatgagaacctcacctccagcgaggaggacttctcctctggccagtccagccgcgtgtccccaagccccaccacctaccgcatgttccgggacaaaagccgctctccctcgcagaactcgcaacagtccttcgacagcagcagtccccccacgccgcagtgccataagcggcaccggcactgcccggttgtcgtgtccgaggccaccatcgtgggcgtccgcaagaccgggcagatctggcccaacgatgacgagggcgccttccatggagacgcagatggctcgttcggaacaccacctggatacggctgcgctgcagaccgggcagaggagcagcgccggcaccaagatgggctgccctacattgatgactcgccctcctcatcgccccacctcagcagcaagggcaggggcagccgggatgcgctggtctcgggagccctgaagtccactaaagcgagtgagctggacttggaaaagggcttggagatgagaaaatgggtcctgtcgggaatcctggctagcgaggagacttacctgagccacctggaggcactgctgctgcccatgaagcctttgaaagccgctgccaccacctctcagccggtgctgacgagtcagcagatcgagaccatcttcttcaaagtgcctgagctctacgagatccacaaggagtcctatgatgggctcttcccccgcgtgcagcagtggagccaccagcagcgggtgggcgacctcttccagaagctggccagccagctgggtgtgtaccgggccttcgtggacaactacggagttgccatggaaatggctgagaagtgctgtcaggccaatgctcagtttgcagaaatctccgagaacctgagagccagaagcaacaaagatgccaaggatccaacgaccaagaactctctggaaactctgctctacaagcctgtggaccgtgtgacgaggagcacgctggtcctccatgacttgctgaagcacactcctgccagccaccctgaccaccccttgctgcaggacgccctccgcatctcacagaacttcctgtccagcatcaatgaggagatcacaccccgacggcagtccatgacggtgaagaagggagagcaccggcagctgctgaaggacagcttcatggtggagctggtggagggggcccgcaagctgcggcacgtcttcctgttcaccgacctgcttctctgcaccaagctcaagaagcagagcggaggcaaaacgcagcagtatgactgcaaatggtacattccgctcacggatctcagcttccagatggtggatgaactggaggcagtgcccaacatccccctggtgcccgatgaggagctggacgctttgaagatcaagatctcccagatcaagagtgacatccagagagagaagagggcgaacaagggcagcaaggctacggagaggctgaagaagaagctgtcggagcaggagtcactgctgctgcttatgtctcccagcatggccttcagggtgcacagccgcaacggcaagagttacacgttcctgatctcctctgactatgagcgtgcagagtggagggagaacatccgggagcagcagaagaagtgtttcagaagcttctccctgacatccgtggagctgcagatgctgaccaactcgtgtgtgaaactccagactgtccacagcattccgctgaccatcaataaggaagatgatgagtctccggggctctatgggtttctgaatgtcatcgtccactcagccactggatttaagcagagttcaaatctgtactgcaccctggaggtggattcctttgggtattttgtgaataaagcaaagacgcgcgtctacagggacacagctgagccaaactggaacgagctggacccgcaggccctgcaggacagagactggcagcgcaccgtcatcgccatgaatgggatcgaagtaaagctctcggtcaagttcaacagcagggagttcagcttgaagaggatgccgtcccgaaaacagacaggggtcttcggagtcaagattgctgtggtcaccaagagagagaggtccaaggtgccctacatcgtgcgccagtgcgtggaggagatcgagcgccgaggcatggaggaggtgggcatctaccgcgtgtccggtgtggccacggacatccaggcactgaaggcagccttcgacgtcaataacaaggatgtgtcggtgatgatgagcgagatggacgtgaacgccatcgcaggcacgctgaagctgtacttccgtgagctgcccgagcccctcttcactgacgagttctaccccaacttcgcagagggcatcgctctttcagacccggttgcaaaggagagctgcatgctcaacctgctgctgtccctgccggaggccaacctgctcaccttccttttccttctggaccacctgaaaagggtggcagagaaggaggcagtcaataagatgtccctgcacaacctcgccacggtctttggccccacgctgctccggccctccgagaaggagagcaagctccctgccaaccccagccagcctatcaccatgactgacagctggtccttggaggtcatgtcccaggtccaggtgctgctgtacttcctgcagctggaggccatccctgccccggacagcaagagacagagcatcctgttctccaccgaagtctaaaggtcccagtccatctcctggaggcagacagatggcctggaaacctctggctaatcgggccatccgtagagcgggaaccttcctgaggtgtccttgggccacccccaagtgttgggccatctgccaagagacagcgacccaaagccgaaggacaggtggcctggaaagatcccgcccaggtctgggagccccaggctggcctcagactgtggttttttatgtggccacctgagggcgccccaagccagtttcatcttcagaggccaggcctgaccctgggagacagggtgaagggagtggtttttatgaacttaacttagagtctaaaagatttctactggtttcaattgtcaagatgcggcctctctggggagaagggaacgtgacttggatttcctcaatgttgtatcttgaataaacgctgctgcttcatcctgaaaaaaaa

SEQ ID NO: 12180 - DNA, 3127 bp, Homo sapiens
  SIMILAR (1)..(450): 961254mologous to Homo sapiens Human secreted protein clone dd428_4 protein sequence SEQ ID NO:104,accession number Y94949,Smith-Waterman Score=747.
atgaggacaccatataagacatcaccaatgaggatgctgtatatgacatcgctaatgacacccacaaggcatgctaacgaggacgctgtagacgacattgcttataaggacaccgtacaagacatcactagcgaggacgctgtatacgacatcgctaatgaggacgttgtatatgacatcgctaatgaggatgctttacaagacatagcgaatgaggttgctgtatatgacatcgctaatgaggacattgtatatgacatcgctaatgaggacgctctatacgacatcactaatgaggacgctgtatacaacatcgctaatgaggacgctgtatatggcatcgctaatgaggatgctgtatacgaattcgctaataagcacgctgtatatgacattgctaatgaggacactgtacaagacatctgtaaaaaagaagatgctgccaataaatgttactttcctggcttctttccaatcagatgtagacatgaacatctgccagtgtgcattatcgatgtcatctgcagtttaatcaaatgtagacatgaacatctgccaagctcgctcattggacaggatagactgggcgcccaggcttcaaggagagagaggtccaaggtgccctacatcgtgcgccagtgcgtggaggagatcgagcgccgaggcatggaggaggtgggcatctaccgcatgtctggggtggccgcagacatccaggcactgaaggcagccttcaacgtcagtgagtgtcggcctgcgcaggacgggatggaggtgtgggcagtggtgtccgcgatgagatctcagagtgctccacggcccaggcatgtcacatccttctctgtgtcttttcttcatttatcaggatcttcaaggaggccgctgcatttccgtgctctttccagataacaaggacgtgtcagtgatgatgagcgagatggacgtgaacgccatcgcaggctcgctgaagctgtacttccgtgagctgcccgagcccctcttcactgacgagttctaccccaacttcgcagagggcatcggtgagcactggaggccttggcctcatgggagacgtctcctccatgtgcactgctgccctcagaggctgtgaaaagtgaggtgtgggaacccgagctgtgcttcctctgccatggtcggaattttaacccaacctcaaaaagcaggggaccaaaactgagcctatcctggaaggccttgcccatccccagagagctccccatccctattcctcaaggaggccaagtgggtgaaatggtcagcactgccgtgctgtggggtcctaaagtctgctgtcctccttcctgcagaccagggctaaacactggtgcccaggtgctcttgccatgggtcctggtccagccaagcatggtttcaaacatgacctgacccttagtcaacctggaggctgatgtctagagtgggtgctgatgcgtgcagtacctgtggcctgtgcatcacccttagggcaggtctgcctcccgggcccatgcacaagaggacctggtctcccagcctgcaggtgcccctgtggtgtccaggacaactagggggtctctgcgtacttggtggggctgggaccctcccacttcccacctccttgtgtccctcactcccctgtttcattccatgctgagcctcccctgccttgggctccctggggagggggtggtggcaggagttgcccaagggctgctctgcccatcagcagctgctctagcggctcctcctgctgctgttcgccgggtgctgctgaccccaaggctggagtcagcttgcagcacagccagggtcgaggtcactccctccctgaggactctagcacggcacagcccctctgcctctctcctggtggtggcgttgaaacagcaccctctgcttcggtcctcgacaggatggcagagaaggaggcagtcaataagatgtccctgcacaaccttggcacggtctttggccccacgctgctccggccctccgagaaggagagcaagctccctgccaaccccaagcaagcccatcaccatgactgacagctggtccttgaaggtcatgtcccaggtatgggaagacaggctccagcccatgcaaccccagcctgacagaggtggcctctgcctgccccacccccagtcctgcccatcttccgacttgcattgtatgtggtggtggctgagattcagagacagggacttgcctaggtttgcatggatgggagtgatagggggtgcccaggccacctcctggtcctgctggtgcaccttgctgggggcttaaaaccaccccaagtgttccggtgtggtggctcatgcctgtaatcccagcactttgggaggccgaggcaggacaactgaacccaggtgtttgagaccagtctgggcaatgtagcaaacctcatctccagaaaaaatacaaagaaaaattagtcaggcattgtggcacacatctgtaatcctaggtatctgggaggctgacacaggaggattgcttgagcccaggagttagaggctgcagtgatccatgatggagccactgtactccagcctgggggacagagcaaggccctgtgcatctctaaaataaataaccacccctcacccaacaagtcatgccttgtcaggaccccaccccacccccgtcccactgtaaggggttcatgacaccagcaggggtttctagcacctgaggtggacttgggagcttgggccccaaagacctccccaccagcagctgtgagccccgctctgagccactctcctcttccccactccgcgagggcaggtcgaggtgctgctgtacttcttgcggctggaggccatccctgccctggacagcaagggacagagcatcctgttctccaccgatgtctaaaggtcccagtccatctcctggaggcggacagacggcctggaaacctctggctaatcaggccatctaataagatgctggaatgtaatcctggacaatccgtgtcctggcagcatttggtcttcctctaagcgcctggctccgctgttctcaggagtgggttctgaagtctctatctgggcccggtaggctcccttgtcctggcttccatctctgtctcagcgaccattcagccccgcctccc

SEQ ID NO: 12181 - DNA, 4775 bp, Homo sapiens
  SIMILAR (11215)..(11607): 261254mologous to Caenorhabditis elegans coded for by C. elegans cDNA yk126f9.5; coded for by C. elegans cDNA yk159h6.3; coded for by C. elegans cDNA yk126f9.3; coded for by C. elegans cDNA yk159h6.5,accession number U67956,Smith-Waterman Score=111.
ggggagataggtaggagtagcgtggtaagggcgatgagtgtgggccgggcgggagtgcggcgagagccggctggctgagcttagcgtccgaggaggcggcggcggcggcggcggcagcggcggcggcggggctgtggggcggtgcggaagcgagaggcgaggagcgcgcgggccgtggccagagtctggcggcggcctggcggagcggagagcagcgcccgcgcctcgccgtgcggaggagccccgcacacaatagcggcgcgcgcagcccgcgcccttccccccggcgcgccccgccccgcgcgccgagcgccccgctccgcctcacctgccaccagggagtgggcgggcattgttcgccgccgccgccgccgcgcggggccatgggggccgcccggcgcccggggccgggcctggcgaggccgccgcgccgccgctgagacgggccccgcgcgcagcccggcggcgcaggtaaggccggccgcgccatggtggacccggtgggcttcgcggaggcgtggaaggcgcagttcccggactcagagcccccgcgcatggagctgcgctcagtgggcgacatcgagcaggagctggagcgctgcaaggcctccattcggcgcctggagcaggaggtgaaccaggagcgcttccgcatgatctacctgcagacgttgctggccaaggaaaagaagagctatgaccggcagcgatggggcttccggcgcgcggcgcaggcccccgacggcgcctccgagccccgagcgtccgcgtcgcgcccgcagccagcgcccgccgacggagccgacccgccgcccgccgaggagcccgaggcccggcccgacggcgagggttctccgggtaaggccaggcccgggaccgcccgcaggcccggggcagccgcgtcgggggaacgggacgaccggggaccccccgccagcgtggcggcgctcaggtccaacttcgagcggatccgcaagggccatggccagcccggggcggacgccgagaagcccttctacgtgaacgtcgagtttcaccacgagcgcggcctggtgaaggtcaacgacaaagaggtgtcggaccgcatcagctccctgggcagccaggccatgcagatggagcgcaaaaagtcccagcacggcgcgggctcgagcgtgggggatgcatccaggcccccttaccggggacgctcctcggagagcagctgcggcgtcgacggcgactacgaggacgccgagttgaacccccgcttcctgaaggacaacctgatcgacgccaatggcggtagcaggcccccttggccgcccctggagtaccagccctaccagagcatctacgtcgggggcatgatggaaggggagggcaagggcccgctcctgcgcagccagagcacctctgagcaggagaagcgccttacctggccccgcaggtcctactccccccggagttttgaggattgcggaggcggctataccccggactgcagctccaatgagaacctcacctccagcgaggaggacttctcctctggccagtccagccgcgtgtccccaagccccaccacctaccgcatgttccgggacaaaagccgctctccctcgcagaactcgcaacagtccttcgacagcagcagtccccccacgccgcagtgccataagcggcaccggcactgcccggttgtcgtgtccgaggccaccatcgtgggcgtccgcaagaccgggcagatctggcccaacgatggcgagggcgccttccatggagacgcagatggctcgttcggaacaccacctggatacggctgcgctgcagaccgggcagaggagcagcgccggcaccaagatgggctgccctacattgatgactcgccctcctcatcgccccacctcagcagcaagggcaggggcagccgggatgcgctggtctcgggagccctggagtccactaaagcgagtgagctggacttggaaaagggcttggagatgagaaaatgggtcctgtcgggaatcctggctagcgaggagacttacctgagccacctggaggcactgctgctgcccatgaagcctttgaaagccgctgccaccacctctcagccggtgctgacgagtcagcagatcgagaccatcttcttcaaagtgcctgagctctacgagatccacaaggagttctatgatgggctcttcccccgcgtgcagcagtggagccaccagcagcgggtgggcgacctcttccagaagctggccagccagctgggtgtgtaccgggccttcgtggacaactacggagttgccatggaaatggctgagaagtgctgtcaggccaatgctcagtttgcagaaatctccgagaacctgagagccagaagcaacaaagatgccaaggatccaacgaccaagaactctctggaaactctgctctacaagcctgtggaccgtgtgacgaggagcacgctggtcctccatgacttgctgaagcacactcctgccagccaccctgaccaccccttgctgcaggacgccctccgcatctcacagaacttcctgtccagcatcaatgaggagatcacaccccgacggcagtccatgacggtgaagaagggagagcaccggcagctgctgaaggacagcttcatggtggagctggtggagggggcccgcaagctgcgccacgtcttcctgttcaccgagctgcttctctgcaccaagctcaagaagcagagcggaggcaaaacgcagcagtatgactgcaaatggtacattccgctcacggatctcagcttccagatggtggatgaactggaggcagtgcccaacatccccctggtgcccgatgaggagctggacgctttgaagatcaagatctcccagatcaagagtgacatccagagagagaagagggcgaacaagggcagcaaggctacggagaggctgaagaagaagctgtcggagcaggagtcactgctgctgcttatgtctcccagcatggccttcagggtgcacagccgcaacggcaagagttacacgttcctgatctcctctgactatgagcgtgcagagtggagggagaacatccgggagcagcagaagaagtgtttcagaagcttctccctgacatccgtggagctgcagatgctgaccaactcgtgtgtgaaactccagactgtccacagcattccgctgaccatcaataaggaagatgatgagtctccggggctctatgggtttctgaatgtcatcgtccactcagccactggatttaagcagagttcaaatctgtactgcaccctggaggtggattcctttgggtattttgtgaataaagcaaagacgcgcgtctacagggacacagctgagccaaactggaacgaggaatttgagatagagctggagggctcccagaccctgaggatactgtgctatgaaaagtgttacaacaagacgaagatccccaaggaggacggcgagagcacggacagactcatggggaagggccaggtccagctggacccgcaggccctgcaggacagagactggcagcgcaccgtcatcgccatgaatgggatcgaagtaaagctctcggtcaagttcaacagcagggagttcagcttgaagaggatgccgtcccgaaaacagacaggggtcttcggagtcaagattgctgtggtcaccaagagagagaggtccaaggtgccctacatcgtgcgccagtgcgtggaggagatcgagcgccgaggcatggaggaggtgggcatctaccgcgtgtccggccggtgtggccacggacatccaggcactgaaggcagccttcgacgtcaataacaaggatgtgtcggtgatgatgagcgagatggacgtgaacgccatcgcaggcacgctgaagctgtacttccgtgagctgcccgagcccctcttcactgacgagttctaccccaacttcgcagagggcatcgctctttcagacccggttgcaaaggagagctgcatgctcaacctgctgctgtccctgccggaggccaacctgctcaccttccttttccttctggaccacctgaaaagggtggcagagaaggaggcagtcaataatatgttctctgcacaacctcgccacggtctttggccccacgctgctccggccctccgagaaggagagcaagctccctgccaaccccagccagcctatcaccatgactgacagctggtccttggaggtcatgtcccaggtccaggtgctgctgtacttcctgcagctggaggccatccctgccccggacagcaagagacagagcatcctgttctccaccgaagtctaaaggtcccagtccatctcctggaggcggacagatggcctggaaacctctggctaatcgggccatccgtagagcgggaaccttcctgaggtgtccttgggccacccccaagtgttgggccatctgccaagagacagcgacccaaagccgaaggacaggtggcctgggcagatctcgcccaggtctgggagccccaggctggcctcagactgtggttttttatgtggccaccccaggggggccccaagccagtttatttcagagtccaggcctgaccctgggagacagggggaagggagtgatttttatgaacttaacttagagtttaaaagatttttactgggtcccttgtcaagatgggccctttttggggagaagggaacgtggccggattccctccctgttgtattttgaataaacgctggtggttcctcctgtgaaaaaaaaaaaaaaaaaaaaaaaaaaaaaa

SEQ ID NO: 12182 - DNA, 1017 bp, Homo sapiens
  SIMILAR (703)..(1014): 991254mologous to Cloning vector pZC320 SopB,accession number U26464,Smith-Waterman Score=501.
  misc_feature (1)...(1017): n = a,t,c or g
atgctgcggtgcgactctaggagatcccctgtatttggtaagcaaaatacgtacatcaggctcgaaccctttaagatcaacgttcttgagcagatcacgaagcatatcgaaaaactgcagtgcggaggtgtagtcaaacaactcagcaggcgtgggaacaatcagcacatcagcagcacatacgacattaatcgtgccgatacccaggttaggcgcgctgtcaataactatgacatcatagtcatgagcaacagtttcaatggccagtcggagcatcaggtgtggatcgatagaaaggcaggagagtgtcttctgcatgaatatgaagatctggtacccatccgtgatacattgaggctgttccctgggggtcgttaccttccacgagcaaaacacgtagccccttcagagccagatcctgagcaagatgaacagaaactgaggttttgtaaacgccacctttatgggcagcaccccgatcaccgnagaatccccagtcgccgtcgtaaagctgctgcacttaccgaaagtgattatcgtgttctggttggcgagctggatgatgagcagatggctgcattatccagattgggtaacgattatcgcccaacaagtgcttatgaacgtggtcagcgttatgcaagccgattgcagaatgaatttgctggaaatatttctgcgctggctgatgcggaaaatatttcacgtgatgcacttcaaaaagcctttacagataaagaggaattacttaagcagcaggcatctaaccttcatgagcagaaaaaagctggggtgatatttgaagctgaagaagttatcactcttttaacttctgtgcttaaaacgtcatctgcatcaagaactagtttaagctcacgacatcagtttgctcctggagcgacagtattgtataagggcgataaaatggtgcttaacctggacaggtctcgtgttccaactgagtgtatagagaaaattgaggccattcttaaggaacttgaaaagccagcaccctga

SEQ ID NO: 12183 - DNA, 2834 bp, Homo sapiens
  SIMILAR (2112)..(1603): 921254mologous to Cloning vector pZC320 SopB,accession number U26464,Smith-Waterman Score=789.
  misc_feature (1)...(2834): n = a,t,c or g
tcagtaaccctgtgttgagttcccagcttcctcctccttcagcccagggtctgcgtcctttctctgttcactctcaatgccttcctcccaaagatttgcttgaagtttactggtgatcttgatggtctgttctctcgatgggagaagctcttcctccctccttttagctggccatcgtggctcttctttctcgnaatagtcagtgtagaataaacggatttttccgtcagatgtaaaggttgcagaaccggaccattcttgcgtctgatctttcaggatcggatcgttggcgtcgaacttatcgctgtctttaaagacacggcccgcgtttttccagctgtcgattgagttgtcgccgaccttttgataaaacatgtagattgatgtgtcatcagcgtctttcgggcttcccgcaagagcaaacacaacgtgatagccgttgtattcagctactgttccgtcagcgttttgcagcggccagctgtcccacacatcaagtccttttgcagactcaatatttttaatcgttgattgatcgaattgaggcacttggtatttttcgttttgctgctgtttagggatcttttgataaaacatgtagattgatgtgtcatcagcgtctttcgggcttcccgcaagagcaaacacaacgtgatagccgttgtattcagctactgttccgtcagcgttttgcagcggccagctgtcccacacatcaagtccttttgcagactcaatatttttaatcgttgattgatcgaattgaggcacttggtatttttcgttttgctgctgtttagggatctgcagcatatcatggcgtgtaatatgagagacgccgtacgtttctttgtatgctttttggttattttcgaacttggccgtaacctgccaaccaaagcgagaacaaaacataacatcaaacgaatcgaccgatgtgggggcctttagagtcgcaccaaagggattcaagccgaattctaagtctcccctgttatgtgtagccagaatgccgcaaactcccatgcctaagcgaactgtggagagtacgtttcgatccctgactgtgtagcctgaaagtgttttcaagtctcggaaggtttcttcaatctgcattcgcttcgaatagatattaacaagttgtttgggtgttcgaatttcaacaggtaagttagttgctagaatccatggctcctttgccgacgccagcttctcaacggatttataccatggcactttaaagccagcatcactgacaatgagcggtgtggtgttactcggtagaatgctcgcaaggtcggctagaaattggtcatgagctttctttgaacattgctctgaaagcgggaacgctttctcataaagagtaacagaacgaccgtgtagtgcgactgaagctcgcaataccataagccgtttttgctcacggatatcagaccagtcaagggggtcctctagagtcgacatgggcaagttgcttaacttctctgaatctttctcttcatctgtactataggaataataatgttcttcagctccaatatccaccccagcttttttctgctcatgaaggttagatgcttgctgcttaagtaattcctctttatgtgaaatattttccgcatcagccagcgcagaaatatttccagcaaattcattctgcaatcggcttgcataacgctgaccacgttcataagcacttgttgggcgataatcgttacccaatctggataatgcagccatctgctcatcatccagctcgccaaccagaacacgataatcactttcggtaagtgcagcagctttacgacggcgactcccatcggcaattttcttcgaccgcaacgccggtgtctgttgaccagtcagtagaaaagaagggatgagatcatccagtgcgtcctcagtaagcagctcctggtcacgttcattacctgaccatacccgagaggtcttctcaacactatcaccccggagcacttcaagagtaaacttcacatcccgaccacatacaggcaaagtaatggcattaccgcgagccattactcctacgcgcgcaattaacgaatccaccatcggggcagctggtgtcgataacggggtgttctccacaaagagcgactcgctgtataccgttggcatgctagctttatctgttcgggcaatacgatgcccattgtacttgttgactggtcttgcgagcattctaccgagtaacaccacaccgctcattgtcagtgatgctggctttaaagtgccatggtataaatccgttgagaagctgggttggtactggttaagtcgagtaagaggaaaagtacaatatgcagacgcgattgcgacgtgctgaagacgtatttccaccggtgatcggggttgctgcccataaaggtggcgtttacaaaacctcagtttctgttcatcttgctcaggatctggctctgaaggggctacgtgttttgctcgtggaaggtaacgacccccagggaacagcctcaatgtatcacggatgggtaccagatcttcatattcatgcagaagacactctcctgcctttctatctgatgctccgagctggccattgaaactgttgctcatgactatgatgtcatagttattgacagcgcgcctaacctgggtatcggcacgattaatgtcgtatgtgctgctgatgtgctgattgttcccacgcctgctgagttgtttgactacacctccgcactgcagtttttcgatatgcttcgtgatctgctcaagaacgttgatcttaaagggttcgagcctgatgtacgtattttgcttaccaaatacagcaatagtaatggctggggatc

SEQ ID NO: 12184 - DNA, 266 bp, Homo sapiens
  SIMILAR (141)..(263): 801254mologous to Mus musculus LIM domains containing protein 1,accession number AJ132409,Smith-Waterman Score=167.
caagtcagaagcagaaggcttggttgctgccagccaggcaagggacagcctccagcagagtccacccacccacagttgtctccttagaacaaacagaaagtttcacaagcacactttgttcagttctgcagcttaccagcatggataattatgacaacctgtgcctggaggccactaaattcatcgaggacctgaacatgtgtgaggcctctaatgatgggctcttcccagtggacaagggtgcaggcaacacccccgagttttag

SEQ ID NO: 12185 - DNA, 1846 bp, Homo sapiens
  SIMILAR (671)..(1840): 991254mologous to Homo sapiens LIM domains containing protein 1,accession number AJ132408,Smith-Waterman Score=2080.
ttttccgatatgcttcgtgatctgctcaagaacgttgatcttaaagggttccaccctcatgtaggtattttggttaccaaatacagcaatagtaacggccccccctcacagtggatggaggagcaaaaaaaggatgcctggggaagcatggttctaaaaaatgttgtacgtgaaacggatgaagttggtaaagcaagtcagaagcagaaggcttggttgctgccagccaggcaagggacagcctccagcagagtccacccacccacagttgtctccttagaacaaacagaaagtttcacacgcacactttgttcagttctgcagcttaccagttttcccatcttcaaaacaggagagaaaattggcgggcactttgcagggctgctgggaggaggagaaatggagcaggcccggacacctgtctgcagcatggataagtatgacgacctgggcctggaggccagtaaattcatcgaggacctgaacatgtatgaggcctctaaggatgggctcttccgagtggacaagggtgcaggcaacaaccccgagtttgaggaaactcgcagggtgttcgccaccaagatggccaaaatccacctccagcagcagcagcagcagctcctgcaggaggagactctgcccagggggagtagaggccctgtcaatggagggggccgccatgggcccacaggcccgttgggaagttgtgggcagcaagctgactgtggatggtgctgccaagcctcctcttgctgcctcgacaggggcacctggggcagtcaccaccctcgctgctgggcagcccccgtacccaccgcaggagcagagatccaggccatacctgcatggcacgaggcatggcagccaggactgtggttccagggagagcctggcgacttctgagatgtctgctttccaccagccaggcccctgtgaggatccttcctgcctcactcatggagactattatgacaacctctccttggcaagcccaaagtggggtgacaaaccaggagtgtcccccagcatcggcctgagtgtagggagtgggtggcctagctccccggggagtgacccaccactgcccaaaccctgcggggaccatcccctaaatcaccgacagctctccctgagctccagcaggtcttctgagggtagcctcggtggtcagaatagtggcattggtggccgcagcagcgagaagccaacaggcctttggtccactgcctcctcccagcgggtgagccctggcctgccttccccaaacttggagaacggagcaccagctgtggggcctgttcagcccaggactccttctgtgtcagcacccttggccctgagctgccccaggcaaggaggtcttccaagatcaaactcggggctggggggtgaggtttcaggtgtgatgtccaaacccaatgtggacccccaaccctggttccaggatgggcccaaatcttacctttccagttctgccccgtcatcctcgccagctggcctggacggttcacagcagggtgcggtccctgggctggggccgaagcctggctgcacagaccttggcactggtcccaagctcagccccaccagtcttgtccatccagtgatgtccaccctgcctgagttatcttgtaaagagggtcccctgggctggtcttctgatggtagcctgggatctgtgctcctggacagccccagctcccctagggtaaggctgccctgccagcccctcgtcccaggtcctgagctgagaccctctgctgctgagttgaaattagaagccctcacccaacgtctggagcgagagatggatgctcacccgaaggctgattactttggtgagtga

SEQ ID NO: 12186 - DNA, 664 bp, Homo sapiens
  SIMILAR (363)..(662): 361254mologous to Babesia microti seroreactive antigen BMN1- 5,accession number AF206248,Smith-Waterman Score=111.
ctactcggtgctggctgcatagaagcccagggagctcgggccgatctctccagtctggttgccaccagacaggcttcctgagagaccccagaggaggcggccctcgggtgtggaccctggctcctggttggggtccgggtcgtgcggttcaacaggctgctctgctctaatgtcctgctcatgtgggtccactcctttattgtccttggcgctgaaagtcaccccaggtggggtccttggagccccatctggatctgaagatggctcctgaccaaatagaaaagcctgtggctccgagatggagatctgcctgaccacacggggtgtctgggggcctgaggtggctcttggggtcgggggcgggctccagcagagctgcagggctccgtgcggagggctgccaaagttgctcaggagctggtcccagtcatcgttgtccccaaatagcccaggcaggggggcctcctcaggggaggcagcctgagggtctggggtcttctcacccgctccaggaaaattcctcagggtcagctccagggcctccttgtccgcctgggcctcctgcaggcggctggtcatcttggccagaaagcctgccaggttgcctgccagctggggctcctcctgccgcagctgcccccacagttgccagatttccatctgc

SEQ ID NO: 12187 - DNA, 1941 bp, Homo sapiens
  SIMILAR (1)..(1080): 1001254mologous to Homo sapiens Human protease HUPM- 9,accession number Y06440,Smith-Waterman Score=1832.
atgttcttgctgcctcttccggctgcggggcgagtagtcgtccgacgtctggccgtgagacgtttcgggagccggagtctctccaccgcagacatgacgaagggccttgttttaggaatctattccaaagaaaaagaagatgatgtgccacagttcacaagtgcaggagagaattttgataaattgttagctggaaagctgagagagactttgaacatatctggaccacctctgaaggcagggaagactcgaaccttttatggtctgcatcaggacttccccagcgtggtgctagttggcctcggcaaaaaggcagctggaatcgacgaacaggaaaactggcatgaaggcaaagaaaacatcagagctgctgttgcagcggggtgcaggcagattcaagacctggagctctcgtctgtggaggtggatccctgtggagacgctcaggctgctgcggagggagcggtgcttggtctctatgaatacgatgacctaaagcaaaaaaagaagatggctgtgtcggcaaagctctatggaagtggggatcaggaggcctggcagaaaggagtcctgtttgcttctgggcagaacttggcacgccaattgatggagacgccagccaatgagatgacgccaaccagatttgctgaaattattgagaagaatctcaaaagtgctagtagtaaaaccgaggtccatatcagacccaagtcttggattgaggaacaggcaatgggatcattcctcagtgtggccaaaggatctgacgagcccccagtcttcttggaaattcactacaaaggcagccccaatgcaaacgaaccacccctggtgtttgttgggaaaggaattacctttgacagtggtggtatctccatcaaggcttctgcaaatatggacctcatgagggctgacatgggaggagctgcaactatatgctcagccatcgtgtctgctgcaaagcttaatttgcccattaatattataggtctggcccctctttgtgaaaatatgcccagcggcaaggccaacaagccgggggatgttgttagagccaaaaacgggaagaccatccaggtttgtaaatgtgttgaggtagaacatactgtcctacatcatgggccctgcactgaaggggatgtggcagcaggtcctctgggtggcacgtgcatgcaggttgataacactgatgctgaggggaggctcatactggctgatgcgctctgttacgcacacacgtttaacccgaaggtcatcctcaatgccgccaccttaacaggtgccatggatgtagctttgggatcaggtgccactggggtctttaccaattcatcctggctctggaacaaactcttcgaggccagcattgaaacaggggaccgtgtctggaggatgcctctcttcgaacattatacaagacaggttgtagattgccagcttgctgatgttaacaacattggaaaatacagccttcccttttttctgaaacgtgaactgcgcgtacgcgtatctcctccagggatccgagcaactaattcacaaatggggaaactgaggcttaaagcttgctttgcatctctggtgagtcaggactatgtcaatggcaccgatcaggaagaaattcgaaccggtgttgatcagtgtatccagaagtttctggatattgcaagacagacagaatgttttttcttacaaaaaagattgcagttatctgtccagaaaccagagcaagttatcaaagaggatgtgtcagaactaaggaatgaattacagcggaaagatgcactagtccagaagcacttgacaaagctgaggcattggcagcaggtgctggaggacatcaacgtgcagcacaaaaagcccgccgacatccctcagggctccttggcctacctggagcaggcatctgccaacatccctgcacctctgaagccaacgtga

SEQ ID NO: 12188 - DNA, 2238 bp, Homo sapiens
  SIMILAR (1)..(447): 901254mologous to Homo sapiens leucine aminopeptidase,accession number AF061738,Smith-Waterman Score=716.
atgcccagcggcaaggccaacaagctgggggatgttgttagagccaggaacaggaagaccatccaggttggtaacactgatgctgaggggaggctcatactggctgatgcgctctgttacgtgcacacatttaacccgaaggtcatcctcaatgccaccaccttaacaggtgtcatagatgtagctttggggtcaggtgccactggggtctttaccaattcatcctggctctggaacaagctcttcgaggccagcattgaaacaggggaccgtgtctggaggatgcctctcttcaaacattgtacaagacaggttgtagattgccagctggctgatgttaacaacattggaaaatatagatctgcgggagcatgtacatctgcggcattcctgaaagaattcgtgactcatcctaagtgggcacatttagacatagcagctgcattgggtaaatccttgcctgccagagtgggtcagcggccccaggcgcagtttgctcgcggcgtggggatgaagtccgtgtccctggaggggcccaggaagggcgaggaaagcggagtggattttcctggagcgggtgagaagaccccagaccctcaggctgcctcccctgaggaggcccccctgcctgggctatttggggacaacgatgactgggaccagctactgagcaactttggcagccctccgcacggagccctgcagctctgctggagcccgcccccgaccccaagagccacctcaggcccccagacaccccgtgtggtcaggcagatctccatctcggagccacaggcttttctatttggtcaggagccatcttcagatccagatggggctccaaggaccccacctggggtgactttcagcgccaaggacaataaaggagtggacccacatgagcaggacattagagcagagcagcctgttgaaccgcacgacccggaccccaaccaggagccagggtccacacccgagggccgcctcctctggggtctctcaggaagcctggtggcacctgcattcaaagtgctcattcctttggaggatgggccccctccccttgagaactctccccctccccaggccccagctgggtccagcaaacagatccaggcctcagacccagatgacaagggccctgggtcttgggctcctcccagcggggctcagcctggggctggagcaggaccccaggaacccacacaaacccctcccaccatgactgagcgggaaacccagcccggaccctcacccacaactgccctcacaggagtgggcccagccaagccgcccaggcagagagatgccctccagcaggacctgcatgccactggctctgagccaagactggggacccagagggctagagccctcaccctggggccagctgagcccttccagggcctggaatttgtgggtccggtgcccacagagaggctggagcagggccaggcgggcccagcggtgcaggagggccttcctgaggggctaagagaagctcatggccaggtccttgggctgggtgagctgtctgccttcccccaccaggagctggaagaggaacccaggtctgaggaaggaaaacaagagggcagaggtgggcaggacctcagttcagagcagtcagagcagtcggttgaggctcacggcctagaaactgcgcattcggaactcccccagcaagactctctgcttgtttctctcccatctgccacaccacaggctcaggtggaagcagaaggccccactcctggaaaatcggcacctccaaggggctctcctcccaggggggctcagcctggggctggagcaggaccccaggaacccacgcaaacccctcccaccatggctgagcaggaagcccaacccaggccatccctcacgactgctcacgcagaagaacaaggcccgcctcactccagggaaccaagggcagagagcaggcttgaagatccaggaatggactccagggaagctgggctgaccccatccccgggagaccccatggctggagggggaccccaggccaaccctgattacctcttccatgtcatctttctgggagactccaacgtgggcaaaacatccttcctgcacctgctgcaccagaattctttcgccaccggattgacagctaccgtgggtaagggcattggggagggcggcagggagcaaggagagacgcaggggccagggccaacgagtgagagcgggcccagaccaagccctccctga

SEQ ID NO: 12189 - DNA, 2162 bp, Homo sapiens
  SIMILAR (187)..(1287): 991254mologous to Homo sapiens leucine aminopeptidase,accession number AF061738,Smith-Waterman Score=1858.
ggctcttttaaatgaccccaggcgtcgtgtattgaatcctagactcacgtccgtctcgccggcgcccgagccagtccgcgcgcaccgcgtctgcgtccccgaaagccccgcccgcaagggctgccctgcctacctggtctccgacgtgctcgtctggagggcggtgcgaggggccgagccgacgagatgttcttgctgcctcttccggctgcggggcgagtagtcgtccgacgtctggccgtagtacgttctgggagccggagtctctccaccgcagacatgacgaagggccttgttttaggaatctattccaaagaaaaagaagatgatgtgccacagttcacaagtgcaggagagaattttgataaattgttagctggaaagctgagagagactttgaacatatctggaccacctctgaaggcagggaagactcgaaccttttatggtctgcatcaggacttccccagcgtggtgctagttggcctcggcaaaaaggcagctggaatcgacgaacaggaaaactggcatgaaggcaaagaaaacatcagagctgctgttgcagcggggtgcaggcagattcaagacctggagctctcgtctgtggaggtggatccctgtggagacgctcaggctgctgcggagggagcggtgcttggtctctatgaatacgatgacctaaagcaaaaaaagaagatggctgtgtcggcaaagctctatggaagtggggatcaggaggcctggcagaaaggagtcctgtttgcttctgggcagaacttggcacgccaattgatggagacgccagccaatgagatgacgccaaccagatttgccgaaattattgagaagaatctcaaaagtgctagtagtaaaaccgaggtccatatcagacccaagtcttggattgaggaacaggcaatgggatcattcctcagtgtggccaaaggatctgacgagcccccagtcttcttggaaattcactacaaaggcagccccaatgcaaacgaaccacccctggtgtttgttgggaaaggaattacctttgacagtggtggtatctccatcaaggcttctgcaaatatggacctcatgagggctgacatgggaggagctgcaactatatgctcagccatcgtgtctgctgcaaagttaaatttgcccattaatattataggtctggcccctctttgtgaaaatatgcccagcggcaaggccaacaagccgggggatgttgttagagccaaaaacgggaagaccatccaggttgataacactgatgcctgaggggaggctcatactggctgatgcgctctgttacgcacacacgtttaacccgaaggtcatcctcaatgccgccaccttaacaggtgccatggatgtagctttgggatcaggtgccactggggtctttaccaattcatcctggctctggaacaaactcttcgaggccagcatttgaaacaggggaccgggtttgaaggatgcctctcttcgaccattatacaagacagggttgtagattgccagcttgctgattgttaacaacattggaaaatacagatctgcagggagcatgtacagctgcagcattcgtgaaagaattcgtaactcatcgtaagtgggcacatttagacatagcaggcgtgatgaccaacaaagatgaagttccccaatctacgggaaaggcatgactggggaggcccacaaggactctcattggagttcttgacttcgtttcagtcaagacaattgcttagttcagatactcaaaaatgtctttcactctgtcttaaattggacagttgaacttaaaaaggtttttgaataaatggatgaaaatcttttaacggacacaaaggatggtatttaaaaatgtagaacccaattaaatttggaaggccttgattttttttttcatttcacacaaagatttataaaggtaaagttaatatcttacctggataagggatttttaaagatactctataaatgattaaaatttttagaacttcctaatcacttttcagagtatatggttttccattgagaagcaaaattgtaactcagatttgtgatgctaggaacatgagcaaactgaaaattactatgcacttgtcagaaacaataaatgcaacttgttgtgcaaaaaaaaaaaaaaaaaa

SEQ ID NO: 12190 - DNA, 405 bp, Homo sapiens
  SIMILAR (7)..(192): 501254mologous to Neurospora crassa YFL034W,accession number AF286010,Smith-Waterman Score=155.
ggaattcgatcagcagaggttggcaagcacctggcccacatcctgctctcccggcagcaggggcgacgacctgtcaccttgattggcttcagcctgggagccagagtcatctacttctgtctgcaggagatggctcaagagaaagattgccaaggaatcatcgaggacgtcatcctgctgggtgcgcctgtggagggagaagccaagcattgggagcctttccggaagggtggtgtccgggaggatcatcaacggctactgcaggggagactggctgctgagtttcgtgtaccgcacatcctcggtgcagctccgtgtcgccggcctacagcccgtgctgctgcaggacaggagggtggagaacgtggacctgacctctgtggtcagcggccacctggactatgc

SEQ ID NO: 12191 - DNA, 1921 bp, Homo sapiens
  SIMILAR (14270)..(13308): 281254mologous to Boreogadus saida antifreeze glycopeptide AFGP polyprotein precursor,accession number U43200,Smith-Waterman Score=152.
atgtgtcaggaaggctgcagcagcgacttcttcagaacccagattggagctaatgatctcttcagctttgatgagtaccggggtacttggaagttacaactaggtggcgagtctcaagttggattttcgtttgagtggttttacgttgttttcctgaagctcagctgtccgtggatcctgactgtggctcaggaatgctgctattaccaccgctggccacaaggggtcccagccctgcaggcagccgcaccaaggctcgaaaagcagtcccagctcttagcagggcagactctgccaggcagagaaggcgccctgaatggccggcccccagagaaagctgctgagctcatggttatccctgggtccacaaccatttggcactcacccaatgtggccagggacactgacggccttttctggggtcttttgccagattgccaaggaatcatcgaggacgtcatcctgctgggtgcgcctgtggagggagaagccaagcattgggagcctttccggaaggtggtgtccgggaggatcatcaacggctactgcaggggagactggctgctgagtttcgtgtaccgcacatcctcggtgcagctccgtgtcgccggcctacagcccgtgctgctgcaggacaggagggtggagaacgtggacctgacctctgtggtcagcggccacctggactatgccaagcagatggatgccatcctgaaggccgtgggcatccgcaccaagccaggctgggacgagaaggggctcttgctggccccaggctgcctgccctccgaggagcctcgccaggcagcagctgccgcctcatcaggcgagaccccccaccaggttgggcaaacccagggtcccatatccggagacacctccaaattggccatgtccacagaccccagccaagcccaggtgccagtagggctggaccagtctgaaggggcctcccttcctgctgctgccagccctgaaaggccccccatctgcagccatggcatggaccccaacccactgggctgccccgattgtgcctgcaagacccagggccccagcacggggctggactgaccacagcaggggacctgagccgtcttccccagtctccatatgcagctctctcttataccctcgggttcctcccaggagctctggaggtacaggatttccacaggccttttttcctaaatggaaggaattggaactgaaagggaaaggaaatggaaggaaggggaatttggaggagagaacacgcccacccttgggaagctgcctgtccccagaggatgccccacctatggagttttctgccccctcatcagagacctgcggagtcaaccaagcacaggttagagtcccaggaccggaaaccaactgtgggctttctgtacttctcatagctttgggagtctggctgtccatcaggaggtcccgagggctcttttgggggcctgaggttccccacaccagctctcccctgggcctcaataaaaaccagggtgcatgcctggttcttccatccacactccagggctgcccaccagctgacaggcaccatcaactggcagcaacagagcaggcgcaggtacaaagaagggcagctcactccctgctccttaggagatcccaatcagatctgcccctgtacagccatgtaggctgtgcgctgcataactccagggacatgagtcacacagacacaatgtgagtgtgctcccccgtcatgcaacatctggacaccactaacagagcatggtgaatacatgcctgaattgcaatcaagaatggctgtgaactaagcgctggggacaagaatgaaattttaacatgaaaagaactttctggagcaggaacagaggggataacaacagcaataaataataataagaagaagctaccacttcttgagcatgtacca

SEQ ID NO: 12192 - DNA, 701 bp, Homo sapiens
  SIMILAR (276)..(512): 1001254mologous to Homo sapiens PHAPI (Putative HLA DR Associated Protein I),accession number X75090,Smith-Waterman Score= 418.
  misc_feature (1)...(701): n = a,t,c or g
aattgcagaataaaagtgttaacattggataaggcttcaaagatcctccagtccaaccccccattttccagatggagacgccgaggcccacaaactgcaggtgatatgtctgggcaaacactgtggctaagcagagccaaatccaagcttccttatcacctggaagtcatggtctgcgcatgctatctcatggcatccttgcctgtttgctagggctgttcctccaccttcctcccacaaatcacttactgttggcttcatttttccgcttgcagaaaaagttagaaaacctcaagagcttagaccttttcaattgcgaggtaaccaacctgaacgactaccgagaaaatgtgttcaagctcctcccgcaactcacatatctcgacggctatgaccgggacgacaaggaggcccctgactcggatgctgagggctacgtggagggcctggatgatgaggaggaggatgaggatgaggaggagtatgatgaagatgctcaggtagtggaagacnnnnnnnnnnnnnnnnnnnnnnnnnnnngggaacaggcgcactacaacctggacgacaccttcttggacgcgggctcattggggtcaccctcaggagaagtgtcgcaccccctgaaaacacgcccagtggagcagacaatagttggtgctgctggtcgggcccctggtttctccatgtgcggcgaggaa

SEQ ID NO: 12193 - DNA, 1155 bp, Homo sapiens
  SIMILAR (396)..(872): 961254mologous to Homo sapiens 28-SEP-1994 Human pp32 cDNA,accession number T27712_cd1,Smith-Waterman Score=806.
gctcgagaaccgagcggagctggttgagccttcaaagtcctaaaacgcgcggccgtgggttcggggtttattgattgaattccgccggcgcgggagcctctgcagagagagagcgcgagagatggagatgggcagacggattcatttagagctgcggaacaggacgccctctgatgtgaaagaacttgtcctggacaacagtcggtcgaatgaaggcaaactcgaaggcctcacagatgaatttgaagaactggaattcttaagtacaatcaacgtaggcctcacctcaatcgcaaacttaccaaagttaaacaaacttaagaagcttgaactaagcgataacagagtctcagggggcctggaagtattggcagaaaagtgtccgaaccttccgccatctaatttaaggtggcaacaaaattaaagacctcagcacaatagagccactggaaaagttagaaaacctcaagagcttagaccttttcaattgcgaggtaaccaacctgaacgactaccgagaaaatgtgttcaagctcctcccgcaactcacatatctcgacggctatgaccgggacgacaaggaggcccctgactcggatgctgagggctacgtggagggcctggatgatgaggaggaggatgaggatgaggaggagtatgatgaagatgctcaggtagtggaagacgaggaggacgaggatgaggaggaggaaggtgaagaggaggacgtgagtggagaggaggaggaggatgaaaaaggttataacgatggagaggtagatgacgaggaagatgaagaagagcttggtgaagaagaaaggggtcagaagcgaaaacgagaacctgaagatgagggagaagatgatgactaagtggaataacctattttgaaaaattcctattgtgatttgactgtttttacccatatcccctctcccccccccctccaatcctgccccctgaaacttatttttttctgattgtaacgttgctgtgggaacgagaggggaagagtgtactgggggttgcggggggagggatggcgggtgggggtggaataaaatactatgttttactggcactctttatttttttcccctagtttttctttgtgtgcggattttggaccttggaatgccatagctaaggacccag

SEQ ID NO: 12194 - DNA, 388 bp, Homo sapiens
  SIMILAR (201)..(386): 961254mologous to Homo sapiens putative prenylated protein,accession number Y13374,Smith-Waterman Score=340.
aagcgtggagcagcgatggacggtcgggtgcagctgataaaggccctcctggccttgccgatccggcctgcgacgcgtcgctggaggaacccgattccctttcccgagacgtttgacggcgataccgaccgactcccggagttcatcgagcagacgggctcctacatgttcgtggacgagaacacgttctccagcgacgccctgaagacctgcgctgccacagtcattgccatccatcgcatcccaccgacagactgctgctcctagtgatctggactcacctcggaggtatctgggctggccacagtccctggacagtgattcagacagctggccgccccccaagggatctgtcaccttcagcgagacctatttcctccccaccccc

SEQ ID NO: 12195 - DNA, 511 bp, Homo sapiens
  SIMILAR (105)..(308): 981254mologous to Homo sapiens putative prenylated protein,accession number Y13374,Smith-Waterman Score=380.
ctcacagggcccgccctgcagtgggtgatcccctacatcaagaaggagagccccctcctcaatgattaccggggctttctggccgagatgaagcgagtctttggatgggaggaggacgaggacttctaggccgggagaccctcgggcctgggggcgggtgctctggggagggtccgctgtgttactggccgccgccagggtcgccaccggcgccctccctccgcgcctccctccccctcgagccgccgcgatgtcccctgcgctcctgttccctcccgcgtagtgcttgcctttgttccaggtgttcctggcagccaaatcgagtctctcattttctcttgtggaccagttagttttgcccataacgcagtattctgagtttgcaactgtctctctgatgtgtgccttttgttcaacacagtaacccctgcactctgctctgctctaatacactacctggagaaagtcttttccttattttcaataaatgtcagacattattgaaaagaaa

SEQ ID NO: 12196 - DNA, 1273 bp, Homo sapiens
  SIMILAR (440)..(1045): 811254mologous to Homo sapiens Human receptor molecule (REC) encoded by Incyte clone 2936050,accession number Y32207,Smith- Waterman Score=859.
gtagatatcccttaggtacctagacggacttgccgggccgacccacgcgtccgcggcgaccgaggcatccgaccgaagtgaggatctgcgctggacggctgcgcgcagctgatacaggccctcctggccttgccgatccggcctgcgacgcgtcgctggaggaacccgattccctttcccgagacgtttgacggcgataccgaccgactcccggagttctatcgtgcagacgtgctcctacatgattcgtggacgagaacacgttctccagcgacgccctgaaggtgacgttcctcatcacccgcctcacagggcccgccctgcacgtgggtgatcccctacatcaagaaggagagccccctcctcaatgattaccggggctttctggccgagatgaagcgagtctttggatgggaggacggacgaggacttctaggccgggagacccttggggcctggggcgggggtgctctggggagggtccgctgtgttactggccgccgccagggtcgccaccggcgccctccctccgcgcctcccttccccctcgagccgccgcgatgtcccctgcgctcctgttccctcccgcgttagtgcttgcctttgttccaggaatagcgctccaggctcctgctgcagctcctgggccgcactctagagcgcgctgcctccgccctcttttgccagcccaccccctccaatgcacatttggacgctgtcctgcacttcaggtgcaagctgggctcctgttacatactggacagaccacccacagccgctgctgccaacccacctccactcctccagactgccagccaactacatcattctgcccacagacctacgctaccactgccatcgccatccaccgcatctcaccaacagactgtggctcctagtgatgtggactcacctcggaggtatccgagctggacacagcccctggacagtgatccagacagctggccgtcccccaaggagcctgtcaccttcagcgagacccatttcctccccatccccagagacctcttgtgttcctgccacatagctgccagggcttaagtgtgcctggcaaccaaatcgaatctctcattttctcctgtggaccagttagttttgcctagaatcctgttctcttctgaatttgcagctgtctctctgatgggtgccttttgttcaacacagtaagccctgctcccttccctgctctaatacactacctgtacaaaggttttttccttattttcaataaatgtcagacattattgaaaag

SEQ ID NO: 12197 - DNA, 1137 bp, Homo sapiens
  SIMILAR (966)..(823): 521254mologous to Homo sapiens Human secreted protein, SEQ ID NO: 6606,accession number G02525,Smith-Waterman Score=95.
tcacagttttggaggcgtgaggtctgaaatcaaggtgtcagtggggttgcgtgccctccattcatccccagaacaaatcctgtctcggtggcctgtgtcttcactggcagaatagaaggctgggaccagggtggtgataccggcaggatgtcctgacaacggcattcccttgtgtttgtttatacttaaaacaactcttccctgtggtccaggaagggtgaatggagaggctctgagtggagatgacagggcttggtcacagattgcgtgtagggttggaggccgagagtggccgatgatgacggatttcttgcttcggagactggtagtgttactgacagatgtgaggaagccgggaaggtgacccatgctgagtgggcagctggtgcatttgcagatgttttgcttctcaaatatctgtttttcccagtcgttgactgctattcgaccgtttaactggttaatatgagcaccaagataaataaatggagaccttttaacccacagagtttgagtgacagcttggactaaaccaccagtctcctgctttgtacatttcattgttttagggcatgagagccaccaccgaggaagaaaagagaaaactgcctcttcattcatgcgtttatctggaaagggtgaccactgccaattccgtcgtgtgacaggatctagtgtctctggaaagcttgctaaacacgaagatccttgtctcagcctcagtaatctgattgcacaggtgtgggacagggtccgggagcgtgggtcttttatgaggttcccaggtggttttgatactgatggtttaagaccaccatccaggatcctgcagagatctgatggttttataaggggctcttccccggcttcacttggcacttcttcctgctgccttgtgaagaaggtgctttgcttccccttctcgttccaccgtgattgtaagttccctgcggcctgcccatccatgctgaactgtgagtcaattaaagctctttccgatccgttttccctttccctgcatcctttttctcttttctccaaccgcttacttccacgagatgataaggaggaagggaacaaacacaagagcagagcaaggaattgtctttttggggataaatctctgattttaatcat

SEQ ID NO: 12198 - DNA, 765 bp, Homo sapiens; identical to SEQ ID NO: 9808
  SIMILAR (7)..(291): 671254mologous to multiple sclerosis associated retrovirus polyprotein,accession number AF009668,Smith-Waterman Score=328.

SEQ ID NO: 12199 - DNA, 471 bp, Homo sapiens
  SIMILAR (7)..(192): 641254mologous to Human endogenous retrovirus W polyprotein,accession number AB021921,Smith-Waterman Score=215.
gatggggaaccaatcaagcatgactgccaacaaattatagtccagatttatgccgcccgagatgatctcttagaagtccccttagctaatcctgaccttaacctatatattgatggaagttcatttgtggagaatgggatacgaagggcaggttatgccatagttagtgatgtaactgtacttgaaaactctttggcagcagtgactctccaaaaccgccaaggcctagacctcctcactgctgagaaaggaggactctgcaccttctcagggaaagagtgttgtttttacactaaccagtcagggataagttcccctctggaggacactacaactgcagggccctttcttcaccccatccagcaggaagtagctagagctatcatcggccaattcccaacagcatttggggtgtcctgtttagaggggagattgagaggtgaagccagctggacttcctgggtcgagtag

SEQ ID NO: 12200 - DNA, 3911 bp, Homo sapiens
  SIMILAR (132)..(7892): 961254mologous to Homo sapiens actin-binding protein homolog ABP-278,accession number AF043045,Smith-Waterman Score=13061.
cggagaaagctccaaaagcaagccctgggccctgaacaaaatctagagacattattaaacctggcaacctcggtgttctataatagggaccaagaggaacaggtccaaaaggaaaagcgagatcagagaaaggccgcagccttagtcatggccctcagacaaacaaaccttggtggttcagagaggacagaacatgaagcaggccaatcacctggtaaggcttgttatcagtgtggtttactgggacactttaaaaaagattgtccaatgagaaacaagctgccccctcgtccgtgtccactatgctgaggcaatcactggaaggtgcactgccccagaggatgaaggttccctgggtcagaagcccccagccagacgatccaacaacaggactgagggtgcctggggcaagcgccagctcatgtcatcaccctcactgagccccgggtatgtttaactattgagggccaggaaattgacttcctcctggacactggcgcggccttctcagtgttaatctcctgtcctggacgactctcctcaacctccgttaccatccaaggaatcctgggacagcctgtaaccaggtatttctcccacctcctcagttgtaattgggagactttgctcttttcacatgcctttcttcttatgcctgaaagacccacagggttattagggagggatatattagccaaggctggagctattatctacatgaatatggggaacaagttacccatttgttgtcccctacttgaggagggaatcaaccctgaagtctgggcattggaaggacaatttggaagggcaaaaaatgcccacccagtccaaatcaggttaaaagatcccaccacttttccttatcaaaggcaatatccctaaggcctgaagctcataaaggattacagaatattgttaaacatttgaaagctcaaggcttagtaaggaaatgcagcagtccctgcaacaccccaattctggaagtacaaagaccgagactagtgcaagatcttagactcattaatgaggcagtaatttcactatatccagttgtacccaacccctataccctgctctctcaaataccagaggaagcagaatggttcacagttctggacctcaaggatgccttcttctgtgttcccctgcactctgattcacagttcctctttgcttttgaggatcccacaaaccacacatcccaacttacatggatggtcttgccccaagggtttagggatagccctcatctgtttggtcaggccctagccaaagatctaggccacttctcaagtccaggcactctggtccttcaatatgtggatgatttacttttggctaccagttaggaagccttgtgccagcaggctactctagatctcttgaactttctagctaatcaagggtacaaggtgtctatgtcgaaggcccagctttgcctacagcaggttaaatatctaggcctaatcttagccaaagggaccagggccctcagcaaggaatgaatacagcctatactggcttatcctcgccctaagacattaaaacagttgagggagttccttggaattaccagcttttgccgactatggatccctggatacagcgagacagccaggcccctctaatcaaggaaacccagagggcaaatactcatctagttgagtgggaaccagaggcagaaacaaccttcaaaaccttaaagcaggctctagtacaagctccagctttaagccttcccacaggacagaatttctctttatatgtcagagagagagccaggatagctcttggagtcctcactcaaactcatgggacaaccccacaaccagtggcatacctaagtaaggaaattgatgtagtagcaaaaggctggcctcactgtttaagggtagttgcagcagtggccgtcttagcatcagaggctatcaaaataatacaaggaaaggatctcactgtctagactacttatgatgtaaatggcatactaggtgccaaaggaagtttatggctatcagacaactgcctacttagataccaggcactactccttgagggaccagtgcttcaaatatgcacatgcatggccctcaaccctgccacttttctcccagaggatggggaaccaatcaagcatgactgccaacaaattatagtccagacttatgccgcccgagatgatctcttagaagtccccttaactaatcctgaccttaacctatatactgatggaagttcatttgtggagaatgggatacgaaggttagtgatgtaaccatacttgaaagcaagcctcttcccccagggaccagtgcccagttagcggaactagtggcacttacctgggccttagaactgggaaagggaaaaagaataaatgtgtatacagatagcaagtatgcttatctaatcctacatgcccatgctgcaatatggaaagagagggagttcctaacctctgtaggaacccccattaaataccacaaggaaattatagagttattgcacgcaatgcaaaaacacaaagaggtgggaatcttacactgacaaagccatcagaataggaaggagaggggagaacagcagcataagcagctggcagaggcagcagaaaggaaagaaagagacaggaagtcaaagaaagagacagagaggaagagacaagaagttagagagaaagagggacagacacagaagtcaaagagagggtaaaaaagagaggaagagacaaagaagaagtcaaagagagagatggaagtagtaaagaaaaaacagtgtacctattcctttaaaagccagggtaaatttctctctacccacgcaaggcaattctctattggatctcaacccatatctgcctctcaaacagttgaagaaataatgaaatctatccttactttacaatcccaaataagactctttggcagcagtgactctccaaaaccgctgaggcctagatctcctcactgctgaaaaaggaggactctgcaccttcttaggggaagagtgttgtttttacactaaccagtcagggatagcatgagatgccacccagcgtttacaggaaaaggcttctgaaatcagacgcctttcaaattcttataccaacctctggagttgggcaacatggcttctcccctttctaggtcccgtggcagccatcttgctgttactcgcctttgggccccgtatttttaaccttcttgtcaaatttgtttggtctagaatcgaggccatcaagctacagatggtcttacaaatcgaaccccaaatgagttcaactaacaacttctaccgaggacccctggactgaccagctggcacttcccctggcctagagagttcccctctgaaggacactacaactgcaaagccccttcttcgcccctatccagcaggaagtagctagagcagtcatcggccaaattcccaacagcagttgggggtgtcctgttgattgaggggtgacagcatgctggcagtcctcacagccctcactcgctcgctcactctcggcaactcctcttgcctgggggtcccacttttggcagcattttaggagccccttcagctctgtatctaggctactctgatgggtccttggagaacctttatgtctagctcagggattgtaaatacaccaatcagcaccctgtgtctagctcagggtttgtgaatgcaccaatggacactctgtatctagctactctggtggggccttggagaacctttgtgtcaacactctgtatctaactaacctggtggggatgtggagaacctttgtgtctagctcagggatgtaaacgcaccaatcagtgccctgtcaaaccactcggctctaccaatcagcaggatgtgggtggggccagataagagaataaaagcaggctgcccgagccagcagtggc

SEQ ID NO: 12201 - DNA, 9223 bp, Homo sapiens
  SIMILAR (181)..(603): 991254mologous to Homo sapiens guanine nucleotide-binding regulatory protein 2,accession number M60165,Smith-Waterman Score= 741.
ttatattggatttttagcagattcagtagcagtaattgcatcaagatgaggtgaatctttagaataagttgcgagaccagatgcaactaatatatctgccaaattgtttttctcatgaatgacatctactttcagttttgtttcagaatgatattccctaaactgaaaaactaagtctggtttacttaggaaatctcgaaaaaagattttggcttcttcactccaatgttttcctttagcaggtaagataccatataaaatacatggataactcagccttggcaaattcaaaagttcctcaggaacaactttaagatttataatttctgaataacgtatataaaaagaaaatccatagtcaaccaacacaagacataaagactgaggtgagacttcagaaatttctactctattccactgatcttccgatttatatttgaacaaacaactagaaccgggaattatgaactcctgaggcaatgtttgtaaggtctctggtagatcagaaagcaacataaaaaggtatttcattatgtcaaagaaatcttctaactgaatactgaagtctgatggatcagaaacagcagttgcaataccagaatactgcctatcattttggaattgaacccaagtaaatgattttattgtgcatgatgatacaggagtcttagattcaatgttgtaaacaatttctgcaagtctaagtttgttttcttcaacaggaactgtattcaaatttaagtattccaaaagtaacaggtcatctaccaaaatttctacttcccaaacagcatctaaatatttcaggaaaagaatatttatttccaaatcagcaaataagcactcaaatgatatgttcttagaattttcaaaccaaatccatttacaaggtacagcttgtctaggaatgtttcttatttcattactaagcagcttggtattacatacaggtactatttcatagataccacaatctactaaaaaaacaagtactttatcatcaacatacttttcttctacttttgatcgatgccatttcaaggtatttttagattttgccaagcattctaaacctttttcaatactttccattgataaaaaaggggattttttttcttctttcgtaattaatactattaaatctgataaaatttttttatttttggataacttcacataaaatcttccactttttgaaacattaagcatttcagctttttcaagttgtccaagtttgaattcttccaaaggaattttaaacagctgttggtttgaattcatagaaccttcagactcatttgattttcctttcttcatttcattatcacctggcctcaccttttgagagagaacctgaggcatctgcaatgctgacttctgcagttttgaacatgctttccatttcagtagttcattaatgacacatttttcatcacaaatcatatttacttcccatttctgatcatgctttttcaaaaattcacaataaactgttttgttatgtactttcgaagtaaaataatccacagttttgtcatcccatatttcatcaggctcattccattttactccactaagaaaagcatggattcctagctgaggaacagttaaaaattccctctgaagttcgtaaattttagatgtgtttactattgcagagttaccatagtcaataaattctacttcaaaagaatttcctggcaaaattttcttaataactgccctgtaaatggcattgtcaccagaatattctgcaactacaagatctcccactagaggtttaactgattttctctctctcaatctccttgctgttgcatttagagcatcagcaagtctgataattacactttcattctcagcaagctgaatatggaaattcgctggattactgatattagatacataccctttaactttggcattcaaataaatttgcggttgaggaaggtctttgatctgtggcctaataaggtcatatgggttttgtgaggttgtttgatttaatgctctgataaaagactgtgatacaacctttactgatttttggcccacacgcctgttctcaagaatatgtgcagctccagggacaatttttatacctttaagcccatcattcaaagaagtcttcattttgttttttgacacaggttccattttataacaaactgatggcttcaaaaacctggcatgtatatttttgggatgcatcaattggtctatttttctttcggaatatgttactggactaggtttatttatcacattatggcgatagttgtttcctgttttgcctttcaaagaagtagtaaatctcttattctcatttattttattactcttttccatgcagcatgcttggtcacaatgtctttttccataagcatgaagcaacactttaattttctcatttatatattgagatccatcatacaattctataccaagctgtccatctgactcctgggacaatattatcgcctttaatgatcttcccaagaaattgtctttaaaccaactactgatttctgctggaatatctacatccctaagatctgacaaaaaacacttaatagcttgcataggtgtaaacaacaactctggaaactgagctgaaatggccctcaacatattttctcctactaattgcttatttccaaagtctacaaaatagacttgaaactcagatgatgaatctgttggtattgctaaagctctgtatgagagaccatcctctacatacttagatatgcacactctcattttattagaatcatattttggaaaattttggaggttaacactctctgtgatttttgtttctatcatctctagatctttattatttctgccaagctggcaataaaacttttggggactatatatgtgagatatatatacttcttcttcacttccaatttgtatattaaaggaagaataacagtaactgtaaagactaaataaagatgggaatgtctctgataatgtgatatactgagcagagccacgattcataagaaattcttttgcactagtaaatgaggactgtaaatccactaagttatataaatggtttggatgtataataactaaggcatagatgatacaagtcaataaccctctagatgaagagataaaattccacaagtctctgaatgcttttcttgtccaactgaataatttacaactaacaggctcaataaaatggttaagacaacatctgaaggcttggctttctaacaagagaaaacgtgggttaattgcacaaagatcttcaattaaaacccttttttggtaaccataatcaacaaacactatgtcaacttcttttgatacttgagtcaaaacagcagctctacaccacttcccagaatacttagcaacacaagcagtctgcccaatctcataaggatcagaatgaatactatagtaattctgaatttgctccattagtaattttaggtcttctgacttacattggagctggcatgaaaagtcacctgggccataataacaggaacatttaacttcaagaactgttcctggtctaaaaatatattctttataaggccaggatgactcaggtcccacagacaaggtgaaaggatttttaaattctgagatattaacagctagggactttggcaaagacaagttattttccaccaggttatttgaatggtactttttagatttaggtccttcaagaagggcagatatgacttttttaatattaactttgtttttagattctgaatttagcattgaatattcacttacagattttggaaaatattctagttctacttgaaaatattctgcatatccagcttgtaacataagagagataacatcaatattttctgaggcttcaacactttgaatatttacagtgtacttgtcatctttttttgctataacctgaagcaaaattgctttgttcaaaactaattttttaaaataatcaattgcagccttagtccataaatcttcaacaggaaatatatgtgcaagtgaacagcacatcgctaaggcaggcaactcacaaaattctggaagcaaaatttttacatcaaaaaatggtatggaatcagtattaccataatccaaaaaataaacattaatcttataaccattaatttcagtgatgacagctctgtaaaaacgtctgtccttgctatatctagcacaacaaaataatccaggttcaggttttcttagaatcatttcatcgttttcacacaaatcataaaatttgtttatgtttttcattatttcttgaaattcattccgatggtcattagtgcgtacccagaaatttgatgggtttaatacatatgctataaaagctatgtaggcagcctctatctccatttgtactgttttaatgggaaaacctacttttaaaatgccttttttatttagagagtctattgaccattcaatatttcccataaaactctcaactgcaaagctgtttacatcagacacacttgtctcactcaagatattggagatttttgaatcagacatcggacaaagtacttgtgtgcctacagtcttcagtagacacttagaattaactgtagactcttgagtttgtaatgtcacataatacaaacactcatccttattgaaccaatcaatgtgtgcatataccacttgtcctaataaggcctgtttaaatatactcagttgaaatattcttgcatctctatctggactgtgcaaacatgtcagagaacatggaaatgaaaataatggtactaaaataaaatcctgtttaagtttctttacataaattgagggtatagcctcgctactgccataatccataaaccaaatttttacttgatttgggggcaagagctgctgaagaattcctctatgccactgtccatttcgccttctggcaacacaaagcagtccaaaattatcacacgtgggactagtttcttgacagacggtatcataatgcaaagtcatatgtgctgtcaagttttctagctctggagtccatttaattaactgacaataaaatttacttgggctcaatgcagatgatacctttacactttcagtacttcctactgacaaagatggctgcaacttatccagaacatgctgaatatcaagtgaagtatctttattacctaatgacaattcaggccttttatgttgtaataaatctggcatttgttgagggaattcttctaacatttccacaataagacgaaatgaatctccatcaacaagtcttcctaattgtaactcgagagcctgagatataatttttggcacatttttccccaactggtagtatattcgcaaaaataccaaatacaacccgtggcggtactcaaataaattgccacaggctgaagcaatctgtggaccagcaactcttagttcttctccgcgatctatgaggagcactgtatagagttcatttttcttttccatgactcttcctctctgccattctccagatactctttcttccaccaaacaaaattcatcaatttccacattatttttcacttttggagtatgttgtatttctctctgcaatacatggtagtcaaactcacattcattactctttatgccttgaaatttcaccagaatatccttgggaagacatttaatatgtgatattgtcagatccacatctaaaaatgttggtaagaaagatgtagaatccattttcccctcgtaatcccgcaggggccccagggagcatgtgcgggcttgaaggccgaatgcggcgggggaggcctgcagctgcgcaaagcgtcccgcctggcgctgtccctggcttcctgagggcggaagctgtgtgcggcctggtaagggtggtgcccactgggagttcttgaagctggcattaggctccaggtgggcagcctcacagccttgtctctcagggccaggccatggagagactctggacgggctctggagttgggcaacatggcttctcccctttctaggtcccgtggcagccatcttgctgctgctcactctttgggtccacactgcctttacgagctgtaacactcaccgcgaaggtctgcagcttcactcctgaagccagtgagaccacgaacccaccaggaggaacaaacaactccagatgtgctgccttaagagctgtaacactcaccgcgaaggtctgcagcttcagtcctaagccagcaagaccacgaacccaccagaaggaagaaactctgaacacatccaaacatcagaaggaacaaactctggacatgccgcctttaagaactgtgacactcaccacgagggtccgtggcttcattcttgaagtcagtgagaccaagaacccaccaattccagacacattttggcaaccacaaagggactatcacctattgccaagcggtgagactatcgccaagtggtgagaccatcgtctatcgctgagcagcaaaacaatcgcctatcgccaagcaaatcgaagccatcaagctacagatggtcttacaaatggaaccccaaatgagttcaactaacaacttctaccgaggacccctggaccgacccgctggcacttccactggcctagagagttcccccttggaggacactacaactgcagggccccttcttcacttctatccagcaggaagtagctagagcagtcatcggccaaattcccaacagcagttggggtgtcctgtttagaggggggattgagaggtggcagtgtgctggcagccctcgcagccctcgctcactcttggctcctcctcggccttggcgcccactctggccatgcttaaggagcccttcagcctgccactgcactgtgggaacactggccaaggccagagccagctcactcagcttgtggggaagtgtggagggagaggcgcaggcgggaactggggctcgatgcggcgcttgcgggccagcgtgagttccggtggttggtggcttggcgggccccagactcggagcggctggcctgccctgctggccccaggcagtgaggggcttagcacccaggccagcagctgtggatggtgcgctgagtctcccagcagtgctggcccaccccaccagcactgcactcgatttctcgccaggccttagctgcctccccgcaggcaggccttgggacctgcagcccaccatgcctgagtctcccctgctgccgccgtgggctcctgcgtggcccaagcctccccgacgagcactgccccctgctccccggtgcctggtcccatcgaccccaagggctgaggagtgcaggtgcatgctgcgggactggcaggcagctccacctgcggccccatgcaggaagccagctgggctcctgagtctggtggggacttggagaatttttatgtctagctaagggattgtaaatacaccaatcagcactctgtatctagctcaaggattgtaaatacaccaatcagcaccctgtgtctagctcagggtttgtcaatgcaccaatcggcactctgtatctagttaatctggtggggagttggagaatctttatgtctagctaagggattgtaaatacaccaatcagcactctgtatctagctcaaggtttgtaaacacaccaatcagaaccctgtgtctagctcagggtttgtgaatgcaccaatcagcactctgtatctagttaatctggtggggacttggagaatctttatgtctagctaagggattgtgaatgcaccaatcggcactctgtatctagctcaaggttgtaaatggaccaatcagcactctatgtctagctcagtgtttgtaaatacaccaatcgacactctatctagctaatctagtggggacgtggagaacttttgtgtctaactcagggattgtaaatgcaccaatcagaaccctgtcaaaatggaccaatagctctctgtaaaacagactgactttctgtaaaatggaccaatcagcaggatgtgggtggggccagataagagaagaaaagcaggctgcctgagccagcagtggcaacccgcttgggtccccttccacactgtggaagctttgttctttcgctctttgcaataaatcttgctgctgctcactctttgggtccacactgcctttatgagctgtaacactcaccgcgaaggtctgcagcttcatctgaagcagcgagacacgaacccaccaggaggaacaaacaactccgatgcgctgccttaagagctgtaacaccgcgaggtctcgagcttcactcctgagccagcaagaccacaaacccaccagaaggaagaaactcaggaaaacagccgaacatcagaaggaataaactctggacacaccacctttaagaactgtgacactcgctgcgagcgtctgtggcttcattcttgaagtcagtgagaccaagaacccaccagaaggaaccaattctggacacattttggtgaccacgaagggactattacctatcactaagcggggttgtttctgctgctgcgttggtgagcacaactactccaatcagcagggtccggggactgttgcaggttcttgggcaagaggtgtttctgctgctgcattgcagatcaaggcagaccttgggaagctttcagatgatcttgataggtatacagatgtcctacagggtcgagggcaaaccttctatctcacttggagagatgtcatgctagtgttagatcaaaccctggcctttaatgaaaagaatgtggctttagctgcagcccaagagtttggagatacctggtatcttagtccagtaaatgatagaatgacagttgaagaaagggacaaattccttactagtcagcaagccgtatgtcagaggtggcagtcttacactgccgaagccatcaaaaaggggaaggagaagggagaacggcagcataagcggctggcagaggcagggaaagaccagcagagagaaagaggcaaagtcaaagacagaaggaaagagaggaagagacaaaggagtcagagagaaagagatagaagtagtaaagaaaaaacagtgcaccctattcctttaaaagccagaatcaaggccatcaaactacagatggtcttacaaacggaaacccaaatgagctcaactaacaacttctaccgaggacccctggaccgacccactggccctttcactggcctagagagttcccctctggaggacactacaactgcagggccccttctttgcccctgtccagcaggaagtagctag

SEQ ID NO: 12202 - DNA, 471 bp, Homo sapiens
  SIMILAR (121)..(291): 1001254mologous to Homo sapiens unknown,accession number AF114263,Smith-Waterman Score=327.
  misc_feature (1)...(471): n = a,t,c or g
tgatgtcnnaggatgnnaancctaggggngcctagnnngtcnaganancaannnngggnngancacgcgtncgggggatgatgagacgaagttgacgctgcatgggttgcagcagtactacgtgaaactgaaggacgacgagaagaaccggaagctctttgaccttctggatgtccttgagttcaaccaggtggtgatctttgtgaagtctgtgcagcggtgcattgccttggcccagcagtttaaagattttcaacgacgaattcttgtggctaccaacctatttggccgaggcatggacatcgagcgggtgaacattgcttttaattatgacatgcctgaggattctgacacctacctgcatcgggtggccagagcaggccggtttggcaccaagggcttggctatcacatttgtgtccgatgagaatgatgccaagatcctcaatgatgtgcaggatcgctttgaggt

SEQ ID NO: 12203 - DNA, 4230 bp, Homo sapiens
  SIMILAR (247)..(291): 621254mologous to Homo sapiens Homo sapiens clone DN1120_2 secreted protein,accession number W29679,Smith-Waterman Score=64.
ttaaaaccaatgcccatcattctcctcctcctcattgtctagatagaggagggcaactttcttttcatctgaaatcaccgacctttggtctaccattctctggagctgcaccttcttatcaaacatggcctgctccttgccctgttctctgtgggcctggtctccttccccagcagaggccttaaagctcacaccaactgcctggtcattcctactgtccgcgtctctccaggaaccacggtcagacacaccgagagctcccgcttcctgtgtccggctgcggatcgcctctacgttactcacatccatctgaaaggtaaacgaagtttctttgggccctggtgcaatgtgccttagcgttctgctgctgtctgctaacttgcctagctcaggggagtccgctgaaccagcaagcacaaatgttctggacacgggtccacggatggcaatgtgttcagaggtttccgtttctgtaggacctagtcgaatgtgcctaaaggatctgctaacacccgatgtcatttctgcccctgatgtgtcctctgcactatcctcctggggagattcagaaacgacactttggaaggtgctcttttcagtcataacggtttgtctacccgaggtatgactgtgagtggcctggtgcacatctgctgagccctctccgtgcacagtgctctctgagtcaccagattcccccagttggggaaccagcccatggtaaactatctgctgggtggtctgatgcctctgaggcccaatgctgatgtgcctgatggatgtgctgctccctggcaacccttccatgtgtacagaatctcctatgacacccaactccaccttgtctgaaagtggagctgtgaactggatttgcccactgaacccttctttagggcctaactggagttgcctgacagaagtctgggtacccactgactcttctgttgcaaaataatcaccaaccttccctgcagcagaaatggggccctgaaaaataatctccttttcagcatgaaattgtctgcagccaaatgtgctgtgcctccctgatccgtccatatctgcagaagactctgctgggccaggttctggcgagccccatgcctctggacaggcaggggcagggcctaggaagatgacttctctggacagtggactttgaccgggacccagcgtgacatgcctcacagaccggctggctccggtcgggctcgctgcctgacttaggtcacctcccgcacttacctccaccacttctgcagtgggtccttcatatgacattcgctcagtcctccagacttcagaggggccgagttttatgtgccttgcagcctggctcacatcctccagcacctgtgactgggcaaagcctgtggggctgctgacctccacagtggccgacactgggccctggggagtgcgctgtcccgagctgtgagaggccccaccagcaacctcgctctcgcctgaagggatgtacagctcccgggtggcccaacgcctgaagcgaatgccagcagccggggcctccgctccaccttcctcatctgggctgccaggcgctgggctgcgttgcctgctcaggctctcccgaaccaccgactccacagccttctccatctcactggcctcatctttgctcagctcctccaggtctaaccgatcggcatccacagtttgtgagacgttgacttcagcaaccagggtcacggaactgccaccagcaccctggaccttcttgacatccacggaaacgctccccggcccaccctgcccctctctggtgagggcggacagctcctccctcatgcgctcgggaagggtttcctccagctgcccgatgacctccaccagctgctgccggggctccttggaggagatgcccttcatggaggtgtggaattcgtggggtattttaatttctttttcaatgactgtgggttcggcatgaaattcaccgcttctagcttgttctttccagtgagtggaacccaggtccccctccagagagggcgctgggacatccaagggcttcacaaccttctcgcccactgcaccgtccttctgtgtcctccttcgagtcccctgcacgatttcatcctgccaagagtacctgatggtggattcctcctcgatgtggatctgcccgtacaccgagccgtcatctctgtcgtgccccccggggtgttcatctggagtggacacaaaataactctgctcgccctctgaatcacctgcctctgtcacttcttccacgtgagtcgtgttctcctggggctgcttggtccttcgatgctgattaactgagaatgtgacatcgctttctccataaccttcctcctccttaaccaacccccaggggcctggcgacacatcttcgacctcctccactttgaatgggacggaaaactcctccggcttctccccgctgacataactcacgggctcctccacgatctccacgttgacgacctttgctctcccctccctccctttcaggccgaggttgatgatgtctcctatcatctgctcggctgacttgcctttcagccccacttccttaatatccttgcttaaaaggtagtccaggccagcttcatcggaaacatcaacatcctcagtcagtttagactccacaactatttcagtctttgttttcctttccccaggaagctctttcctgtccacgtaagtgacttttgtgtctggaaaagaatcagcagatgcttctgtctctggagactgggtgaactgcttcaggatactggtaacgatgttttctgctacggtttctgtcatggaatcgccttgcagagaaccagtggcatcactggtgcccaacctgaaccgtagctctcttgcttctgcctctctaccggtcccaccaccagcatccttcacaggcgtctgcaaacctttcggggacacctctgctcttctgtcctgggatacttctagactaatcggcacctctctctctcgcacgctcttctccttcggtgagtccttctccttagccttctccttcatctgctggctttctctctgtctcgcttccttatctaactttgtcaattcttcccatcttaggtttctctcctcggaagccttctctttagaatcgaacattttctcttctggctttgttcggatggtttctggtctgtttctttcttgctccctcgtggctttcacttctgttttctttcccagaatgacggtcctctcatttgaccgtgtgctttccgaagcacctgctgccaccttgtgtcggcgatcccggtacgactcgcgggcaattgtggaatcttcacctatgtaaacggggacctcccttgtatctccggcttttggtctgtcagggaatgttttcacttgagcctcagtatttcttaaaaggccgtaggttggagagaaagttctgacgttggtttgactgctgacggcttttccgtatgagttttcctgctgggtagtggccgaggaagaatatcccgagcccaagaagcctcttctggcatcacctccaatagatgtgcccgtctgagatccacggtgccctgacaggttagaatacagtgccgagctgtgattgaaacttgccaaaggtgctttctgccttgaaaatagattcctttcattttccctctgtagtagtgagtcggtatagtgataggatttgtttctgaattctgacggcatgttttcaacgtgctcagcccagatcactatctctggattactttctccttccaataaggccaccgtcgaagccacccccaacacagggcctgtggctgcatcctcgcttctgtaggatctggaccaggtcttcacatcggcagtgagagggtttggggcgctgcaggttctggacattgctagggttttcaccatctcatcatcaattatcatccgattattcacaagcacctgctttaccgactctgtgctagccaggggagttggtccccttcttaacctctccaggtttaatctgccacctgtgaaggagacaccactggagatgaccagactttgactcttctgccaaagcggtttccacagcttgctcacaccctccactgccacatgttccacaatccggtaggtcgccacctccagactgaggccggtcttcacctgcaggaggtcctgatagtcccgcagccagtcagccatggccaaggtgagggttgccttctcatcctccaggcagtcaatcactct

SEQ ID NO: 12204 - DNA, 1335 bp, Homo sapiens
  SIMILAR (1)..(273): 821254mologous to Rattus rattus rpl 26 (AA 1-145),accession number X14671,Smith-Waterman Score=383.
atggctgactggctgcgggactatcaggacctcctgcaggtgaagaccggcctcagtctggaggtggcgacctaccgaactccaacagaggagtcgcataattcaattttcatcttcacaagtccctctggctggcgagaggaggctggactgaaaggagacaaggacagcagtgccggcaagagaggagagtcgcatgggctggggaggcagtgcaaggctgagaaacggagggacctgcatgggatggcagcaaggaaggatgaagaggtgctgaagaagaactgcctgcatatcgtcgtggggactccaggccgtatcctagccctggctggaaataagagcctcaacctcaaacacataaaacactttatttcaaatgaatgtgataagacgtttgaacagctcaacatgtgtcgggatgtccagggaatttttcgcatgaccccaccggctaccttgagcaaagagatccgtccagtctgccacaagttcatgcaagatccagtggagatcttcgtggataatgagatgaagttgatgctgcatgggttgcagcagtactacatgaaactgaaggacaaccagaagaactggaagcgctatgaccttctgaatgtccttgagttcaaccaggtgatgatctttttgaagtctgtgcagcggcgcattgcctcagcccagctactgggaatggacattgagcgggtgaacattgcttttaattatgacatgcctgaggattctgacacctacctgcattgggtggccagagccagccggtttggcaccaagagcttggctatcacatttgtgtctgacgagaatgatgccaagatcctcaaagacatgcaggatcgctttgaggtcaatcgtagtgatctgcctgatgagagagacatcttctcctgctttgaaaagacatgggggtgtgtgccacagcaggatgagcccttggaggtgatggcggtttctgtcaaaggcacagttccaggattcggccctgccgagtgggtcactgacaagaaaattcacctggaggccaaattgtctctaataacaagtccaagacatgcattccagctggaatcctcttcccggatgattcttgcccttggaacttgggcaccatgccgtgaggagcccacagccatatggaaaacctacatgttgtttggaccaacaggtccagctaagatctcagcagccagccagcaccaatcaccagacatggttccttctacttttgccatgaccttcgtccactgtgtgttcaggcagtgtggggcaccagagaggctgtggctgaagttctcagatcgtcacatcctgtga

SEQ ID NO: 12205 - DNA, 1479 bp, Homo sapiens
  SIMILAR (34)..(480): 711254mologous to Homo sapiens ribosomal protein L26 homolog,accession number AF083248,Smith-Waterman Score=481.
ccgccatacgcgctctccctgtttagttatggcagagaacgatgtggacaatgagctcttggactatgaagatgatgaggtggagacagcagctgggggagatggggctgaggcccctgccaagaaggatgtcaagggctcctatgtctccatccacagctctggctttcgtgacttcctgctcaagccagagttgctccgggccattgtcgactgtggctttgagcatccgtcagaagtccagcatgagtgcatccctcaggccattctgggaatggatgtcctgtgccaggccaagtcgggcatgggaaagacagcagtgtttgtcttggccacactgcaacagctggagccagttactgggcaggtgtctgtgctggtgatgtgtcacactcgggagttggcttttcagatcagcaaggaatatgagcgcttctctaaatacatgcccaatgtcaaggttgctgtttttttttggtggtctgtctatcaagaaggatgaagaggtgctgaagaagaactgcccgcatatcgtcgtggggactccaggccgtatcctagccctggctcgaaataagagcctcaacctcaaacacattaaacactttattttggatgaatgtgataagatgcttgaacagctcgacatgcgtcgggatgtccaggaaatttttcgcatgaccccccacgagaagcaggtcatgatgttcagtgctaccttgagcaaagagatccgtccagtctgccgcaagttcatgcaagatccaatggagatcttcgtggatgatgagacgaagttgacgctgcatgggttgcagcagtactacgtgaaactgaaggacaacgagaagaaccggaagctctttgaccttctggatgtccttgagttcaaccaggtggtgatctttgtgaagtctgtgcagcggtgcattgccttggcccagctactagtggagcagaacttcccagccattgccatccaccgtgggatgccccaggaggagaggctttctcggtatcagcagtttaaagattttcaacgacgaattcttgtggctaccaacctatttggccgaggcatggacatcgagcgggtgaacattgcttttaattatgacatgcctgaggattctgacacctacctgcatcgggtggccagagcaggccggtttggcaccaagggcttggctatcacatttgtgtccgatgagaatgatgccaagatcctcaatgatgtgcaggatcgctttgaggtcaatattagtgagctgcctgatgagatagacatctcctcctacattgaacagacacggtagaagactcgcccattttggaatgtgaccgtctgtccttcaggagaggacaccagggtgggggtgaaggagacactactgcccccacccctgacagcccccaccccatggcttccatcttttgcatcaccaccactcctgaacccccatttttgatttgtcagaa

SEQ ID NO: 12206 - DNA, 580 bp, Homo sapiens
  SIMILAR (217)..(149): 691254mologous to human herpesvirus 1 UL16,accession number D10879,Smith-Waterman Score=64.
atgatagcaagtccctatgaagtggacccattttctgtcttggttcttaacatcagcctactggggtgtgagattgggactatttggggaacacgcaaaagggggaaccctgaaacagaacccacagtactgccaaattctcatagctgtgaatcccatggagagacagctgtggatgacagacttctctggaatccttctcccaacagtttgcaggccaaaatcctgagcatgatggaagacaataagcagctcgcgctccgcatcgatggggcggtccagtcggccagccaggaggtgaccaacctgcgagccgaactcacggccaccaaccggagactggcggaactgagcggcggcggcggccccggcccgggcccgggagccgcggccagcgcctcggcggcgggggactcggcggcgacgaacatggagaacccccagcttggagcgcaagctgctacacagatctgtgccgcagatcccagcagaacctttgtgtgccatcaactcatcctttctgtgccctcaaataacttaaattctgaaacagacaagctggaaacagaggagtcctctg

SEQ ID NO: 12207 - DNA, 742 bp, Homo sapiens
  SIMILAR (2)..(709): 1001254mologous to Homo sapiens dJ21O18.2 (protein similar to collagen),accession number AL035405,Smith-Waterman Score=1225.
ggagagcgaggatgcggtcaaagcgctggccaaggagaaggacctgctggagcgtgagaagtgggagctgcggcgccaagccaaggaggccacagaccacgccacggcactgcgctcccagctggacctcaaggacaaccggatgaaggagctggaggccgagctggccatggccaaacagtccttagctacgctgaccaaggacgtccccaagcggcattccctcgccatgccgggcgagacggtgctcaatggcaaccaggagtgggtggtgcaggcggacctcccgctgaccgcagccatccggcagagtcaacagactctctaccactcacacccccctcaccctgcggaccggcaagcggtcagggtgagcccctgccactcccggcagccctctgtcatctccgacgcatctgccgccgaaggcgaccggtcgtccacaccgagcgacatcaactcccctcgacaccggacacactccctctgcaacggcgacagtcccggcccagttcagaagaacctgcacaaccctattgtacagtcactagaggatcttgaagaccaaaaacggaaaaagaagaaagagaagatgggattcggctccatctcccgcgtcttcgccagagggaagcagcggaagtccctcgaccccggcctctttgatggtaccgcccctgattattacatagaggaggacgcggactggtgatacgcgctcccctgcgcctgctgcccgcag

SEQ ID NO: 12208 - DNA, 6422 bp, Homo sapiens
  SIMILAR (220)..(663): 321254mologous to Homo sapiens dJ8B1.2 (KIAA0879 protein),accession number AL035701,Smith-Waterman Score=187.
gcgcccgcccgccggggtctcggcgatcgctgctcctcctcctccttctcctcctcttttttctcctccgcctcctccccccgccgcctcgccaccgccgcggctagggctggaggcgccgctgtcattcctgtgccggaggaaccggcgctgccggtgcctgggggtcggggcgcgggcgaagccgggccgcggaggacacaacaggtagagccgggggtgcccggccgcgcgccccccgcgcatcatgcagctctttgtcacctctctcgcccccaggccaaaatcctgagcatgatggaagacaataagcagctcgcgctccgcatcgatggggcggtccagtcggccagccaggaggtgaccaacctgcgagccgaactcacggccaccaaccggagactggcggaactgagcggcggcggcggccccggcccgggcccgggagccgcggccagcgcctcggcggcgggggactcggcggcgacgaacatggagaacccccagcttggagcgcaagtgctcctgcgggaagaagtgtcgcggctccaggaggaagttcaccttctccggcagatgaaggagatgttggcgaaggacctggaggagtcgcagggcggcaagtcctctgaggtcctctcggccaccgagctcagggtccagctggcccagaaggagcaggagctagccagagccaaagaagccttgcaggccatgaaagctgatcggaagcgcttaaagggcgagaagacagacctggtgagccagatgcagcagctgtatgccacactggagagccgcgaggagcagctccgagacttcatccgcaactatgagcagcaccgcaaggagagcgaggatgcggtcaaagcgctggccaaggagaaggacctgctggagcgtgagaagtgggagctgcggcgccaagccaaggaggccacagaccacgccacggcactgcgctcccagctggacctcaaggacaaccggatgaaggagctggaggccgagctggccatggccaaacagtccttagctacgctgaccaaggacgtccccaagcggcattccctcgccatgccgggcgagacggtgctcaatggcaaccaggagtgggtggtgcaggcggacctcccgctgaccgcagccatccggcagagtcaacagactctctaccactcacacccccctcaccctgcggaccggcaagcggtcagggtgagcccctgccactcccggcagccctctgtcatctccgacgcatctgccgccgaaggcgaccggtcgtccacaccgagcgacatcaactcccctcgacaccggacacactccctctgcaacgtaaggccagcagcagcggggcctgggcccctgggccctgcccagaaactgcaggggcgggggtggcggggtgaagccatactcgctgtttcctctcgtccacccagggagcactctggcgaatgcatttcctgttctgttctttccttttgcaagaagcgatggatgtggggagaaaaaggaatgaggcccgtttgctccttgtgtccgggagggtgaggagaatccagaggaagcgggcctgggtcggccgcaggcacagcctggaactctgccccagtgggccctgtctgggaccgtgggcttctcctcccacacattaccttccagagctcagggcctccccagcacctcctcatttccctttagagccagctctctatcctgacccaggagtcttggcatgaattgcctctggagaggcttgtgaatatggtctaagtttgtttcctttgtttatttcatcaaacactttttgattgcatactgggcaccagctcccaggaggcaaaggccctagctgcctagctcttgatgactagtggggcagacagatgggctctgcaacagtgtgggagtaaattgaaggtgggttgagcttctgaggacagttggaagccatgtcgaggctctaacatgaaatattggggtctgggtgtggggaccaccttgaatttttgttttatcacacagttggtaatgcagaggctcccctctgccatatcctgaagacagacatcatagggttagatcctcaaatgcacgagacggctttttccaaaactcagttaatgtcactttattaaccagcgaaatagataataaaaaagaaatgaggtgaacacattggacaaaaccattacttgccagtgacatgattctctacctggagaactcaagagaataacttgaaaagctattagaatgaataataagcatgtacataacagtgttgcttggaaatcagtgtgtaaaaatcaatcactttcctatagatgagtcgtaattatggaaccatttttttcaatccacaataatgaaaagtgcttataaaaatagctaagagtaaacttcagagaagctgcctcagtctgctcaggtgggcggcagagattgctggcccggggactttagatggcctcctcagagtaggaaggtcatttgcagcctggggccctgctcaggcctgggattctcttttttattgttttattttatttatttgtatgtgtgtgtgatggagtttcactcttgtcacccaggatggagtgcagtgacgcagtctcagctcactgcaaccaacaccttccaggctcaaacaattctcctgcctcagcctcccgagcagctggcattacagatgcctgccatcacacccggctaatttttgtatttttagtagagatgagatttcaccatgttggccaggctggtcttcaactcctgacctcaggcgatctgcccacctcagtctcccaaagtgctgggattatagacatgagccactgcacctggcgggattctctgttttatactggtgctttgaggaagcagtatgttcttctcttgtccccagaagagaatcctagtgacaaagtctatcttgactaacagaaccaaggcaaggaaggtgggccactggaggggtctctgacatccattccctgatcctgaaggaccactgtggagttatacctacagccagcagtgtccctgcaccattctcatcccagttgagaataccttccccccacggccatattttgtcttctcgtggtgggcccatggggactctggcagcagaaatgctgctggaaaaaccccattctgcagaaggagttctccaaaggcctcttgaattgcatttgacccagccctagtcttttgcccaccatagccttggcacattcctgctgccaggaaatgggtgctttgataagccagttgtctgcatacaggcgtttcagtgagcaggccccattctctttacccatagatttggcaaagatgttcctatccagagtggaactatcttagctgccttcagaatggattctgtttgcaaaccttgagactaaagactaaactaccattcattaattccctcacttcctcaaccctttttatccccccatctcaacaggtgtgcatgcaggtaagccaggaagagcccaaaaatagctacaggtaaccctttgccttgggcatctgacgtccaccagcaagaatagtgcagcctggactaatgactgcctcatcctctcacactctggccactaatttagagcaaaagtaggaactcagcatagagaggttggagaaggttgacggaccttggcattatgcttgcaattccagaaataaccaccaggagtctccctagtaatgactgttttgatccaaaggatctgtgggctccagacagggcagactgattctgggatgtagtgaaggcttttgtacacctgtaggctattaagggttccctccacacccacgtaaggcagggctggcaacacaatggaaatgtcctacctgcccatcctagggacctgtcgtctgaggctccctaggaaaaagggaaggagttcagacccctcctggggcagcccaaagctcaggaccaagtatgcagttaccctggagctcctgcctggaaggagcactgtgccaggaggaatctgacagcccccaattggagctgtagctctgcatccaattagctccacggtagtggactgtctgctgcctctcttgatatctgtgaatagggctaacgagtcctgcctgcccctgcgcaaactaagagattcattgtgtcggttgtgggggaagctagaggctacgtggtctcccaagtttgtttctgtcccaaaattctctattttgtgctttttctataaaagtacatttctttatgaaaagcaccaagtctaaccaagctctagctctaactcagaggacagactgggacaggaacttagacgccctggagtggctaatttgttggtcagaagatgctgggggttgagaggccagactgggcaggagaggaccccaggaactctagggaaactccaggccccatcaataagccatctgggggtatctgcttcaggagatggggggtgggctccccactgcagaggcagggtggccccctgagagatggcatccttccacggaaggccccacaccgcacgggccgcctctgctctcctgtgtcacctgtctctgctgtttcatcttcctcttctcctctggctacagggcgacagtcccggcccagttcagaagaacctgcacaaccctattgtacagtcactagaggatcttgaagaccaaaaacggaaaaagaagaaagagaagatgggattcggctccatctcccgcgtcttcgccagagggaagcagcggaagtccctcgaccccggcctctttgatggtaccgcccctgattattacatagaggaggacgcggactggtgatacgcgctcccctgcgcctgctgcccgcaggcgtgtctgtgcgtgtgggcgtgtgtgcaagcgagcgtgggtgcgcgtgtggccgtgcgtggggtgcgtgtgcacgtgtgcgctggcacacatgggtgctgggtgtggccgagcgcctctaacaaagcgaaaacacgagtgtgaacctctctcccctgcgtcgcaacctctgtaaattgatgtacataccgcaaaccgtgtgtgaacctgtcaacttctctgtccgtctttggagcgatacagttgtgttgttaatctggtttattatttttcttcagtgtttggtttttctttttctttttgtttggttcgtcggtttgtttttgtttttgtttttttccccctttctcctcccctcctcctttttatgaaacttgaaaaacttgaaggactgctgtgtaatttggtaaattaaccaaaacttatttgtcactctgtgctttgtaaatgtccctcgtccaaaccgctactccttggagccccgtctggcagaggatgaggtctgtttttgatgtcccccctcccgcccccctggtgtgaacgtgagggagcagaccctgtcctgggggtgcgcccacgtcactttaaccacaaaacgccatcgtcgtcagggtaagctctgctctctacaaagactcgcgagccgggccaaggggccttgtcttggctgggtttgtcagaggtcaaaccggctcttttaaacggcctaccagtttttaaattgcattgccgtttctttctttatgaaaaaaaagaaaaaaagaacattgtttcatttaatttatttgcacaaatgctgaaaacttattctatctaaattattacataaatattggaatgtctatttttccatggggtgggcgggaggtggatgtctctgttgacttgtctgttctggaaccatgctgctacccaactgtgcaaagtagtttagggcggccagaacccatggaccattggatttcaaagcttgctttttctgttggttcttctctctccttctctctctgtctctcccattctcctgcccatgcatgaaaggatcctccaccttcttcccacccagagctccctccagggcctttctctatatatttatttatctgacatacagaacacgactttagtgaggcagagtgctggacagtcatgggtccccttctttggggtctgtcttttgaggagaggttgagttcaggggcaagacaggcctggccacacattccaaggggtacggaccagtgggaccctggcctgagtctgttctccgaggggcctccagcagcttctgttcctccctgcagctgtgtctttcttgtcctggggtttaggatgcaggtgggccaggcaggtgttgttaggggaggcacccactttcaaaaggagggccacagtggggacacagagtccagcacctgagccctccaccctccccattctgagtggattcatcagccacacttataatctgtcaggatcccttggactccgtcccccaacttgtcacagcagcctgagcctacccaccccatgagacaagagctggcaggaacatctgccta

SEQ ID NO: 12209 - DNA, 4074 bp, Homo sapiens
  SIMILAR (220)..(492): 821254mologous to Homo sapiens RNA polymerase II 23kD subunit,accession number J04965,Smith-Waterman Score=367.
tcagtcagaatggaaacagccatgcccttcgcgaatcccgtcgcggcctctgggaaccgagctcctcgtcttccttcctggagggcctccttggtaggcaaaatgggtctggacgggcccgattcggggctgtgtttttcctcccaggcgaatcccagagctggtttctgggtggctgtgcaatgccaggaagccgacggcatctttcgggccttggcatggagccaggctgggagcggatgaaagcgccccgcaggagccggcagagctgtctggttggaggaaagtttctgcacgatgggaatgaccctggagttctggggaacttggtgagatcaggaccttcccccagcagtgccccccaggtgcctgacgtactgttgtgctgttggtggtattattaccacctcgggccatgcgatgacccttttgcttataagtcattacgggctgctgaatgaccgatgagatgcagccgggaggctctggccggctccggaatgataatggccggcgggtgctttgtatgcgcgaccagcaggcctctgtgccgggcactgtggcgctgccgttggggccggcagacctgcggtcctgcctctccaagcagggcagggagtgggaatgccggacaaaatccgagtgtgaatttctaacagctctactgagatgtgattcacacagcacgccacccagccacggaagcacgcagctcgaggggcctttgccgtattcgcagggctgtgcgaacgtcttcactgtcgatttttgttgttgctcttccccaagccacacggtgtgagaacggcttctgcgcgtgtgcctggcattggggtcagcagggactgcagatgatgtaaagttacaccctgtttcatgtgcggacaccgcacgctccacaccagggacctcagcaccctccacatcagggacctcagcacccttcacaccagggacctcagcaccctccacaccagggacctcagcaccctccacaccagggacctcagcaccctccacaccagggacctcagcaccctccacaccggggacctcagcaccctccacaccggggacctcagcatcctccaagccggggacctcagcaccctccaagccacggatctcagcaccctccacatcggggacctcagcaccctccaagccggggaccttagcaccctccaagccagggacctcagcaccatctaagccagggacctcagcaccctccacaccagggacctcagcatcctccaagccagggacctcagcaccctccacacctgggacctcagcaccctccaagccagggacctcagcaccctccacgtcggggacctcagcaccctccaagccggggacctcagcaccctccaagccacggacctcagcaccctccacacctgggacctcagcaccctccaagccagggacctcagcaccctccacatcggggacctcagcaccctccaagcgggggaccttagcaccctccaagccagggacctcagcaccctctaagccagggacctcagcaccctccacacctgggacctcagcaccctccaagccagggacctcagcaccctccacaccagggacctcagcatcctccaagccagggacctcagcaccctccacacctgggacctcagcaccctccaagccagggacctcagcatcctccaagccagggacctcagcaccctctacgccggggacctcagcaccctccaagccggggacctcagcaccctccacacctgggacctcagcaccctccacaccggggacctcagcaccctccacgccggggacctcagcatcctccaagccagggacctcagcaccctccacacctgggacctcagcaccctccacacctgggacctcagcaccctccacaccggggacctcagcaccctccacgccggggacctcagcatcctccaagccggggacctcagcaccctccacacctgggacctcagcaccctccaagccagggacctcagcaccctccacgccagggacctcagcatcctccaagccagggacctcagcaccctccacacctgggacctcagcaccctccaagccggggacctcagcaccctccaagccagggacctcagcaccctccacgccggggacctcagcaccctccaagccacggatctcagcaccctccacaccggggacctcagcaccctccaagccagggacctcagcaccctccaagccagggacctcagcaccctccacaccagggacctcagcaccctccacatcagggacctcagcaccctccacaccagggacctcagcaccctccacaccagggacctcagcaccctccaagccagggacctcagcaccctccaagccgtggacctcagcatcctccacaccggggacctcagcaccctccacgccagggacctcagcaccctccaagccagggacctcagcaccctccacacctgggacctcagcaccctccacgccggggacctcagcaccctccaagccggggacctcagcaccctccacacctgggacctcagcatcctccaagccagggacctcagcaccctccacgcctgggacctcagcaccctccacaccggggacctcagcaccctccacacctgggacctcagcaccctccaagccagggacctcagcaccctccacacctgggacctcagcatcctccaagccggggacctcagcaccctccacacctgggacctcagcatcctccaagccagggacctcagcaccctccaagccagggacctcagcaccctccaagccagggacctcagcaccctccaagccagggacctcagcatcctccacgccggggacctcagcaccctccaagccggggacctcagcaccctccacgcctgggacctcagcaccctccacgccggggacctcagcaccctccaagccggggacctcagcaccctccaagccggggacctcagcaccctccacaccggggacctcagcatcctccacaccggggacctcagcaccctccacacctgggacctcagcaccctccaagccggggacctcagcaccctccaagccggggacctcagcaccctccacaccggggacctcagcaccctccacaccggggacctcagcaccctccaagccggggacctcagcaccctccacaccggggacctcagcaccctccaagccggggacctcagcatcctccacacctgggacctcagcaccctccaagccggggacctcagcaccctccacaccagggacctcagcaccctccaagccggggacctcagcaccctccacacctgggacctcagcaccctccaagccggggacctcagcaccctccacgccggggacctcagcaccctccaagccggggacctcagcaccctccaagccggggacctcagcaccctccaagccggggacctcagcaccctccaagccggggacctcagcacccgcggaccctggtgtcctctgtgacgggacaatgtcacctatcgggtggtgcccgctcctctcccggggcccagccacatgggtgccaggagccccaaccccgacttctctggaggggccgtaactccaaccagcaaaggcctttcttactggaagctgcggcgtcttgctgtgacctcgaaacccccggcaagggtcacggcggggtgagggctgcaggcctttgctcccgagttccccgtgggccttgggaacagacgccttggaagcaaattccgggaactcccagctcccgggctcaggggtgagaggggggtctccagggggtctcgacagcatagcccgggttttcttcacccctccctgtgcaccaggaccgcacagagctgccagggagctgcagatgcccccagagaatcgtccttgtgcccggtagcacccaaagggtttgttattctggggcccgagggcacagccagaacgggtcctgagggcccgacggggagttctcgaccgtgtcccggccaaacccagcgcctccagacaccagcaaaacagccacat

SEQ ID NO: 12210 - DNA, 600 bp, Homo sapiens
  SIMILAR (99)..(230): 811254mologous to Chironomus tentans ribosomal YL10 protein homologue,accession number X68332,Smith-Waterman Score=208.
atgtccggcaaaggcaggatcaggccgtgccacgcggccgccggcctcaccccagtgccctccacgctgggcggcaaggagggcggccgcgagcccacccggacccccgagcggcaggggcagcccgtcgtgccaccaggcgtcagcaggcttcagtcagaatggaaacagccatgcccttcgcgaatcccgtcgcggcctctgggaaccgagctcctcgtcttccttcctggagggcctccttggaacccaaattcgaaagacagccgcatctacaattttaacacggtggcctggagagcattgcctctgatctcagccgaacagaatgccctgttcagccccaaaaggggaaatggcattggtgatccaccctggattctgataggctggaaaagcccctctggtcttcctgggacagaagcggccttaggagcaggttatcggtgtgggctgagattcggggacccgctggtctgctgtggcgttgggccacagtcagaggaccatcaagtccggggtgtcatggacccggggtcctggcctgctgtctggaccccagtcttgcctccccaacccaggacggaggacctttcttga

SEQ ID NO: 12211 - DNA, 763 bp, Homo sapiens
  SIMILAR (100)..(216): 791254mologous to Homo sapiens Human secreted protein, SEQ ID NO: 6908,accession number G02827,Smith-Waterman Score=171.
aacctcgtctttattaaataacaaaataagccagccttggttgcgcgcctttagtcccgactactcggagctggagcaagagaatcgttgaatcccagagaccgaagttgcagtcagccgagactggctccactgttatggaagccttacctgggcatgccccccgctgacaactgtgaaaagccatggaacagccccgccccatcccctgctgcatgagccctcacctacctctgaccttcctccttccatgaccctgctgccaggggggcttcccaaaaaagatcttgagtcttagcgatgtggtcgacacgcagagaacttggagcctcatgccagggccccctcccggagattcctggcgcccatgtctccttggggggtgactgaaggggatgggtccagactcacttgatcaacaggacatgggcctgcagcttcctgatggaatgcgcacacagctccctgctgacgaagtcaatgctgttctctgcctgcagagacaaaaacatggtgaattctcgtcacaaggcacaggcactctcgtgggcacgaaacccatctctgttggggtggctaagtcctggcgagggcaccttagccacccaccctgggtctgagcccaggaccccacatcactgcctcatcgaaggctctttagcccctggtggccagagactcctgccctctccaagtctgttctcccttcttcctgggctcgtggctacccagcctgactccatttcccatactcctttgccac

SEQ ID NO: 12212 - DNA, 416 bp, Homo sapiens
  SIMILAR (442)..(660): 571254mologous to Mus musculus reverse transcriptase,accession number U15647,Smith-Waterman Score=210.
tcccgggacgacgatttcgtggggactgctggagttgcggggcctgcctgttttatttttgggcaggacagcttggagatagggcccggagttgcgggcgtcactctgctcctgcgacctaaccaggcgtgagggagtgacagcagcgcattcgcgggacgagagcgatgagtgagaacgccgcaccaggtctgatttcagaactgaagctggctgtgccctggggccacatcgcagccaaagcctggggctccctgcagggccctccagttctctgcctgcacggctggctggacaatgccagcttccttcgacagactcattccctcttcttcccgcaagacttttattaacgttgccatgggattttcggaggtcattgggcttttgtcccattaacagcccaggtgacccag

SEQ ID NO: 12213 - DNA, 1128 bp, Homo sapiens
  SIMILAR (106)..(462): 751254mologous to Homo sapiens ORF1; putative,accession number M19503,Smith-Waterman Score=460.
gaactatgccttaaaagaagggtatgatttcaatggtaaaggcaaaggggaactgtgttctgggctgaaggagcagtgtaagcaaagatacagaagtgtgaaaactgggggcaggtgcatagaatgagcagcccaaggctccctgcagggccctccagttctctgcctgcacggctggctggacaatgccagctccttcgacagactcatccctcttctcccgcaaggtgtgaggctggggctgaagggaaggccagggggaaagtgggcaggaaggtgaggggggggtgtcccatattacctccagacttttgtgagtgagatccgaagagttgtggcaggtaagaaacagagtgtgtattttcggcggtgtggggggtgctctagggcaccccctcttgggtggagtggggaggggagggcctcccaggagccctcgcacgtgttcagcctgaagcagctgctgcagaggtgggtgcccggtgtggacggggagctggtggggtccaggggaggacatcccgtgagacgaaccacgaaggtggccacaggtaagggactctactgtccaaggccattttatatttgtcactattcttaccgaggatgtcttccctttataaagtgctgagtgaggcagggggtcagaaaccccgccaaggtttgcctgttagcgtctttgtcgttgcaggcccatgtcctgttgatcaagtaagtctggacccatccccttcagccacccgccaaggagacatgggcgccaggaatcttcatgatagacacgatgaaatccaccctcaaagaggtaagacggggctcaggcagctggtgtccagccactgtcgcccactctggtcccacctccgggaacactgaccctggggcctctgcaggtttcttggcattgtcacaaagggaagaagcccacctgtggctggccggctgccaggtcagagccaaggcaggcaaggccttcctgtctggcttttttttttttttttttgagatcgtggccagtatcatcagctccttcttacagtgcacacacatgctcccagcccagctgtagctctgggcctggaactatgaagacctagtgctcccagactcaacactgggactctgagt

SEQ ID NO: 12214 - DNA, 600 bp, Homo sapiens
  SIMILAR (1)..(87): 931254mologous to Homo sapiens Human secreted protein sequence encoded by gene 2 SEQ ID NO:250,accession number Y91577,Smith-Waterman Score=150.
  misc_feature (1)...(600): n = a,t,c or g
atgtcctgttgatcaaagcagtccacggatattttgattcaagacagaattactctgagaaggagtccctgtcgttcatgatagacacgatgaaatccaccctcaaagagcagttccagtttgtggaagtcccaggcaatccactgtgtccacatgagcgaaccccaagcaccgtggccagtatcatcagctccttctttacagcgcnacaacaccatgctcccccagcccagctgtagctctgggcctggaactatgaagacctagtgctcccagactcaacactgggactcttgagttcctgagccccacaacaaggccagggatggtggggacaggcctcactagtcttgaggcccagcctaggatggtagtcaggggaaggagcgagattccaacttcaacatctgtgacctcaagggggagacagagtctgggttccagggctgctttctcctggctaataataaatatccagccagctggaggaaggaagggcgggctgggcccacctagcctttccctgctgcccaactggatggagaatacaagaaccttttattctcactgcttttgaggctttttcgttgccagcaaggg

SEQ ID NO: 12215 - DNA, 622 bp, Homo sapiens
  SIMILAR (206)..(72): 441254mologous to Homo sapiens Human secreted protein fragment encoded from gene 15,accession number Y07866,Smith- Waterman Score=74.
ccttttttggaacgccccggtccggaattcccgggtcgacccacgcgtccgctggaaccctctgggcagcctagctgaatgcaggatccccctcgccccagagaactccttttccaggagaccaaggtgggtcccagaatctgcaagttcagtaatagccccaggtgattctcatgcaggcaggtgagacctgcactttgagatccaggtgctactcgaagccctgcgggggctttgttcactgtacccaaagcatcgtgaaggttccttgaaggtacatccagggcatctgtgctggatgcccaccgtgacccggcctggcactccaccttcacaggccagcacaggagcccaagagctcccgggaggagaaaaaaagacctgccgctgggagaagaaaaaaaagacctttcccgggtctgcaggactcacaggtaaatccattgagagacttacccggccagccttgtacttgagaccgctgctgttctcctcctttcctgtccgcgtgacgctggaggccctgccagggggcgttccaaaacgctcagcctcccggatgcctgtggagatgaagagaggaccattttgagtcagcaggggaggctcagtcagcacgaaa

SEQ ID NO: 12216 - DNA, 1303 bp, Homo sapiens
  SIMILAR (10)..(726): 591254mologous to Homo sapiens Human secreted protein cw976_1,accession number W69430,Smith-Waterman Score=570.
  misc_feature (1)...(1303): n = a,t,c or g
agctggccggggnnnaattgaaatcgatagccntatgcagngngcnggaattccatccctgttcagtgacgtcaagcttttgggtccctgtcctggggccctccacgctggccgggctgtgtagagacgcccttctctccactttattgggtccagattgttgtgtggcttctcccctcctctgcagcctggggtctgaaaacagcgatgccaacagacagacagatttccaaaagaaaggtccggctcagccaaggacaaaggggcctcgcagaggctcctgggggtcagaaagctgagagtctaaccaggcaggtgccttctccacccacaggcacaagctacaacagctttccaagaagtgcatccacatcgtccccaggtccagatgcccacatcgccctgcagggaccaagaccaccatcgggcttgcttgaacaggatgtagctggtcactgttctggagctggcccctctgtagcctgtgacaatcagcttgagtctctctgccaagtctccgccttctgttcttcttgccgaccttgaagcagagttgacgtttcaggtttttccagcagacaaagctcactcaatctgatactgtggaggttgttaatttaacaaccaacccatcctcatgttgagaaaccagctccaaatgctcacctggctgtcagggatggggagcctcatgggtgaaagagggttgtgatggcataatttaaaccaaaagaggcattcgcggttgcccgtgttgcctcaggcctgctggcctcctgctgtgaacattttgggcaataccgtctctgccagtgacccccaattgtccacttgtctccagcaagatcgaaccatgtaagtgccatttctgacaagttgggtgaacgttggtttcaaatcatcagctctgcattcaagtgccctgctacaattctggctcactctgtgggaataactgcctgcctgggcacgttgctgttgctgcctcccaaacggcagtttctggggtcccaggtcatccaggctggatgtggcttgggagagacctgtggcaccaggttggagggaggtctcacctctcctttctgagctgtggactgcagcttcaggaccctatggatgaggccgaatgtcatgaagataatggaatttggagtctcaacaaagccaagccacatgccagagattcaccacctggggcccaggatcagaagtgtgcccttaggaggccaaacatccacctgtctaccaactagacatttggtctcagacagcaagaaaggctgcgtttatgtcattaggg

SEQ ID NO: 12217 - DNA, 1614 bp, Homo sapiens
  SIMILAR (1)..(492): 981254mologous to Escherichia coli K12 orf, hypothetical protein,accession number AE000509,Smith-Waterman Score=813.
atgccatttgagcagcaagtaccagggtgctccaaactcttcggaggaataagaaaagttattccagaaggaaggtctgaggtacaagaagacatgatgaacaaagaaattggtaaacatgaaggatgccgtgtttcagtgcctgttccaatccctatagaatttggagtcctgtgcctgatccaaaagacttccctgcaagccatgccggtccgtgggagccgggcaccagcactggctgccggcctgcaccccggcctgacagccctgtcacctggcaggaagcatggcctgcacttgtgtgttgcagactcggacagccagtgcagccccacgcggcagagcctcagcctgtcggaaggcgaggagcagatggaccggctgcagcaggtggagctggtgaggaccacccctatgtcccactggaaggcgggcaccgtccaggcctggctggaggtggtgatggccatgcctatgtacgtcaaggcctgcacggagaacgtgaagagcgggaaggtgctgctgagcctgagtgacgaggacctgcagctgggccttggggtgtgcagctccctgcaccggcgcaagctgcgcctggccatcgaggactaccgtgatgccgaggcaggccgcagcctgtccaaagctgccgagctggaccatcactgggtggccaaggcctggctgaatgacattggcctgtcccagtactcccaggcctttcagaaccacctggttgatgggcggatgctgaattccctgatgaagcgagacctggagaagcacctgaacgtgtccaagaagttccaccaggtcagcatcctgctggggatcgagctgctgtaccaagtgaacttcagcagggaggccctccaggagcgccgggcccgctgcgagacgcagaacattgaccccgtggtgtggaccaaccagcgggtgctcaagtgggttcgagacatcgacctgaaggagtacgcagacaacctgaccaacagcggcgtccatggtgctgtgctggtgctggagcccacattcaatgccgaggccatggccactgccctgggcatccccagtgggaagcacatcctccggagacacctggcagaggagatgagcgccgtcttccacccagccaactccacaggcatccgggaggctgaagcgttttgggaccgccccctggcaagggcctccagcgtcacgcgggcaggaaaggaggagaacagcagcggtctcaagtacaaggctggccggctgcccctggggaagataggaaggggcttcagcagcaaagatcccgatttccatgatgactatggctctcttcaaaacgaagattgcggagacgatgacccccagagcaggctggaacagtgccgtctggaaggctacaacagcctggaggtcaccaacgtgtcggcaagaagaacagaaggcggagacttggcagagagactcaagctgattgtcacaggctacagaggggccagctccagaacagtgaccagctacatcctgtccaagcagcccgagtgtggtcttggtccctgcagggcaatgtgggcatctggacctggggacgatgtggatgcacttcttggaaagctgttgtag

SEQ ID NO: 12218 - DNA, 1374 bp, Homo sapiens
  SIMILAR (1)..(1185): 1001254mologous to Homo sapiens BN51 protein,accession number M17754,Smith-Waterman Score=2042.
atggaatactatgcagtcataaaaaaggatgagttcatgtcctttgcagggacatggatgaagctggaaaccatcattctcagcaaactaacacaggaaccagaaacccacccccctcatgttctcactcataagtgggagctgaacaatgagaacacatgggcacagggaggggaacatcacacactgaggcctttcagggagtgggggcccaggggagtgatagcattaggagaaatatctaatgtagatgatgggttgatgggtgcagcaaagagaggtggagaaaacaggagaagggataactacgacttttgtcctcaaataccaggaaaactacctgtgaatacgggacctttcatgacaaagggactttgcagatgtgattcagttaaggatctgtggatgggaagcttatctggacacagccagtgtaatcataagagtccttataataaaggggcaggagagtttacagcagagagaaggcgaggtggcagtagcagcaggggtcggagtaatgccattgctgaagagggctggaaagttattttgctgcctaaacagtttaaagcagtggttctaaacctctttcagcaattaggcaaggacattagtgacagaggggcatccactgaaaaagacagagcaatactcgaacagcaaagaggaagccacttagacattcttgtttcttcaaatatcagaagcttccacatcatagcaggagggctagggatggacttcacctcccaaaagctgttggcatttggaccaaacaaggctccccggacttctggcatcatctgctggcctgagatccagtcggcttttcagggtgttggaaacctttattttacaatccccattgtggatctcaactccaccaactatgtcctcaggcagaaaagctccaatattcacttagatactgcagaaggaaaagagaggctgaaagggttggatcaaggaagtaggaaagggaatttctggggcatttccttcccccaatcccagaatagccacagaaatcacagtcaccaagagctgctgcttctgaataacatgacagtgatgggggtagggccaccccctgtatcgtacctagcagaggttggagctggcatatcaggaggaggttctaatcattatttgtggctgggaaacttatttattgatagcatggggcagaggaaggaggcggggatggggttgtggctccctggtgatgcgactcctgtttattttgcccttcattttggaataaatggatttagccatactgctcagcctgagtgccagctgccctgcaggctcctcgaggctgagttcatggccctgcccctagtggccagagccggcttcacaggataa

SEQ ID NO: 12219 - DNA, 670 bp, Homo sapiens
  SIMILAR (246)..(614): 661254mologous to Homo sapiens BN51 protein,accession number M17754,Smith-Waterman Score=360.
tcactaagcctgcggtgctggaagtgattaccccaacgcaggttcgtctgaccatcagcgaggggcgttatcatcaggtgaaacgcatgttcgccgccgtgggtaaccacgtggttgagctgcatcgtgaacgtattggcggtattacgctggatgctgatttaacccccggtgaatatcgtccgttaactgaagaagaaattgccagcgtcgcctaacttttcaatgactttcaggagcccgttgtgaccacccgacagcattcgtcgtgtgctatagattttatccttggcctgctggacatgttgatgccgctgtccattgatatgtatgtgcccgcgctaccgatagtttcatcgcagtttggcgtaccttgctcaagggcacgattatcatcttgcatgagtcttcgatccatgataacttcaatctgacctcccaaaagctgtgggcattcgtaccaaacaaggctccccggacttctggcatcatctgctggcctgagatccagtctgcttttcagggtggtggaaacctttattttacaatccccattgtggatcgtaactccaccaactatgttctcaggcaggtacgactcctgggcaattgagacattaacaatcgtgtgtggtgcggatcttgtacatagagactgtctttgcaccat

SEQ ID NO: 12220 - DNA, 4106 bp, Homo sapiens
  SIMILAR (1001)..(1105): 881254mologous to Homo sapiens cytochrome c-like polypeptide,accession number S80864,Smith-Waterman Score=165.
tcttactgtactggtaaaagaaaaaaagaaaaaacccacagaatcacagaattcatgttctcacagtagccagaagctaaaataatgtgcttctttattgcacgtcaaaccaagaaaggtataaaagccaatgattctcaatccaaatgtgaaagtcaggttcacctcaactggattcggaatgtgctgatttccattggactcaagttgatctcacttatattctgagtgccgggaggtgaatgcatcaaggatagtgatgaaggtgtgagactttcgacaataaacttgtttaaaagtttctgtaccaatatctttccctgagtagtagaacaaaacagccctgtgcctttgctagagaaccgacaatcaaacccttttctgtggaggatcaaggctgcctcattggagtgcccattgcccacctttgactgtattgttctcaaattaaccagatgaatgtcacaaggcaaagatgactgtaatggagagaattcaccttgcagctcaagggtaggtgaggagaacttatttgccattggaatgactggatgattcatgagagaagaagttatgtggctaaggagagaaggataactgaccgacttcttttcttcttccgtattaacagcacttcttttttctagtagtattcgaaatagattagctgtaatcttgttatcctggataccttgctcaaggccacgattatcatcttgcatgagtcttcgatccatgataacttcaatctgaccactattcaaactcgaaacccctaaagactgagcagagagcagtgtcaaacgatgtttggcatcctggatataggccattgtggtcatgggatagacatttgcttgaagaggcaatttgctcagtgtcattctaggttgaatctggtacccatttaggtcagtataaaatctattttggctttttatatcagaagaaattttcattgcaatctcacggttatatacttttcggatgtccacaatattggaaacttccacagactgtccttctattccctgtatgtggtatagtcggactctatgagtaacatggtcaaaaaagcaagtcacttccgaataaatccttccatgtgtcactctgacaaagggcggtgttgtgtaaacataaggcttggcattaccatcaggtaagaagaggtaggcaccacttttgtctcttttaattgtggttccataccatgaaaattgcacatttacttcatggtgtttaccatcttctttagtcatcatttgcttcataagtccagtttgatcaaaccgaagtaaaacaaaggagttctctagtgttataccttcttcagtatttatcatattctttatggtgaaaattccgctatcttctactttattcttatacaagacataatcagctaaatgtgaatttgaacttgctgattccaaaatcttatacactttcagtcccaatggcggtatatgtgctcgaaaagagatctcataggctgtttctgaaatagtatttgctgtatcccaaactgcgctgacttgaacttccacaggttttcctgaagcagagaacacttgcactgtcggggaactcacatagactgagaccaacgagattcggtcttgttctaaaggattatagaccacaaggtaccttggctccgcactcagccttattatatttttttgtggcagagaatcttgtgatttttgtttcaaatccatctccaggaaggtatcaggagagtaagagtcgtatgtgagtttgtccttcaaaataagaagaaatgcagaatttccaattatcttctccaaaaccattaacgaatgaaaaagtctggtaccataatccacaaccacccagtcttttgcagttcctgtgatagcatcatgatgttgaaacagtcccaaattccttctggcttctgtcagtgccgtgtaaagtgatgatgagagaaatttatttatcttgtatttgtgagcttgtctcagggcgaaatagtaaagaatttcagcagcccttaaatgagattccatgattctgtccattcgtttgtaaaagggtctggatgtaaaatagccactccagtaatgatcatctcgatcggcataagtgaaaaaatctccacttaaaacagggaacatcgactggcccttgtctctctgagtttcatctgctttatccagcgcatcaaaaaaatctgataaagttccaaactgtatcttaactttaaacttggactgagaattcatataatcaaaaagctgctgataattcttaaactgtaaatcccattccgtgtattcacagtagcggaaatcatctcctagtggagccaggagaactttggtacgaaaaagctttgacttctttcggtactgatctagtagcatccgagccctgctttggacatttccaggatgtattgtttctggggggactccccagggacaaccaaatctgcctccaggaagacgtttaaaatcaaactggcagcatattttaggatcaggtccacaagtgtgagggatgtcatagctgtagaagggcatcatgtggcataaaatatctgtgacagatcccagatcccaattctgtctccaaaaaaactccaatgttttatgcagtgcaaagtgttttttaactgcataatgaactctctggataagcatgtgagaaagtccagcacggtttagaagataagccattgttggtgagtgtccaaagggatcaatagcccagccggaccgaggtttcactcctatattattttccagccactgatgtccttcaattagttgatcaattaaggcaaaataatgtggagtagcttcatcaggcataacccagccacctgtcacaatttcaagctgaccattttctattaaacttttaacagcatccttcttctgaatatctataatatcccaccactttgaaaggtaagagatctcagaccaaataaacttcctccgtgagtcttctttcagctttaggaccatgttattaaaaatatactgagtcttgtctctaaagtagtcattgaaagtcttcaaccaacctgggtcgttatgggaatgaggcaccacaaagacttgaaggggttcagtgtcccattcattagattcataagtaatgtcaaatccttgcttccaaactccaccatctggattgtcaaaagaaattagactgtaaacatccaacatctgcacatctgaattgtgacttccactttgtgaagcaaacagacagtctgcagtgtcaactgagagggataattgtgagggcagaagatgtgagccagcaccttggctgaaattgctttgtgaacttttcggaccatcctccacagactcactcaaattgatgactgagtctctaatatttgagatgatctcattattctcagctagcaaacgctccaaatggtctattttttcttgcaacattgagagctggccctgagggaaggagccctcgcggcgcgggttcctggggtagtctaagtgaccccggtccagcatcaggtagagcgagaaaatcaccacacagaagatcgcactgccgaacacggtgaactggcggcttaacttcattttcctcgatagactcggggccaggacactctcctcagccaaaggagacagcgcactgtggactctaggaagcagccgccggaggctcccttctcccgggctgcgcgacctccgcgctctcggatgcgggtgcgagtccccgccttgctccgcacctagtctccggcgccacaaaacgcccttggccttcgccctggcctgccgccctccccggggtcgggcgcccctctcgaggcgagactcgccggcaactgggaaggggggcccccacaaacttgatcgcaagctcagcgccgacctccggcagggcgcgcggggcaggcggaggagaggtcgctgcccgcacttcctgccaccgccgccccaactgagtcggcaggaaaagttttctcgacgagggcaggcgtgtcctcctcacccaggggaggcgcgggttcggcagctcccgggccggggccgcgcagctaggtcagagaagcggaggggaaaggaacaagatcgcgaggagcc

SEQ ID NO: 12221 - DNA, 3912 bp, Homo sapiens
  SIMILAR (1172)..(1348): 321254mologous to Homo sapiens Human secreted protein encoded from gene 21,accession number Y25731,Smith-Waterman Score=69.
atggctgcgactcgcggcgaggagaaaatctgcatgagcatgtatcaacgcattaatggcgctgactggcgcaatattttcgtcgtcggcgatctgcatgggtgctacacgctgctgatgaatgaactcgaaaaggtttcgttcgaccctgcgtgtgatttgctgatttcggttggagaccttgttgaccgcggcgcggaaaacgtcgagtgcctggagctgattactatgccttggttccgggctgtgcgaggtaaccatgagcagatgatgattgatgggctatcggagtatggaaacgttaaccactggctggaaaacggcggcgtgtggttcttcagtcttgattatgaaaaagaggtgctggctaaggctgggtaccaagatgattttgcgttctgcgagagacttaagcgcgtccgatacatgcgtatcgctcaggcccgtaagctcggcaataaccgtatttgtcacgcggtcctgtttcttgttcccagccgtagcatcgatgtaaccatcgtcatcagcggtcctacctgctccggcatgaggcgaaacaatgacgctatgccctcgcttaccggggatcctctagagtcgacaaccgttaatcccgactgtccgcgcagagtctttacaacgttcatggcgcccaactgttttaccgacaagaaaaaaaagcctgccagtagtgccttggtggtcggtgcacaagtcgcacccaaccggcttattctttacgctctgcaagttccgttgcagatgtttcccgccaatacgctgcaggcgagcattaccggggtgttggtgatcgctttagaaatcaaacgtctggcacttggtttgggtatctttgacccgctgatcggcttaatgtcgccggattgtggttacgccgcaaagcgaaagccgcgcaacaggagcttgtccatgaacattgagttactgcaacagttgtgcgaagccagcgccgtcagcggcgatgaacaggaagttcgcgacattctgataaacacgctggaaccttgcgtgaatgaaatcaccttcgatggtctgggcagctttgttgcccgtaaggggaataaaggtccaaaagttgccgttgtcggacatatggatgaagtcggctttatggtcacccacatcgacgagagcggttttctgcgttttaccaccattggcggctggtggaatcagtcgatgctcaaccaccgggtaaccatacgcacacacaagggagtgaaaatccctggtgtgattggttccgtcgcgcctcatgcgttaacggaaaagcaaaagcaacaaccgctgtcatttgatgagatgttcattgatattggcgcgaacagtcgcgaagagctcgctactcaccgggctgttatccgggttagcgggcataacatcggtcatatatttccaccaacgttggcaaacatcagtgctggcaaccgcattccagcgttcttcagattcaatctctaccatggcaaacagcagattacgcgctttgtcgagatagatggcgtagttatgcgcaccgatctgtacagtccgaaagccgctgagggtaaaaacatccagctgcaccctaaggtcaacactgtaggaaaagtccactatcttcaaagcttgattgttcttgttacaatcatagggatcgtggattctgagcccagatttaagagagggctaaaagatggtgaattgtggaataaattctttgtgcggattctgaatgccaatgatgaggcccaagtgtctgttcttggggagcttcaacaagaaatgaatggggtttttgacactacattccaaagtcacctgaacaaagccttatggaagaaaaagcgggtggttagcaggaactgggcaaggggtacttgtggacccagagtgaccaacgagatgcttgaggatgaggatgctgaggaccacgggggtactttctgcttaggggagctggtggagctggctgtgaccatggagaacaaagcagagggcaaacggattgtaagtgaaaagcctaccagagcaaggaaccaaggcatagaggggtcacctggagggcgtgtgacccgaagcccccccacgcaggtggccatcagctcagattctgcacggaaggtaagaaaaattgcccccaccccgcacgccacggcaagcgaaatcgccgtcagttgcgtcaccgcgcgagcgagcaatcacccggtttatatccgtgataccgggattggtatcggtgacccgaaagaacccgaaggtcattatggtctgaatatcatgcgcgaacgcgcggaacggctaggtaccctggcgattttttcattgcccgttgaacaataccccgatctcgcgccaccgaatgtgcgagtgaccgctaactatcccggcgcatcggcccagacgctggaaaacaccgtgacccaggttatcgagcaaaatatgaccggcctcgataatctcatgtatatgtcatctcagagcagtggcaccggtcaggcatctgtcactttaaggggtaccgagctcgaattcgtgcaaattaaacatggcggtttcccctgccacgttgatgacagcattcaggtcaatcagcaaaagtgtattggctgtaaatcctgcgtggtggcctgtccttttggtacaatgcaaatcgtcttgacacccgtcgcggcaggaaaagtaaaagccccggcgcataaatgcgacctttgtgcggggcccgaaacgggtcctgcttgtgttgagaattgcccgccggacgcgctgcaattggtcactgacgtcgcactctccggcatggcgaaatcccgccgcttgcgcaccgcgcgtcaggaacatcaaccgtggcatgccagtaccgcggcgcaagaaatgccggtaatgagtaaagtcgaacaaatgcaggcaacgcccgcgcgtggcgagccggataaactggcgattgaagcgcgcaaaaccggttttgatgaaatttatctgccatttcgcgccgaccaggcacaacgggaagcctcgcgctgccttaagtgcggcgagcacagcgtttgtgaatggacctgcccgctgcataaccatataccgcagtggattgaactggtgaaagccggaaacatcgacgccgccgtcgagctttctcaccagaccaacaccctgccggaaattaccggacgcgtttgtccgcaagaccgtttgtgtgaaggtgcctgtactattcgcgatgagcacggcgcgctctcccggaggcgcagggctgacgagtgccgccaagccaaaaaagcgatcaaaaaacaaaggaagcttgggatgaaagtgacatttgagcagttaaaagcagcctttaatcgggtcttaatttcacgcggcgttgacagcgaaacggctgacgcctgtgcagagatgttcgcccgcaccaccgaatccggcgtttattctcacggcgttaatcgtttccctcgtttcattcaacaactggaaaacggcgatatcattcctgatgcccaacccaaacgtataaccagcctcggcgcaattgaacagtgggacgcccagcgttcgatcggtaacctgacagcgaaaaagatgatggatcgcgccattgaactggctgccgatcacggtattggtctggtggcactacgtaatgccaaccactggatgcgcggcggcagctacggctggcaggcggcggaaaaaggctatattggcatttgctggaccaactccatcgccgtaatgccgccgtggggcgcaaaagagtgtcgcataggcactaacccgctgatcgtcgccattccttccacgggtaccgagctcgaattggtgaaacccccttttgaagaaaacttttttggagaagccccccaggaaataacaaagattggttttcttccccaaacaattatttgctaa

SEQ ID NO: 12222 - DNA, 1151 bp, Homo sapiens
  SIMILAR (2)..(79): 801254mologous to Homo sapiens Peptide sequence derived from a human secreted protein,accession number Y40039,Smith-Waterman Score=108.
tcaaacagctgcatctgatttgccaacaagatttcttactgttatggttgctagatagcgatcatttgtgatatttactggcagttttgtggcattaactgtgtaattttgtaaatgtgatttccatcttgtgagagtcacttcataatccaagatttttccattggcttcaaaaggaggcaatgtaaaatcttcctcattgactgatgaaacttgctttgacctttcaaaatgtgaaatatctggactggattcatgctgactgcagttctgtttgaagtactgttgcctgggcaaaataccatcaccgccatctacatgatctactaattgtagatcttctggccgctcctctgaatctaacaagggctgggtagactcggatcttgagaagacttggactgacggaacttggtgtctgtagcccactgtgtaccacggtagaatactggacagtgcctcgaagtgttttgtgaagattcattttcatcactgctagaaatgcttggcctagaagatgacatgcatgaagaccccccaataccactgctgtgtccttcagtattaattttttcctttttgaacaggtccaatgatttcagatcttctggaaaaggctttttgtcatttgcttctatttccacaacacttacatcagtgaaattgccatctgaatacattctgttcatataagcaagctctgccaaacaccgagcactatgctgggccaggagaggactgagctggggccctctctccagaggcccagcagtaggtgccaggatatagaaggcccttaactcagggggaaggagagagaagaatggaagatttccctcaagagggtatctatttgagttgatttttggtgaaccagtaagaatttcccagcttaacagggactggggactggagaacatttgtttccttttccccacagggtcttgtccattcataccgccttctttggcataagcctggatggaatatggctcgccaactttgtcatgcaacattggatacacagagatgttatagcaccagaaaggttttaatttatcttgctggatcgtccagttcgtggcctgagacacagattcccaggaaagggtggtgggctctgagtccacatccggaaaccattcaatcat

SEQ ID NO: 12223 - DNA, 1326 bp, Homo sapiens; identical to SEQ ID NO: 1579
  SIMILAR (157)..(354): 521254mologous to Mus musculus Pro-Pol-dUTPase polyprotein,accession number Y12713,Smith-Waterman Score=115.

SEQ ID NO: 12224 - DNA, 2838 bp, Homo sapiens
  SIMILAR (505)..(1290): 901254mologous to Homo sapiens putative p150,accession number U93572,Smith-Waterman Score=1267.
gaattcacagataaaatcattttagctttactttataggtactgctgaagttgtagcaggaactactagtccttcactgaggcatgtagccgccttgccgtacagtctgtggtaagtaacttttaggcatgccttcatcagtcgcagcctccatgccaactgtttcaaatctttctacttgtccctcagtacctggaccaaaagcatctgctgcagaaacttcctgaaacattttcatttgcccagatccacaggattgtgaaatatgatctgaaatctgctgtttaagtctaacaaaatcttcctcattgactgatgaaacttgctttgacctttcaaaatgtgaaatatctggactggattcatgctgactgcagttctgtttgaagtactgttgcctgggcaaaataccatcaccgccatctacatgatctactaattgtagatcttctggccgctcctctgaatctaacaagggctgggtagactcggatcttgagaagacttggactgacggaacttggtgtctgtagccactgtgtaccacggtagaatactggacagtgctcgaagtgttttgtgaagattcattttcatcactgctagaaatgcttggcctagaagatgacatgcatgaagaccccccaataccactgctgtgtccttcagtattaattttttcctttttgaacaggtccaatgatttcagatcttctggaaaaggctttttgtcatttgcttctatttccacaacacttacatcagtgaaattgccatctgaatacatttgatcttttgaattaaaattgtgccttggaggagtgtgaggtgaccactgggcaatatgactctttgaaggatctggaacattaggccagatgtgttttttaattaggtctcgcttattaaagcagaacagcactcccagaagagttgtcaataggaatgctaagcaaacaggcacgactatggcttcaatttctccttgagcaaactttggggtaagtaaaagtgaattcttggaccatccttcccacctttcatctgtgtatgctgccattccgtaccatggtacaatggtgtcactagtcaaagagggacaatgtatattctgtgtgggaagaatccacattcacagcagtttcatttccaatgatggttctataaaatatagtataatttctgataaatccattctgaacatcaacaggaaagttggtcccactctaagacagcttcgtttttccctactttttttgtccgaacagtaggtcctttggaaggtggagcttgtttaaggtatgcctttatggattcagggcttcctggtccatcagcatatactggagtaactgttatcaaatagcatttgctctctgctaagttccctcttaaataggtgcgatgcacggtaccatcttcttgttgccagtctgtgatacagggtgctttatctgataacacacaccactcaagtatatatttctttacagattcccttggagtagtccattccacccaaagcatgttatctttggggaatgctttaagatccattacagggtgagtagcttgaaagtcacaggcagggatagttaaaacagctgcatctgatttgccaacaagatttcttactgttagggttgctagatagcgatcatttgtgagatttactgtcagttttgtggcattaactgtgtaattttgtaaatgtgatttccatcttgtgagagtcacttcataatccaagatttttccattggcttcaaaaggaggcaatgtcttccacacgagttgtacagttctgtagccttgagtatgggatggatctattttataccagaaacttggtgctttagatggtctatcttcataggtgatcccacttgcttcttcactccagtcactccagtatcccttaccatcttccttcatacagcgaatcctaaacacatattctgtaaaaggtttaaggtcttggacagtgaatgaagatcgggtggatgctgtgtcttcaggaggaatctggctccaagttgaggcatctttggtcctatattgaatgttatattttagtattataacactcttaatacttgggttggtccatgtcaattttaagatactagacagttcctctgagttgatcactgataaattatgtggcggattgggcttcactttatatacaggatcaaaattgatatgatctgatgtaaccttcccaagggcattctctgcttctacccagacttcaatgttgacaaaatacacagtagaataatcaacagtgcatgaggtgggggtgtcacgttttgctttgcaatcagcaaacttgtgtgttgcccattcagattttaaagtgaagtttgtctccaagtgtgtttcccttccaccatcccactcacacctcattttcttcccctcgttcacaatgcaactcaaatttttaggtttttctggaggcaagcctgaaattattgtgattccataaacattctgttcaagctgtccgaatgtaagaatgttgcaagtgagctgaatatttaatgaagctatatctgtaaaggtgacactggatgctgttctgtttatgatagtatattgctccttaggaatagtaaaatggtttgttttccagacaatgtaattagcatttacatgaaaataatccatacatttttcctttagcacacaaactgcagtgaaattagaatgaagttgtacaactggagattcaggactgatataaccacatggatctagaagttcacctgtagattcagtggtgaggaaaataaacaaggcttgcactacccaagtctgcaacgtcaacat

SEQ ID NO: 12225 - DNA, 1835 bp, Homo sapiens
  SIMILAR (1)..(111): 861254mologous to Homo sapiens PRO1546,accession number AF116638,Smith-Waterman Score=164.
atggggctccgtaagaagagcaccaagaacccccccgttctcagccaggaattcatcctgcagaatcatgcggacatcgtctcctgcgtggggatgttcttcctgctggggcttgtgttcgagggaacagcagaagcatccatcgtgtttctcactcttcagcacagtgttgctgtccctgcagcagaggaacaagccacgggctcaaagtccctctattattatggtgtcaaagatttggccacggttttcttctacatgctggtggcaatcattattcatgccacaattcaggaatatgtgttggataaaattaacaagagaatgcagttcaccaaagcgaaacaaaacaagtttaacgagtctggtcagtttagtgtgttctactttttttcttgtatttggggcacattcattttaatctctgaaaactgcctgtcagacccaactcttatatggaaggctcgtccccatagcatgatgacatttcaaatgaagtttttctacatatcccagttggcttactggtttcatgcttttcctgaactctacttccagaaaaccaaaaaacaagacatccctcgtcaacttgtctacattggtcttcacctcttccacattactggagcttatctcttgtacttgaatcatttgggacttcttcttttggtactgcattattttgttgaattactttcccacatgtgcggcctgttttactttagtgatgaaaagtaccagaaaggcatatctctgtgggccattgtgtttatcttgggtagacttgtgactttaattgtttccgtactcactgttgggtttcacctggctggatcgcagaatcggaatcctgatgcccttactggaaatgtaaatgtgttggcagctaaaattgctgttctgtcgtccagttgcacgatccaagcctacgtaacatggaacttaattactctctggcttcagaggtgggtagaagattctaatattcaggcctcatgtatgaaaaagaaacggtcgagatcttctaaaaaaagaacagaaaacggagtgggagtggaaacttcaaatagagtagactgtccgccaaagaggaaagagaaatcttcataatctttgcaagcgcattgattaatgtctgcaaaggaatctgctctttgaggtttctttctgcactagagatttttgtgtttttgaaaatagttcgtgctcttcggtttttgttattgaactgtttcatgtattttttaaagacatttgaggggaggaggattattatgaatgggaaaaaaagattttggttgagactaaattactcatcgtcaaaataatgtcaaaatagttgtggggatcaccactatattttgttttgatttttaacctttcaacattttcctaatgatttgcagagataactgcacaattttgcatatcaatgatactggttcttactcccaccagtgtttcataatactaacaagatggtctctcctagcaagattatgtgtttaatgcttgctttggggtaaaataaaagtacgaaaaaggtggaagtcaaatcagtattctgtaattgttagaatttattttttaagaacttacaactcagaaaagattgctagactcaccaaaataataaatgttctttattttacaggtagtgattattagtgcttcatccccatttaaaaaaacacagtactaatgggtaacacatatggaggtttgctgccatatatattgcatcaaaatatcattaattaatataaaaatattaaaatcattcctgtccattccacttgtaaatgggaattcatgaaattaaatattactttaaa

SEQ ID NO: 12226 - DNA, 367 bp, Homo sapiens
  SIMILAR (1)..(366): 861254mologous to Homo sapiens profilin II,accession number L10678,Smith-Waterman Score=585.
ggcacgaggagctacgtggataacctgatgtgcgatggctgctgccaggaggccggcattgggggctactgcgacgccaaatacgtctgggcagccacggccgggggcgtctttcagagcattacgccaatagaaatagatatgattgtaggaaaagaccgggaaggtttctttaccaacggtttgactcttggcgcgaagaaatgctcagtgatcagagatagtctatacgtcgatggtgactgcacaatggacatccggacaaagagtcaagcattggttatagtcatgggaaaggaaggtgtccacggaggcacacttaacaagaaagcatatgaactcgctttatacctgaggaggtctgatg

SEQ ID NO: 12227 - DNA, 534 bp, Homo sapiens
  SIMILAR (25)..(351): 851254mologous to Mus musculus TGF-beta receptor binding protein,accession number AF188297,Smith-Waterman Score=463.
atgggaaaggaaggtgtccacggaggcacacttaacaagaaagcatatgaactcgctttatacctgaggaggtctgatgtaaatagtgatgctgtgacacttctaaggctaggatttaagaagccttgcagagtccaccagggtcccttggaacacaaattgtgggagaagcaatccctgaagaaagccagccattatggaagaaatccaacgaccctgagaccactatgctgttgcaaactttcccggttacgcccacacctttcctccttaaaatgcgacccttttgtgtgcccaccaaaaatcccacgtcaaaaaaggggcaacgcttccaatcaggctgcgtttgtcgccttccaaacggcttgttgtcctctggggcggttcccccccagagctttcggaataaaacttggcgaaagtcccttccaagataataaatccgggggccccgttataccggaagccctgggccacctttggcaaaaattaaaccttttttcgcccgttaaaagtttccaactttcaccataa

SEQ ID NO: 12228 - DNA, 1746 bp, Homo sapiens
  SIMILAR (1300)..(1494): 751254mologous to Homo sapiens putative p150,accession number U93568,Smith-Waterman Score=231.
ggttggaataaatttatttcatctgtctgtaaacaaggtgtttaatagttatggcatttttttaaatgcatattaaatcagatgagttagactgtatcccagatgtaacaaagtgcagggaaagaaatggacaaatcagcaacaagatttgtttttaaatctgtacattatccacaaggcccaaacaatagaagcaaatactagaatgtccctaaagtagtgccattcgaaagaaacccttaataggtcagttaaaatccatctcacaatagcaacagttcattttaacaatagtatggcacagaatacatatgaaaaaaattcatcacaagacagccaagtccacaataatgcaacttcatataaaaactcaagctgcaaataaaaattggtcctatgaagaacaaactggacacactccagatggttatgttgggatacctaatgtccataatggcagccttttacaattttactaaagagtagagctggtgtgcaaagaaaaaggaagaaaaatctgagctattgcaatgatggaatgtccctggggattcaatcagtatggttactgtaaggtcatgggaggaagtgctttttgctcttgttttgccattgcactcttcatatgtcctgtagacactatgaataaaggtttgtctctgctcaagtgcaacaacaatactaaaagcaaactactgcagctctcaatagctcatcaacaaaagggattttaattggttaaaaaaaaacaggcactgcataaaaaaagatggaagcaaaccaaatgcctatgtgcgaagggaggggggggcgggaaaaagagaagagtgaaggaatgatgcatgcactttttcctcccaaccatgcgctacaaaaggaagactaaatgagccaagtaaatgctcaaagtgctgaaaagacactgatcagagattgtacaaccggcaccttgcttaaatattaaacttaattttaagtaatcaatatcccattaaattgctaagacaaagtgatgcccaacttggcatgccccctcccccgagatttcaaggtatcatgcaaatcattattgtgctgcaattatgttgccagataagggttggtttaccatacagtggttaaacatacaaatgatcccattgggcaaacaggaatccatgacatttagaaaataggtaaagaaaaattagctacccattctacaggtttggtagcattgtgacccataattagggtttgttgatgaaagacagttgcctaggtagatggggagaggctgcttaacacatcagacctcctcaggttataaagcgagtttcatatgctttccttgttaaagtgtgcctccggtggacacctttccatttcccatgactataacccaatgctctacccagatctgccgacagccacattgtattgttggctccccacctttgactgtttgtcccggatgtccattgtgcagtcaccatcggacgtatagactatctctgatcactgagcatttcttctgcgccaagagtcaaaccgttggtaaagaaaccttcccggtcttttcctacaatcatatctatttctattggcgtaatgctctgaaacgacgcccccggccgtggctgcccagacgtatttggcgtcgcagtagccgacaatggcggcctcctggcagcagccatcgcacatcaggttatccacgtagctctgccaaccggcacatcttcgagagcttcgagctgcaccgcg

SEQ ID NO: 12229 - DNA, 648 bp, Homo sapiens
  SIMILAR (1)..(348): 941254mologous to Mus musculus Similar to CGI-146 protein,accession number BC002200,Smith-Waterman Score=579.
atgggggctaaccagttagtggtgctcaacgtgtgtgacatgtattggatgaaggaatatacctcatccattggaattggagtttttcattcagaaattgaagtctatggcagagaatttgcttatggtggccatccttaccccttttctggaatatttgaaatttccccaggaaatgcttctgaactaggagaaccatttaaatttaaagaagttgttttagggagcacggacttcctagaagatgatatagaaaaaattgtagaagaactgggaaaagaatacaaaggcaatgtttatcatttaatgcataaaaactgcaatcatttttcttcagctttatcagaggccagagctgaagcaatgccaggcatcctgggaaaacagtgcattaaccatccagagcagtcacacccctctgtacctgagctgaagcagtaccttgtctcctgggaaaacagtactttggccatcgagagcagtcatgcctccccagtgcctaagtttaagcagcaccctacctaccaccctgccttccagcacactaaggaccaagtgcaggtgaaagcctctatgaaagtgactgtagaaaaatgggaagacgccattgtttcaccagatgcacagacatcaatgcagggacaatag

SEQ ID NO: 12230 - DNA, 865 bp, Homo sapiens
  SIMILAR (328)..(684): 451254mologous to Homo sapiens apoptosis-related protein PNAS -4,accession number AF229834,Smith-Waterman Score=158.
  misc_feature (1)...(865): n = a,t,c or g
ctccggccccgcggagacggagcggcttgaggacgaggcggcggccgcggggaggaggatgggggctaaccagttagtggtgctcaacgtgtacnacatgtattggatgaacgaatatacctcatccattgggaattggagtttttcattcaggaattgaagtctatggcagaggatttgcttatggtggccatccttaccccttttctcggaatatttgaaatttccccaggaaatgcttctgaacttaggagaaacatttaaatttaattctttaagagaagctgttgttttagggagcacggacttcctaagaagatgatatagaaaaaaattgtacgaagaactgggaaaggattaccaaaggcaaatgcttaatcatttaaatgcataaaaactggcaatcatttttcttcagcctttatccagagattcctttgtggggaaagagatttcctcgctgggatcaatccgactttgccctacttcaagctcctggtatacccttttcttacagagttgcctccccgaaggagttgggctcacgccccgcagcccctgcagtcctagtgtccagccaagaactccaggatgaactgggaggaagcagaggatgctgccgcatccgctttccgtggcaagcagctggcagcaggctccagacccgggcgccacactaaactataaatgtctccaaagtcacacattcagaactgtctctggcagtcgaatatcactagagaaaagtaaacagagaagcatcctttagatattttgtatgcaaagatggctctcccccaaatcccagtttttcagctcaggattatatttgtaatcaaaaaaaaaaaaaaaaaaaaaattggcg

SEQ ID NO: 12231 - DNA, 2498 bp, Homo sapiens
  SIMILAR (1771)..(2061): 971254mologous to Homo sapiens TGF-beta receptor interacting protein 1,accession number U36764,Smith-Waterman Score=505.
acaacataccagaatctctgggatgcattcaaagcagtctgtagagggaaatttatagcactaaatgtccacaagagaaagcaggaaagatccaaaattgacaccctaacatcacaattaaaagaactagaaaagcaagagcaaacacattcaaaagctagcagaaggcaagaaataactaaaatcagagcagaactgaaggaaatagagacacaaaaaacccttcaaaaaattaatgaatccaggagctggttttttgaaaggatcaacaaaattgatagaccgctagcaagactaataaagaaaaaaagagagaagaatcaaatagacgcaataaaaaatgataaaggggatatcaccaccaatcccacagaaatacaaactaccatcagggaatactacaaacacctctacgcaaataaactagaaaatctagaagaaatgcataaattcctggacacatacactctcccaagactaaaccaggaagaagttgaatctctgaatagaccaataacaggagctgaaattgtggcaataatcaatagcttaccaaccaaaaaaagtccaggaccagatggattcacaggcgaattctaccagaggtacaaggaggaactggtaccattccttctaaactattccaatcaatagaaaaagagggaatccatgaacattgatgcaaaaatcctcaataaaatactggcaaaccgaatccagcagcacatcaaaaagcttatccaccatgatcaagtgggcttcatccctgggaggcaaggctggttcaatatatgcaaatcaataaatgtaatccagcatataaacagagccaaagacaaaaaccacatgattatctcaatagatgcggaaaaggcctttgacaaaattcaacaactcttcatgctaaaaactctcaataaattaggtattgatgggacgtatttcaaaataataagagctatctatgacaaacccacagccaatatcatactgaatgggaaaaaactggaagcattccctttaaaaactggcacaagacagggatgccctctctcaccactcctattcaacatagtgttggaagttctggccagggcaatcaggcaggagaaggaaataaagggtattcaattaggaaaagaggaagtcaaattgtccctgtttgcagatgacatgattgtatatctagaaaaccccattgtctcagcccaaaatctccttaagctgataagcaacttcagcaaagtctcaggatacaaaatcaatgtacaaaaatcacaagcattcttatacaccaacaacagacaaacagagagccaaatcatgagtgaactcccattcacaattgcttcaaagagaataaaatacctaggaatccaacttacaagggatgtgaaggacctcttcaaggagaactacaaaccactgctcaaggaaataaaagaggatgcaaacaaatggaagaacattccatgctcatgggtaggaagaatcaatatcgtgaaaatggccatactgcccaaggtaatttacagattcaatgccatccccatcaagctaccaatgactttcttcacagaattggaaaaaaccactttaaagttcatatggaaccaaaaaagagcccacatcaccaaagcaatcctaagccaaaagaacaaagctagaggcatcacactacctgacttcaaactatactacaaggctacagtaaccaaaacagcatggtactggtaccaaaacagagatatagatcaatggaacagaacacagccctcagaaataacgccgcatatctacaactatctgatctttgacaaacctgacaaaaacaagcaatggggaaagggttccctatttaataaatggtgctgggaaaactggctagccatatgtagaaagctgaaactggatcccttccttacaccttatacaaaaatcaattcaagatggattaaagacttaaacgttagacctaaaaccacaaaaaccctagaagaaaacttaggcattaccattcaggacataggcatgggcatggacttcatgtctaaaacaccaaaagcaatggcaacaaaagacaaaattgacaaatgggatctaattaaactaaagagcttctgcacagcaaaagaaactaccatcagagtgaacaggcaacctacaaaatgggagaaaattttcacaacctactcatctgacaaagggctaatatccagaatctacaatgaactcaaacaaatttacaagaaaaaaacaaacaaccccatcaaaaagtgggcgaaggacatgaacagacacttctcaaaagaggacatttatgcagccaaaaaacacatgaaaaaatgctcaccatcactggccatcagagaaatgcaaatcaaaaccacaatgagataccatctcacacctgttagaatggcaatcattaaaaagtcaggaaacaacaggtgttggagaggatgtggagaaataggaacacttttacactgttggtg

SEQ ID NO: 12232 - DNA, 528 bp, Homo sapiens
  SIMILAR (163)..(255): 1001254mologous to Mus musculus TGF-beta receptor binding protein,accession number AF188297,Smith-Waterman Score=164.
gaaaacctaggcaataccattcaggacacaggcatgggcaaagacttcatgactgaaacaccaaaagcaatgacaacaaaagccaaaattgacaaacgggatctaattaaactaaagagcttctgcacagcaaaagaaactaccatcagagtgaacaggcaacctacagaatgggagaaaatttttgcagtctatccatctgacaaagggccaatatccagaatctacaagcaacttaaacaaatttacaagaaaaaatcaaacaaccccatcaaaaagtgggcaaagaataggaacagacacttctcaaaagaagacatttatgtggccaaaaaacatatggaaaaaagctcatcatcactggtcattagaaaaatgcacatcaaaaccacagtgggataccatctcatgccagttagaatggcaatcattaaaaagtcaggaaacaacagatgctggagaggatgtggagaaatgttagtgggagggtcaattagttcaaccattgtggaagacagtgtggcaatt

SEQ ID NO: 12233 - DNA, 1362 bp, Homo sapiens
  SIMILAR (283)..(170): 351254mologous to Homo sapiens PRO0657,accession number AF090942,Smith-Waterman Score=60.
atggatgcaaaaatcctcaataaaatactggcgaaccgaatccagcagcacatcaaaaagcttatccaccatgatcaagtgggcttcatccctgggatgcaaggctggttcaacatacacaaatcaataaacgtaatccagcatataaacagaaccaacgacaaaaaacatacgattatctcaatagatgcagaaaaggcctttgacaaaattcaacagcccttcatactaaaaactctcaataaactaggtattgatgggacttgcttcaaagagaataaaatacctatgaatacaacttacaagggatgtgaaggacctcttcaaggagaactacaaaccactgctcaaggaaataaaagaggatacaaacaaatggaagaacattccatgctcgtgggtaggaagaatcaatatcgtgaaaatggccatgctgcccaagaattggaaaaaactactttaaagttcatatggaatgaaaaaagagcccgcatcgccaagtcaatcctaagccaaaagaacaaagctggaggcatcatgctacctgatttcaaactatactacaaggctacagtaaccaaaacagcatggtactggtaccaaaacagagatatagatcaatggaacagaatagagccctcagaaataatgccacatatctacaactatctgatctttgacaaacctgacaaaaacaagcaatggggaaaggattccctatttaataaatggtgctgggaaaactggctagccatatgcagaaagctgaaactggatcccttccttgcaccttatacaaaaattaattcaagatggattaaagacttaaatgttagacctaaaaccatacaaaccctagaagaaaacctaggcaataccattcaggacataggcatgggcaaggacttcatgtccaaaacaccaaaagcaatggcaacaaaagccaaaattgacaaatgcgatctaattaaactaaagaacttctgcacagcaaaagaaactaccatcagagtgaacaggcaacctacagaatgggagaaaatttttgcaatctactcatctgacaaagggctaatatccagaatctacgatgaactcaaacaaatttacaagaaaaaaacaaacaaccccatcaacaagtgggcaaaggatatgaacagacacttctcaaaagaagacatttatgcagccaacagacacatgaaaaaatgctcatcatcactggccatcagagaaatgcaaatcaaaaccacaatgagataccatctcacaccagttagaatggcgatcattaaaaagtcaggaaacaacaggtgctggagaggatgtggagaaataggaacacttttacaatgttggtga

SEQ ID NO: 12234 - DNA, 2650 bp, Homo sapiens
  SIMILAR (38)..(1033): 681254mologous to Homo sapiens TGF-beta receptor interacting protein 1,accession number U36764,Smith-Waterman Score=1037.
atgaccgatcccacagaaatacaaactaccatcagagaatactacaaacacctctacaaaaataaactagaaaatctagaagaaatggatgaattccttgacacgtacactcccccaagactaaaccaggaagaagttgaatctctgaatagaccaataacaggatctgaagttgtggcaataatcaatagcttaccaaccaaaaagagtccaggaccagatggattcacagccgaattctacaagaggtacaaggaggaattgataccattccttctgacactattccaatcaatagaaaaagagggaatcctccctaactcattttatgaggcaagcatcattctgataccaaagctgggcagagacacaaccaaaaaagagaattttagaccaatatccttgatgaacactgatgcaaaaatcctcaataaaatactggcaaaacgaatccagcagcatatcaaaaagcttatccaccatgatccagtggggttcatccctgggatgcaaggctggttcaatatacacaaatcaataaatgtaatccagcatataaacagagccaaagacaaaaaccacatgattatctcaatagatgcagaaaaggcctttgacaaaattcaacaacacttcatgctaaaaactctcaataaattaggtattgatgggacatatttcaaaataataagagctatctatgacaaacccacagccaatatcatactgaatgggcaaaaactggaagcattccctttgaaaacttgcacaagacagggatgtcctctctcaccactcctattcaacatagtgttggaatttctggccagggcaattagaaaggagaaggaaataaaggttattcaattaggaaaagaggaagtcaaattgtccctgtttgcagatgacatgattgtatatctagaaaaccccattgtctcagcccaaaatcttcttaagctgataagcaacttcagcaaagtctcaggatacaaaatcaatgtacaaaagtcacaagcattcttatacaccaacaacagacaaacagagagcgaaatcatgagtgaactcccattcacaattgcttcaaagagaataaaatacctaggaatccaacttacaagggatgtgaaggacctcttcaaggagaactacaaaccactgctcaaggaaataaaagaggatacaaacaaatggaaggacattccatgctcatggataggaagaatcaatatcgtgaaaatggccatactgcccaaggtcatttacagattcaatgccatccccatcaagctaccaatgccttttttcacagaattggaaaaaactactttaaagttcatatggaaccaaaagagagcccacatcaccaagtcaatcctaagccaaaagaacaaagctgcaggcatcacgctacctgacttcaaactatactacaaggctacagtaactaaaacagcatggtactgggaccaaaacagagatatagatcaatggaacagaacagagccctcagaaataacgccgcatatctacaactatctgatctttgacaaacctgagaaaaacaagcaatggggaaaggattctctatttaataaatggtgctgggaaaactggctagccatgtgtagaaagctgaaactggatcccttccttacaccttatacaaaaattaattcaagatggattaaagacttaaacattagacctaaaaccataaaaaccctagaagaaaacctaggcattaccattcaggacataggcatgggcaaggacttcatgtctaaaacaccaaaagcaatggcaacaaaagccaaaattgacaaatgggatctaattaaactaaagagcttctgcacagcaaaagaaactaccatcagagtgaacaggcaacccacaaaatgggagaaaattttcacaacctactcatctgacaaagggctaatatccagaatctacaatgaactcaaacaaatttacaagaaaaaaacaaacaactccatcaaaaagtgggcaaaggatatgaacagacacttctcaaaagaagacatttatgtagccaacagacacatatgcagccaacagacacatggaaaaatgctcatcatcaactggccatcagagaaatgcaaatcaaaaccacaatgagataccatctcacaccacttagaatggcaatcattaaaaagtcaggaaacaacagctgctggagaggatgtggagaaataggaacacttttacactgttggtgggactgtaaactagttcaaccattgtggaagacagtgtggcgattcctcaaggatctagaatcagaaataccatttgacctagcaatcccattactgtgtatatacccaaaggattatacatcattctgctataaagacacatgcacatgtatgtttattgcagcactattcacaatagcaaagacttggaactgacccaaatgctcatcagtgatagactggataaagaaaatgtggcacatatacacaccatggaatactatggagccataaaaaggaacaagatcatgtcatttgcagggacatggatgaagctggatgccatcatcctcagcaaactaacgcagaaacagaaaaccaaactccgcatgttcttactcataagtaggagctga

SEQ ID NO: 12235 - DNA, 733 bp, Homo sapiens
  SIMILAR (1)..(216): 721254mologous to Homo sapiens My016 protein,accession number AF060511,Smith-Waterman Score=277.
atggaatactatgcagccgtaaaaaggaatgagatcatgtcctttgcagggacatggaagaaactagaagccatcatcctcagcaaactaacacaggaacagaaaaccaaataccccatgttctcactcatagaatgcatccattcaaatattgctacaacttgcagcgaacaccactctgatgagaataaagaaaaggccatctgcaggttgatttttggccctaaaagtgatgatacggcggctacttccacgaacacccctctacccaaagcactgaataggagccggtgtcagtcacgctgctccaggggagagtcgccggcagcttccggagctccaaatacagacgagctgagggggggagagggagagcaaagccacgcgggtggggagtggaaataaaggggagcagagaggagaagggggtggaggaaagaaggggcagatgggccgtgggagaaaatacagggagatggggaaggcagagccagggaacgccagcctgcctgccaagcgccaggctatgcgagaaatggattcagtgcatgaggcagtattgcaaagaagtctggaaagatccggaggctcctggctgaaggaggcacagataggttggatacccgaagatctgtgcagagaaatgggtaatggatccttaggaatcaagagacggcatgtgtgtccccagacccaatatgaggataaaggctctgggaggagaaggagctag

SEQ ID NO: 12236 - DNA, 486 bp, Homo sapiens
  SIMILAR (156)..(296): 761254mologous to Homo sapiens Human secreted protein, SEQ ID NO: 6834,accession number G02753,Smith-Waterman Score=200.
tttttttttatgcacacataatgtttattgcagcactattttacaatagcaaaaacatggaaccaatccaaatgcacatcaatgatagactggataaagaaaaatgtggcacatacacaccatggaatactatgcagccataaaaaggatggggattcatgtcctttacaaggacatggatgaaactagaagccatcatcctcagcaaactaacacaggaacagaaaaccaaaccaccacatgttctcactcatacgtgggagttgaacaatgagaacacatggacacagagagggtaacaaaacacacaacagggggtagggggtgagcgggcgaacttagaggatgggtcagtagggccagcaaaccaccatggcacacgtatacctatataacaaacctgcacattctgcaaacgtatctcattttttttttagaggaaataaagaaaaatgatgaggccatgtcaaaaagaatcaggagcta

SEQ ID NO: 12237 - DNA, 432 bp, Homo sapiens
  SIMILAR (88)..(432): 831254mologous to Homo sapiens R27216_1,accession number AC005306,Smith-Waterman Score=491.
attttttgttgagatctgaaaacttaatataagtgtgtctgttggtattgcttggttagagagctaaaatatttctaattgggtttattttgtattttgcctatagatacactctgtgcagttttagagagagacacactcagtattcgagaaagtcgactttttggagctgttgtacgctgggcagaagcagaatgtcagagacaacaattacctgtgacttttgggaataaacaaaaagttctaggaaaagcactttccttaatccggttcccactgatgacaattgaggaatttgcagcaggtcctgctcaatctggaattttgtcagatcgtgaagtggtaaacctctttcttcattttactgtcaaccctaaaccccgagttgaatacattgaccgaccaagatgctgtctcaggggaaaggaatgc

SEQ ID NO: 12238 - DNA, 936 bp, Homo sapiens
  SIMILAR (7)..(207): 831254mologous to Homo sapiens R27216_1,accession number AC005306,Smith-Waterman Score=271.
atgtatgatacactctgtgcagttttagagagagacacactcagtattcgagaaagtcgactttttggagctgttgtacgctgggcagaagcagaatgtcagagacaacaattacctgtgacttttgggaataaacaaaaagttctaggaaaagcactttccttaatccggttcccactgatgacaattgaggaatttgcagcagggaaagtattcatagagaagagaaggcgaccaaggcctatccctcaggaaatacccatatttaggagacaagaacaggaaatagaaaacttgaagaggggcagtgtgacaattgaaaaactaagaaaaatgcttcctcacctagtatcgggaatcaagaaggatatttggaaaaggggcttcttagaatgcttcctcgcagtttcccttgccagaaacctagcagccatcctggactcttccatctctcttactccagatactcagtgtctccctaagtcctgtgaacttcagcttctgactgaactttctcttctgtttgttcactcctcttcattccttcatgtcaccctcttagttacagccctcatcatttttcacacaaaccaagcagaaatgggagctatagatggtcatagctcccttaccctggcccctaatttccctggctctgattccaggctctccaagcagccttcaaatgatgattctcttaaagagatttcccaaagggacagaatgttctcactagcagatcccactatacagtctatttggcagttgtgttcttcactcaagttaataagctggcatcttgataagaaattagctccttgccaattgcccagcctagatccattttcagaaacactggctacgtggatttctgaaacctgcagagttaaggaaggaactcaagaccatgctgactccaccatggcaatgggctga

SEQ ID NO: 12239 - DNA, 2013 bp, Homo sapiens
  SIMILAR (469)..(822): 981254mologous to Homo sapiens Human secreted protein, SEQ ID NO: 6403,accession number G02322,Smith-Waterman Score=581.
aaaatttctaacaagtataggtagttcttggtaatggaattaaattttatgtgtatttcatgtatataaattttgtatgtatttatttatttaataggtcttcatcctccaggtccacctttagcaagacctattctcccccgagaacgaggtgctttggatagaattgttgaatatttggttggtgatggtccacaaaacaggtatgcacttatatgtcagcagtgtttttctcataatggcatggctttgaaggaagaattcgaatacattgcttttcgatgtgcctactgttttttcttgaaccctgcaagaaaaaccagacctcaggctccaagacttcctgagtttagttttgagaagaggcaggtggtggaaggttcaagttcagttggtcccttgccatcaggaagtgtgctttcatcagacaaccagtttaatgaagaatctttagaacacgatgttcttgatgataatacagagcagacagatgacaaaataccagctacagaacagacaaaccaagtgattgaaaaagcatctgactcagaggaaccagaggagaaacaagagactgagaatgaggaagcctcagtgattgaaaccaactccacagttcctggagctgattctattcctgatcctgaactaagtggagaatctttgacggcagagtagtaaatgcttccacgtgccttcaactggatatttatagtcttactgatgtcagttattgctttttcggtggcacttactttttttgcccctctaagggtatgcttgtgtatcatttgaattcagattgcctagctatttgaacatctcaaagttatatatactgggtattaaaattaaaagcaagttatatcagtgaagtaggatccttttgaatgtacaaagacccacactattgagacagcttttagatacttttttgtccattctaaaagtaagcaaacatgattgccttcttgttttctgtatgtataacccgtaaatatccattttgacataggaagaactttggttaagagtaagttctctaattgtgtttgttttaaggaatgaaacttggttaagattttgactacttcattattaaaaattgatagaattttagctcctgagatatttacaactgggagaaatgtctatttaggtgtttacattaagcggtatgaaagttgttaccacataggcactggtacgaattctcaataagaatgcagtggaacagttaagtagaactgtaactacgttggcactggtacgaattctcagtgagaatgcaatgaaacagtcaactgcagtgtttctttttgatgtcttttattttacaactgggccaaagcgacattatgtatataattagtttatatttacacactagcatataggaaatatttctgcacttgacccctatttgaattctgagcattatttataagtataaaatgatgatatataagtgaattttggtgctcttgtttggtattttattaaggaaaatgaaaataatctgggcatcagtttcattttgctaaatatctagtcttcttccaacacagtatcttgggtgggtgacttggctacctgaaaaatctgagggggaatagtctcacaatacaataaatctgtagattctgcttagagcaaattatggtacttttattcagacttgtttcctttctagttaacagaaatagtgacatttagaggttttaatcagaagttaggtttttctgattcaggaacatcgtaggccagccatttgtaatttttaactttgagaaacaaattttgtgagaataggtagtgggttgctggtagttaattggatttaatatttgtattaaggattaactggaaaaaaatgtgtctcagtgctaattcttggacctttaatacagtgtgcttatctgttacggcctccttttatctctcttctccaatattaaaaaaaatggaaatcaaattattatgctgaagggaaaaatatacctgtataagaaa

SEQ ID NO: 12240 - DNA, 342 bp, Homo sapiens
  SIMILAR (1)..(339): 951254mologous to Homo sapiens p40,accession number U93564,Smith-Waterman Score=553.
atgaaggaaaaaatgttaagggcagccagagagaaaggtcgggttaccctcaaagggaagcccatcagactaacagcagatctctcggcagaaaccctacaagccagaagagagtgggggccaatgttcaacattcttaaagaaaagaattttgaacccagaatttcatatccagccaaactaagcttcataagtgaaggagaaataaaatactttacagacaagcaaatgctgagagattttgtcaccaccaggcctgccttacaagagctcctgaaagaagcactaaacatggaaaggaacaacgggtaccagccgctgcaaaatcatgccaaaatgtaa

SEQ ID NO: 12241 - DNA, 546 bp, Homo sapiens
  SIMILAR (28)..(420): 901254mologous to Homo sapiens HTPHLP,accession number AF267853,Smith-Waterman Score=601.
catcgtggaggaattcgctcactcttgtcctctggagacaaaccagaggctgtcatggtaatcgggaaaggtctgctagggactggagctcggatgccctgcatcaagactcgattgcagacctgtccgaggagagtttccgccaggaggggtcccggattccccaggctaggcccaggttgggccggggctcaccgccgactcgcagagggatgaaaggctcttcaggccccacatcccctaccccccggaccagggagagcagtgagctggagctgggatcctgctctgctacaccagggctgcctcaggccaggcccccacggccccgctctgcccctgccttttctcctatatcctgtagtctatctgactccccatcctggaattgttacagcaggggtcccttgggccaaacctgaggtttgttttggtccctaaatctcccccactgactgtttctccccgggtctgaataatgcctttaatgttcaatccaggaatatagccccaagatggggtaacagtggggaaaatatgctagtt

SEQ ID NO: 12242 - DNA, 474 bp, Homo sapiens
  SIMILAR (186)..(1): 961254mologous to Homo sapiens BM-003,accession number AF208845,Smith-Waterman Score=327.
atggtccttgccttcagagacctcatgtctagcatggggacagacgcggacccatgggctctgggcctgcgggatttgaagtcttcacgaatgaaaggcggagacctgaaggatgggcagtacctcctggcagagctggaggaaggtattctggggcgtggaaagagcgaggccagtcctgagaatgccgcgcgggagcggagccgggtcaggacgctgcgccaggccttcttggctatgcaggctgctctgcctgccgtgccgcccgacaccaagctctccaagttggacgtgctggtgctcgccgccagctacatagcccacctcacccgcacactcggccacgagttgcctggccctgcctggccgcccttcctgcgtggactccgctacttgcaccctctcaagactgtgactcatgcttatgggcctggattttctaccagcccccagattctcagccatcagacttga

SEQ ID NO: 12243 - DNA, 966 bp, Homo sapiens
  SIMILAR (253)..(540): 451254mologous to Homo sapiens PRO2221,accession number AF116695,Smith-Waterman Score=202.
atggtccttgccttcagagacctcatgtctagcatggggacagacgcggacccatgggctctgggcctgcgggatttgaagtcttcacgaatgaaaggcggagacctgaaggatgggcagtacctcctggcagagctggaggaaggtattctggggcgtggaaaggctgctctgcctgccgtgccgcccgacaccaagctctccaagttggacgtgctggtgctcgccgccagctacatagcccacctcacccgcacactcggccacgagttgcctggccctgcctggccgcccttcctgcgtggactccgctacttgcaccctctcaaggtgccaaggtgcccagagaagtacagcgcaagcatatctgacctccttcagcccattcatcttacagatggaaaggagcgcagaaagtttaagaaaaaggccagggagcagttgctcactcttgtcctctggagacaaaccagaggctgtcatggtaatcgggaaaggtctgctagggactggagctcggatgccctgcatcaagactcgattgcagacctgtccgaggagagtttccgccaggaggggtcccggattccccaggtaacacatttggttgctgctgctaggaacagccctgccaccaactccgattcagtccagatccccatgctagctctggggactgggcgctacagccccgggccgttacctggggcggagaaagcgccactttcattcctgcttcttgggattgttgacggccacgtagtgatagagaacgacaagcaagaagagcgacacgcccagcatgttggcgaagatggcgagctgcacgccagccacggccacggccacggcggggctgggcccgtggaacggcccctgcgtgcctctgacctgaccagtccggctcggctccgacgccaccagcgaacaagcccgaagtcagagacctggaccggaacttcgtag

SEQ ID NO: 12244 - DNA, 543 bp, Homo sapiens
  SIMILAR (415)..(335): 771254mologous to Homo sapiens Fragment of human secreted protein encoded by gene 112,accession number W75048,Smith-Waterman Score=96.
gtcgacttttttttttttttttttttgggaccacaaaaaaaagtctatatttttatattggggggaggtgtgagaatttgcaagcccccgtatactgggccctcgattctagtggcaggctttctttgttccataggattaaggaagactcttgaggaaataaaagttgtttggaaaaatcccaggtgtagttgctttgtatgttgtgatgggtagaagggatgaaagtgaagtgttgaaggcccctcataccctccatcttgcctcgagactatgtcctggaaccctagaaaagagggggaaagacctggggcggagaaagcgccactttcatttcctgctttttgggattgttgacggccacgtagtgataggagaacgacaaggcaagaaggagcgacacgcccagtatgttgtgatgggtagaagggatgaagtgaagtgtgaaggcccctcataccctccatcttgcctcagactatgtcctggaaccctggggcggagaaagcgccactttcattcctgcttcttgggattgttgac

SEQ ID NO: 12245 - DNA, 2148 bp, Homo sapiens
  SIMILAR (457)..(2079): 971254mologous to Homo sapiens membrane protein CH1,accession number AF097535,Smith-Waterman Score=2647.
atgccccaacccccaggccacagaccagcaccagtccatggcctgttaggaaccaggcgcacgacaggtggtgagcagcagagctctgattatacaaaaccaggagacattgaccctacatcagtagcaagtcccaaagatccagaagatataccaacatttgatgaatggaagaagaaagttatggaagtagaaaaagaaaaaagtcagtcgatgcatgcatcttctaatggaggttcacatgccaccaaaaaggtccagaaaaatcgaaataattatgcctcagtagaatgtggtgccaaaattctagcagctaatccagaagccaagagcacatctgctattcttatagaaaatatggatctttacatgttgaatccttgcagcactaaaatttggtttgttattgaactttgtgaaccaattcaagtaaaacagcttgatattgcaaattatgaattattttcttctactcctaaagattttctggtttctatcagtgacagggtatttggcactagcatggtggaagaatatgaagaaattgctgattcccagtatcactcagaacgccaggaactatttgatgaggactatgattatccactggattataatactggagaggataaatcctcaaaaaatcttcttggttctgctacaaatgccattctaaatatggtgaatattgctgctaatattctgggagcaaaaactgaagacctgacagaaggaaataaaagtatatctgagaatgccactgccacagctgcacctaaaatgcctgaatcaactcctgtttcaactcctgttccatctcctgagtatgtaaccactgaagtacacacacatgacatggagccgtcaacaccagatactccaaaagagagtcccattgtacagttagttcaagaggaggaagaggaggcaagtccatctacagtgacccttctgggcagcggtgaacaggaagatgaatcatcaccctggtttgagtcagagacacaaatattttgcagtgaactgaccacaatttgttgtatttctagtttttcagaatacatatataaatggtgttcagttagagttgctctttatcggcagcgcagccgaactgctttgagtaaaggaaaagattatcttgtgttagctcaaccacccttactacttcctgcggaatcagtagatgtttcagtattgcaacctctgagtggagaattggaaaatacgaatatagaaagggaagctgaaactgttgttctgggtgatttaagtagtagtatgcaccaggatgacttggtgaatcacactgtagatgcagttgaacttgaaccaagccattctcaaactctttctcagtctcttcttttagatattaccccagaaatcaatcccttgcctaaaatagaagtatctgagtctgttgaatatgaggcaggacatataccgtcaccagtgattccccaagagagttctgttgagatcgataatgaaacagaacaaaagtctgagagctttagttctatagagaaaccatctattacctatgaaacaaataaagttaatgagttaatggataatattataaaagaagatgtgaactccatgcaaattttcacaaagctgtctgaaacaatagtgccaccaataaatacagccactgtacccgacaatgaagatggggaagccaaaatgaatatagctgacacagcaaagcaaactttgatttctgttgtggattcttcttcattacctgaagtaaaagaagaagaacagtctccagaagatgcccttttgagagggttacagaggacagctacagatttttatgctgaattgcaaaattctacagatctaggatatgctaatggaaatcttgtacatggatcaaaccaaaaggagtcagtatttatgagacttaataatcgtattaaagccttagaagttaacatgtctctcagtggtcgctatctggaggagcttagccaaaggtaccgaaaacaaatggaagaaatgcaaaaggctttcaataaaacaatcgtgaaacttcagaatacttcaagaatagcagaggagcaggccctggtgtgtgatgttccccaccctgtgtccaagtattctcattgttcaattcccacctatgagtga

SEQ ID NO: 12246 - DNA, 1884 bp, Homo sapiens
  SIMILAR (3)..(626): 641254mologous to Mus musculus MAIL,accession number AB020974,Smith-Waterman Score=689.
atggccttcctagaaacttctgcacccctgtatgaacacatatggacacttcaggttgctttctccactgttggtctgggagagaccctgaaagttgccatgatcagcatgtccacatcatctgggtattttcttcagctattacaatactgctgctcctcaaccatcaccatcactggatacaagggcttcctaagagacctgaaggtggagacaagggccgatggtgtaatgaggacaatggctcccgaaaagctgctaaagagtatgccaatactacagggacaaattgatgcactgcttgaatttgatgtgcatccaaatgaactaacaaatggtgtcataaatgcagcatttatgcttcttttcaaagatcttatcaaactttttgcttgctacaatgatggtgttattaacttactcgggacatggatgaagctggaaaccatcattctcagcaaactattgcaacgacagaaaaccaaacactgcatgttctcactcataggtgggaatcgaacaatgagaacacttggacacaggaaggggaacatcacacaccagggcctgttgtgggaaaagttttttgaaatgaagaaaggacaatgtaaagatgctctagaaatttacaaacgatttctaactagaatgacacgagtgtctgaatttctcaaggttgcagagaacctagaacagagccttgaccctctgaaagcgctcagaaacgaaaccgatcaactatatacaacattcaccacagtcaacccttacgggaaaaaagaatgtaaaaacaaaaagccctatccaaatgaaagcaaattgacaaagaaaaagaaaagccagctccctcagacgagaaggaatcagctcaagaacttaggcaatgcaaaaaatgcagaaaaagcatttgacaaattccagcatccgtttatgattaaaacgcttagcaaaactggcatacaagggacgtacatcaatataataaaagccatctatgacaaacccacaaccagcataatactgaatggggaaaagttgatagcatttcctctgagaactggaacaagacaagaatgcctactctcaccactcctcttcaacatagtaccggaagtcctagccagagcaatcaaacaagagtacgaaatggcatccaaattgcaagttggtattgataaaggtgacattcctgacctcacacagtcttctccagccacaactgttacgtctcctaattctacaccagctaaaactattgacacatccccaccggttgatttatttgcaactgcatctgcggctgtcccagtcagcacttctaaaccatctagtgatctcctggacctccagccagacttttcctctggaggggcagcagcagccgcagcaccagcaccaccaccacctgctggaggagccactgcatggggagcacagatttcagatccatttgcaccagaacctacccctcctactacaactgctgaaattgcaactgcctcagcttctgcctccactactacaactgttactgctgtcactgctgaagtggatctctttggagggcattttgagaatatggtaaagaaattggaggaagaaaatggtgaaagcaagagagatttggcaggctttggtgtaatcaatatgtacccctgggaacatacatttaacacactgtcacctaccactctgctacatgccatgctccagtctctaaggttggccaacatcatccaagacaaggagcactccactagacacagctttgttgccactgctgcacaaaagacattttctgctgccttgctgtccattcctatggaacaggagaaacctgtttgtaaaagagtaggagaaaaaggattgcagacccttgaataa

SEQ ID NO: 12247 - DNA, 1074 bp, Homo sapiens
  SIMILAR (1)..(504): 701254mologous to Homo sapiens TCP11,accession number AF269223,Smith-Waterman Score=556.
atggtgaactataccattcagagctttcaaccctacctgcaggagcattccatccagtatgaacaagataaattccaggaactccgtgataaacagcccagtctcctcaattataccacaaaatggctaaccaaggcagccacagacatcactacactgtgtctgagttctcctgactcacctagctcctcctgcagcatggcatgttcacttccaaactggggaggtaacaactcagagcccaccagtccaacaatggtgctataccaaggctacctgaacctcctcctctgggatcctgaaaatgaagaattatctgagactctgctgatggacagaatctggctccaggaactggcattccagttgcaccagttaactgtcctggcctcagtcttgctagtggccagaagcttctctggtgaagttttattcagatcacctgaatttgtggatatactgaaatgcaccaccaaggccctaactgaggaatttatctccagggacatggatggagctggacaccatcattctcagcaaactatcgcaaggacaaaaaaccaaacaccgcatgttgtcactcataggtgggaattgaacaatgagaacacttggacacaggaaggggaacatcacacactggggcctgttgagtctctgctacactttcctggaggcctcattctcattgaaggggagctggcagaactgggttggaagtttgtcattctgaagtatcataatcagcaggtatttggcccgtactatgctgagatcctaaaaaacatcatccatccagctcaagcacaagaaacagatagtgctgcaccccagccatggcaacaggagagaaagctgaatgagaatccagtgggccctccggtttcccttcactggctgatcattcttcagtatgctggcctgagccagaatcagggcatcaggcattcagctaaggacaggtctcagcttccacgggatttctctttctttcaagtgattctaggagtcactcctagtctggggctccaactgccaggttatgaatatcagctgactcagcatcacaaatga

SEQ ID NO: 12248 - DNA, 500 bp, Homo sapiens
  SIMILAR (1)..(270): 1001254mologous to Mus musculus alternatively spliced; truncated,accession number X91656,Smith-Waterman Score=486.
ccactccgaagtgtgtgggttgctagaaacccacccggctttgcttttgttgaatttgaagatccccgagatgcagctgatgcagtccgagagctagatggaagaacactatgtggctgccgtgtaagagtggaactgtcgaatggtgaaaaaagaagtagaaatcgtggcccacctccctcttggggtcgtcgccctcgagatgattatcgtaggaggagtcctccacctcgtcgcagagtcaccatcatgtctcttctcaccaccctctgaatctgcattagccagtcaactagccctttcagcgtcatgtgaccagcgcgccccattcagcttggctggtgtcgtttcacatgacccaggctggccagtcgtcaggttgcaccgccctttggttcccgagcatgctgttttctctcagccttctctccaaccttaaccaaatcggcagcagccacctcgaccgcccacacaattcctggccaatcagctcagctgtt

SEQ ID NO: 12249 - DNA, 362 bp, Homo sapiens
  SIMILAR (294)..(181): 891254mologous to Homo sapiens pre-mRNA splicing factor,accession number L10838,Smith-Waterman Score=183.
cagaggcggggtgggagtggggctcccgaggcagtgcagttggctgtagctgggcgcctcggttaggtgcgctgtcagtcctttccgagtgcctggcccagtctctcccgcctcggcccaacatggacttcagagaaattctcatgatagcttccaagggacaaggtgtcaacaatgtgccgaaagggacctgctccagctgtgagagaagcttctccttcttggagatctgcgacgaggtggaggactactcctacgataatcatcttgagggcgacgaccccaggagggaggccctggtgtgtgatgttccccaccctgtgtccaagtgttcttattgttcaattcccacctatgagtga

SEQ ID NO: 12250 - DNA, 1180 bp, Homo sapiens
  SIMILAR (584)..(1822): 411254mologous to Arabidopsis thaliana putative protein,accession number AL365234,Smith-Waterman Score=719.
atggccatactgcccaaggtaatttatagattcaatgccatccccatcaagctaccaatgactttcttcacagaattggaaaaaactactttaaagttcatatggaaccaaaaaagagcccacatcgccaagtcaatcctaagccaaaagaacaaagctggaggaatcatgctacctgacttcaagctatattacaaggctacagtaaccaaagcagcatggtactggtaccaaaacagagatatagaccaatggaacagaacagagacctcagaaataatgccacatatctacaaccatctgatctttgacaaacctgacaaaaacaagaaatggggaaatgattccctgtttaataaatggtgctgggaaaactggctagccatatgcagaaagctgaaactggatcccttccttacaccttatatgaaaattaattcaagatggattaaagacttaaatgttagacctaaaaccataaaaaccctagaagaaaacctaggcaataccattcaggacataggcatgggcaaggacttcatgtctaaaacaccaaaaacaatggcaacaaaagccaaaatggacaaatgggatcaaattaaactaaagagcttctgcacagcaaaagaaactaccatcagagtgaacaggcaacctacagaatgggagaacattttcgcaacctactcatctgacaaggggctaatatccagaatctacaatgaactcaaacaaattgacaagaaaaaaccaaacaaccccatcaaaaagtgggcgaaggatatgaacagacacttctcaaaagaagacatttatgcagccaaaagacacatgaaaaaatgctcatcatcactggccatcagagaaatgcaaatgaaaaccacaatgagataccatctcacaacatttagaatggcgatcattcaaaagtcaggaaacaacagggacatggatgaagctggaaatcatcattctcagcaaactatcgcaaggacaaaaaaccaaacaacacatgttctcactcataggtgggaattgaacaatgagaacacatggacacaggaaggggaacatcacacaccggggcctgttttgagggatttgaaaacttgtacagtaagaacatgcacattagttactcaaatacaaaatgtgaagagttctttgggggagaatcctg

SEQ ID NO: 12251 - DNA, 7893 bp, Homo sapiens
  SIMILAR (1136)..(684): 561254mologous to Homo sapiens Human breast tumour-associated protein 10,accession number Y48465,Smith-Waterman Score=320.
ggtcgacttttttttttattattattattattattattattattattgttacattaggttctagggtacatgtgcacaacgtgcaggtttgttacatatgtatacatgtgccatgttggtttgctgcacccgtcaactcgtcatttacattaggtatgtctcctaatgctatccctccccgcttccctgaaccccggcaggccccggtgtgtgatgttccccaccctgtgtccatgtgttctcattgttcagttcccacctatgagtgagaacagtgtggcgattcctcaaggatctagatctagaaataccatttgacccagccacccccattactgggtatatacccaaaggattataaatccatgctgctataaagacacatgcaaaccgtatgtttattgcggcactattcacaatagcaaagacttggaacccaaccccaaaatgtccatccaatgatagactggattaagaaaatgtggcacatatacacccatggaatactatgcagccataaaaaaggatgagttcatgtcctttgcagggacatggatgaagctgaaaactatcactctaagcaaagtatcacaaggacagaaaaccaaacaccgcatgttctcactcataggtgggagttgaacaatgagaacacatggacacagggcgggcaacatcacacaccagggcctgttgaggtgtgggggactttgcaaaggattcctcagttgtctgcagctgatcttctctgtccctagagtcaggtaaactggggctgaaggccatgaggtcggtcttgggtgggccctcaccagagcacaccctcggcctcctctgctgcgagtatgaccagctccccaccgcactggagcacaccagcgtgggcttgcccggagcgcacgcgccctcggtgggcagcgcagagcaccgcagcgcggtgtacagcagcagcgtgagcaccaaaaggctggacaccgcgcagatggcaatgatcaggtatacgttgacatccaccagcgcagcatcgggacccacagcgcccaccaacgcccgtgaggaggcctttggcgcctgtccactctccacaagtgacaccagcacagtggccgtggccgtcagcgcgggctcgccgtggtccttcaccagtaccagtaggcggtggcgcggagcgtccgtttcgtccagggcacgcgttgtgctgatctcgccagtgtacagccccacgcggaacgggatgcgcgcgccaccagtccccggctgcagctcgtacgaaagccacgcgttgtagcccgagtcagcatccaccgcgcgcacctttgccaccacgtggcccacacccaccgaccatggcaccagctcgctcactgcgccaccagtgccacccgcccgaggcgctagcagtgctggcgcgttgtcgttttcgtccagcacgaacacctgcagcgtcacgttgctgcccagaggtggcacgccggcatcgcgagcggtcacctgaaactgcagcagctctagctcctcgtggtccagcggctgcagcgcgtacaccttgccgctctccgcatgcaccgaaacgtagctcgacagcgcgcgctcccctacccgccgctctaccagcgagtaggacaccagcgcgttctcctgcgcgtccgcgtcccacgcagacacagtgaagatgtggcagcccggcgggttgttctccttcacgaacactgtgtactcgggctgcgcgaacgccggagcgttgtcgttcacatcagccacctccacagaaacactggccgtggcccacagcgaaggcgagcccccgtctcgcgcggtcaccaccagctcataggctgacacgctctcgcggtccagggcactgtccagcaccaacgagtagtaattcttgaaggtggacaccagcttgaaggggacgtgggacgtcaaggagcaggtgaccagcccattgacacccatgtctttgtcggacacgctgatcagggcgatgactgtacccagtggagcgtcctctctaattggaagtgataaagacttgaattccaaatctgggacattatcgttgttgtcttctacttccacaataactctacaatggccagaaagtgggagctgtcccttatcaatgccctctacaataatttcataggatttgctttcttcaaagtcaatatatccctttacaataatttgtccagtaattggatctatgtgaaacttggatttcacatttggcgaaatatcatttgagaatgaataaacaatgtccccattcaatccttcgtctaaatctgaggcgttaagtttaattaccaatgttccattaggaacattttctagtaatctcaccttataaatggttctgtcaaaagctggggcattgtcattggcatccagtactgtgatgagtaactgaacggtgccagtcaactcgggtttgcctccatcagtggctgtgagcactaaaaaaatctccggagcttcttctctgtctaaagatttccgtaatataagcccaagaccttttaccagctcgtcatcaggtggtttttccagagaaaagtattcatttgggctcagtctgtaagtgagcagggcgttctccccgatatctgcatccgaggcgccctctagtggaaaccgagagtcaagcggcctggattccgcgatggacaggttcttttgtgttgctgggaacaccggcgggttatcgttaatgtccctcacctccacgtccacatggaaaacctgcagcggcctgtctacgatcacctccaggtggatgctgcactccgcgctccgccggcacagctcctcccggtcgatccgagaattcacaaacaaaatgccattctgcagatttacctccagaaggcctccgcggcccttggacgccacccggaacaggcgcggcaccagctccgccagctccagtcccaggtcctgcgcgatgcggcccacgaaggtgccgtgtttggcctcctcggagaccgagtagtggagctgaccgttccctgcctcccaggctgcgaggagaagaagtaagagcagcagacgccgggattcctggccgcttccccaggaaaactccatctttagtgcacagtattttgttctgattaaatatcgtttctcaaagtcaagggaaattttggctgagagatcaacgtccacatcctgtttctcctctctatcccggctaattggacaaggaggaaggctagggctaaaagccatgaggtcggtcttgggcaacccctctccagagcacaccctctgctgcctctgctgcgagtatgaccagctccccaccgcgctggagcacaccagcgtgggcttgcccggcccacagtcgccttcggttggcggcgcggagcaccgcagagcagtatatagcagcagtgtgagcaccaacagactggacaccgcgcagatggcgacgatcaagtacacgttgacatccaccagtgcagcttccgggcccgtggcgccagcggacgcctgggacgaggccttgggtgcctggccactctccaccagcgacaccagcacagtggccgtggcggtcaatgagggttcaccgtggtccttcaccagcaccagtaggcgatggcgcggggcgtccacctcgtccagggcacgggtcgtgctgatctctcccgtgtacagccccacgcgaaacgggatgcgcgcaccgccggtcccaggctgcagctcatacgaaagccacgcgttgtagcctgagtctgcatccactgcgcgcaccttcgctaccacgtggcccgcacccactgaccgcggcaccagctcgctcactgcgccaccgatgccacccacccgaggcatcagcagtgccggcgcgttgtcgttctcgtccagcacgaacacctgcagcgtcacgttgctgcccagaggcggcacgcccgcatcgcgcgcactcacctggaactgcagcagctctagctcctcgtggtccagcggctgcagcgcgtacaccttgccgctctccgcgtgtaccgacacgtagctcgacagcgcgcgctcccccacccgccgttccaccagcgagtaggacaccagggcgttctcctgcgcgtccgcgtcccgcgcagacaccgtgaagatgtggcagcccggcgggttgttctccttcacgaacaccgtgtactcggactgcgagaatgccggcgcattgtcgttcacgtcggccacctccacggacacgctggccgtggcccacagtgaaggcgagcccccgtcccgagcagtcaccaccagctcataggccgacacgctctcgcggtccagagggctgtccagcaccaatgagtagtaattcttgaaggtggacaccagcttgaaggggacgtggggcgtcagcgagcaggtgacctgtccattgactcctgagtcgcggtcggacacgctgatcagagcgatgactgtgctaagtggagagtcttctaatacaggtaaagatagtgattgaataactaactcaggtacattatcattgatgtccacaatttcgagtagaactgtgcagtgatctgacattgggggatttcctttatccgtggcttctacctggatttcatatgacttactttcctcgaaatctatgttaccctttacactgatttgtccattgactggatctaaatggaattttgacagaatatctgctgacatgtccgtattgaaagaatacgcgatatccttatttactccttcatccaaatcggtggcgttaacggtcaccactagggtaccatttggtgcattttcgagtaatctgactttatagatcgtcctctcaaacgctggggcgttgtcgtttacatctaaaacagtgatctttagttgagtcgtgccagtgagctctggtttcccaccatcaattgctgttattagtaaataatgcttaggagtgtcctctcgatttaaattttttttcaacacgagtccaagggatttaatttcctcatcatttcttttaacgtccaaggtaaaatattcagtggaatcaagactgtaagtcaacaacgaatttgttccgatatctgcatctgatgcgccctctagcgaaaaccgagagccaggctgtcgggattcggaaataaacagattctttacagccattggaaaaactggcgcgttgtcattaatgtccttcacttccacctccacatggaaaacctgcagcggcctgtccacgatcacctccaggtggatgctgcactccgcgctccgcccgcacagttcctcgcggtctatccgagaattcacaaacaaaatgccattctgcagatttacctccagaaggtccccgtgtcttttggacgccacccggaacaggcgcggcaccagctccgccagctccagccccaggtcctgcgcgatgcggcccacgaaggtgccatgcttggcctcctcagagacggagtagtggagctggccgctccccacctccgaggcactttgctgaatttttaaagatggtagctttcctacgtattctgattctgagagctgtttctcttctgcggagtctggaccttgagataagctagggctgaaggccatgaggtccgtcttgggggggtcctccccagagcacaccctctgccgcctctgctgcgagtaagaccagctccccacggcgctggagcacaccagcgtgggctttcctggcgcgcgcgcaccctcggtgggtggcaccgagcaccgcagcgcagtgtacagcagcaccgtgagcaccaacaggctggataccgcgcagatggcgatgatcaggtacacgttgacatccaccagcgtagcctctgagcccgcggcgcccacccacgcccgcgacgaggccttgggtgcctggccactttccaccaacgacactaacacggtggccgtggctgtcaacgctggttcgccgtggtccttcaccagcacgagtaggcggtgtcgaggggagtcagcctcgtctagggcacgtgtcgtgctgatctcacccgtgtatagccccacgcggaacgggatgcgagcgctgccagtacccagctgaagctcgtacgaaagccacgcgttgtagcctgagtcagcgtccactgcgcgcaccttcgccaccacgtgccctgcacccaccgaccacggcaccagctcactcactgcgccagcagcggtgccagccctaggcgccaacagtgccggcgcgttgtcgttctcgtccagcacgaacacctgcagcgtcacgttgctgcccagaggcggcacgcccgcatcccgcgcgctcacctggaactgcagcagctccacttcctcgtggtccagcggctgcagcgcgtacaccttgccgctctccgcgtgcaccgaaacgtagctcgacaacgcgcgctcgcccacccgccgctccaccagcgagtaggacaccagcgcgttctcctgcgcgtccgcatcccacgctgacaccgtgaagatgtggcagcccggcgggttgttctccttcacgaatactgtgtactcaggctgtgcgaacgccggcgcgttgtcgttcacgtcggccacctcgatggacacgctggtggtggcccacagtgaaggcgagcccccgtcccgtgcggtcaccaccagctcataggctgacacgctctcgcggtccagggcgctgtccagcaccaacgagtagtaattcttgaaggtggacaccagcttgaaagggacgtggggcgtcagggagcaggtgacatgtccattcgtaccagagtcgcgatccgacaccgtgatgagagcaatgacagtgcccagggaagcgttctctgagatgggaagtgagagagacgttattgagacttctggtgtgttatcattgatgtccacaagttttaatgaaattttacaatgtcctgacattgaaggggttcctttgtcagttgcagtgacctgaatctcgtaggactttgcttcttcataatctaattttcccttagttctgatttcccctgagatgggatctatggtaaacttagtctgtatagtggaggacacatcactaccgagtgaatacacaatctcgctgttcggtccttcatctgcatcagaagcgtttaacttaaccactaaggtcccatttgccgtattctctaacaattttactttgtaaactgattgggcaaaagttggttcattgtcatttacatctaataccttaataagtatttgaacggtgcccgtgagctcaggtttgcccccatcagtagccaccagtaacaaattaacctcagcagtttcctctctgtccagcgatttccccagcacgagagacaaagattcgcttagttcatcatttgcctgtatatctaggaagaaaaactcactggagctgagcttgtaggagagaagagcatttactcctatatctgcatcagatgctccctctagaggaaaccgagaatcaagcagccttgattcgggaaaccggatagtctttactgtcattggaaatattggcgggttgtcgttaatgtccttcacctccacttccacatggaaaacctgcagcggcctgtccacgatcacctccacgtggatgctacattccgcgctccgcccgcacagctcctcccggtcgatccgagaattcacaaacaaaatgccattctgcagatttacctccagaaggtccccgtgtcttttggacgccacccggaacaggcgcggcaccagctcctccagctccagccccaggtcctgcgcgatgcggcccacgaaggtgccgtgtttggcctcctcggggacggagtagcggagctggccgctccccacctcccaggctgcgaggagcagaagcgagagcagccgtgtccaggcccctcggccccttctgatagaagacgccat

SEQ ID NO: 12252 - DNA, 842 bp, Homo sapiens
  SIMILAR (1297)..(3024): 911254mologous to Homo sapiens putative p150,accession number U93574,Smith-Waterman Score=2762.
cgtggacgccgggtgagtgagagagttggttggtgttgggccggaggaaagcgggaagactcatcggagcgtgtggatttgagccgccgcattttttaaccctagatctcgaaatgcatcgtgattcctgtccattggactgtaaggtttatgtaggcaatcttggaaacaatggcaacaagacggaattggaacgggcttttggctactatggaccactccgaagtgtgtgggttgctagaaacccacccggctttgcttttgttgaatttgaagatccccgagatgcagctgatgcagtccgagagctagatggaagaacactatggtggcctgccgtgtaagagtgggaacttgtccgaatgggtgaaaaaaagaagtagaaatcgtggcccacctccctctttggggtcgtcgccctcgagatgattatcgtagggaggagtcctccacctcgttcgcagatctccaaggaaggagaagcttctcttcgcagccggagcaggtccctttcttaggagatagggagaaagagagagatcgctgttttcggggagagaaaatcacaagccgtcccgatccttctctaggtctcgtagtcgatcttaggtcaaatgaaaggaaatagaagacagtttgcaagagaagtggtgtacaggaaattacttcatttgacaggagtatgtacagaaaattcaagttttgtttgagacttcataagcttggtgcatttttaagatgttttagctgttcaaatctgtttgtctcttgaaacagtgacacaaaggtgtaattctctatggtttgaaatggatcatacgaggcatgtaataccaagaatg

SEQ ID NO: 12253 - DNA, 2402 bp, Homo sapiens
  SIMILAR (1)..(279): 861254mologous to Homo sapiens This gene is similar to tre oncogene(X63547),accession number D29956,Smith-Waterman Score=420.
atggatgaagctgcaaaccatcattctcagcaaaccatcacaagatccgaaaaccaaacacctcatgttctcactcataagtgggagttgaacaatgagaacacatggacacagggaggggaacatcacacaccagggcctgtcaggggtaccttgggacaactgacatttgcaagacttaacctgagccccatcagttacaagagtttggaggcctcagctgtcacttctgtttccatggaaactcaaatcagattgccaaaaatgaggttttggtatcaggatgatgctggcctcataaaatgtgttggggaggagttgctctttttctattgtttggaaccatttcagaaggaatggtaccagctcctctctgtacctctggtagaatttggctgtgaatccgtctggtcctgggctttttttggctgggacatggatgaagctggaaaccatcattctcagcaaactaacacaggaacagaaacccaaaacacttgcatgttctcactcataagtgggagttgaacaatgagaacacatggacacagggaggggaacatcacacaccagggcctgttgggggatgttcacttatccaagtggaaatcagatggtttatcgaaatggtatgtaagagagaagtttacagatacgaccattcatggtggtggcagttgcagcaacagcagcaggatccccagggcagactgcaggcctctgggggctgggctctcagaagggtgccaggccacagccaaaatgctcaggcagaagcaaggtggctgtactgtgagcctagggaaggcaggtcccccttagcgggaacagtgaaagcaagggtgctcaatgtgcttgctcctttaccctgcagcagcagcagccgtgatacacatttttgggcttcctcaggcatgagccaaatatcagacactctatccctcaaactccaagagaccctcacgttcctcaacatccttctcttccaaagaaagggagaggggaagaacagcatgtcaacaacactctccaaagaattcctgactctcagcttctttgacttcaacctgtttcaaaactcaatgttggaagttctggccagggcaattaggcaggagaaggaaataaagggtattcaattaggaaaagaggaagtcaaattgtccctgtttgcagatgacatgattgtatatctagaaaacccccttgtctcagcccaaaatctccttaagctgataagcaacttcagcaaagtctcagaatacaaaatcaatgtacaaaaatcacaagcattcttacacaccaataacagacaaacagagagccaaatcatgagtgaactccccttcacaattgcttcaaagagaataaaatacctaggaatccaacttacaagggatgtgaaggacctcttcaaggagaactacaaaccactgctcaatgaaataaaagaggatacaaacaaatggaagaacattccatgctcatgggtaggaagaatcaatatcgtgaaaatggccatactgcccaagaccattacttttaacactttcatcaaccctgaaagtcaaaagcattctaacataagctacaaccttcttgtccttgtattacacctttctacagaaagagaaaataaaaatgagttgagtttacaggttgctgacaagtttggtgaaatgtctgctggagaaagaggcaaaatgacccaaaaggaaactcccgggcctgttgactctgagcaagctggggcagaacgcttccgagggctctctggagctcagacggcgctcagcgaacaactttttgacgtgaaggaagatagaaatttagccataaaattccatccaaaacttccactgaattggagtgaaagggaagcaatgcagaaatcagagggctctggaggtacacagttgaaaaacagagcaacaggtaactatgatcaaaggacatcatcaagcacacagttaaaacacaggaatgcagttcagggaagcaaatcctcattgtcaaccagttctccagagtctgcaagaaaacttcatcctagaccaagtgataaactgaaccctaaaacaattaatccgggtctgagagagactaagcatccatacacttttgtgtcaaaggagggttttagagaattacttttggtcaaaggtgctcctgaaaaagctattcctttgctacctagactgattcctgtgctaaaggcagctctggtccattcggatgatgaagtgtttgaaagaggattgaatgctctagttcagctaagtgtcgttgttggtccttctctaaacgaccatctgaagcatctgcttacaagcgccctggtgtgtgatgttccccttcctgtgtccaagtattctcattgttcaattcccacctatgagtga

SEQ ID NO: 12254 - DNA, 4152 bp, Homo sapiens
  SIMILAR (318)..(3155): 901254mologous to Homo sapiens This gene is similar to tre oncogene(X63547),accession number D29956,Smith-Waterman Score=4238.
tcagcctcctgagttgtcctcttcagcatcccccaggtgacgtccggggcttgtgtcatccatggaagcctcatcgtctggggctgtggatcctgtagggtcagttccttcatctccggtaccaggttggatccagactgctgcttttccatgtttaccagaaccatcagtaaacagtgttaaagcattaggtatgggggagtgaactatttttgtgggtaagattaccagggtatgagataagaaataaaggagtttatcagcaggaagtatgtgctctatttgtcctgtgtaatcagagaaagctatttgcagattaatagatactggcaatactgctttgaattgctttttacttaaaggaatcctgatgacatcagggtcataacctagtgactgattgcattgtttgtggcctgaatagatgactttagtaagtaactgactatagggagatagtgttttagtcccggtatgtggcaaaaaacccattctaggaagcatagcccgggggccatctgtcctattaaccctgtaggggagtgtttggtgagaaagataaaacaattggattgaataacgtggatcaatgcgatctagctgcccctgagagacggcttgttctatttcctcaatttccctttttgctgcaggggttaaatatccaaagccaagtttctggccagttttgatcactaatgattgaaatgtctgcccctgtgcccagtaagccagtaaaattcttatttccaatttcttcatgggtccttgatcagtgattaattgattccaatatactcctgtggctcctgtgctcccaaaacttcccttccccctttcctttccatagagactggggacccagtatgataaaatcagtaactgagctatctttgatccagggggaagaatatgcagacctttacagtccatcataaccaatatctctctgtgataatcactatcaattaccacggtgagcacattaattcctttactagataggctagaccaccctaggactaatcccactgttcctggaggcagcaggccccagatcccggttgcaacccttttagggtcttctccttcttttagcattaatttgttgaggcagagtaagtccagtcctgtgctccctgtggtggctgctctgagagagaggactgtgggcttcccatctgatcgaggaaagctgctggcattgccccagttgcgagcggggcctggggcttgctccttgatgaggggatcaaggtagcggatgctgtgagcatcatgagtcaccagatgagggattccttttgtgcccacaaagatttttctcactttacccaatttgtacttagcctcctcgggtgtaatacgatgtacagcaaagcgacccttggtgtcatagatcagatggaaattatctcccgtcttgtcaatgctgatgacatccatgaatccagcagggtaggttatatcagttcgtaccttgccatcaaccttaatgaacccctgcatgcaaatctttacttcatctcctgtcagggcatacttaagtctgttccttaggaaaatgatgagggggagacactctctcaacttgtgaggacagagttggttttctgattccttctcatttgggtaggctctgtcagagggaaggtctagggctgaaggctgttgttcagattcttttgtcctgcagggtgttctcttgatgtagtactctcccccttttcctatggatgtggcttcttgctctcccacttcatggagacttctgagcttggattcttccattttctctgaatctagctcttcaactagagctatccccgcatcctggcttgatgccatactcaattctttgttgggagctgagtaccaaggcaccagtttgcggccatcacggcgcttagcctcagtccaggagccactgtaggagcctgccatccactgaacactgaagccactgctggttttctgcactactcttgcaatttgtggtcgatctttgtactttggacagcaaatagcgatgacatccatgacgtcaacactttcattcatctgtgctgccaactccgtagagtctgaatttcgttttgaccttctcaatgaccctgaagtgcctcctcctctatcctccccatcactttcatcatcttctgtctctgctgctgtattatttttagggctgcctcctccaagcagtgaggtaattgctttgttccgagcatttgtgctagctgaaacctccccttcttcttcttcttcatcagggtccagatgttccatgagaagtttgaaatctagatactgttttactatactccttttcacctcttctgtgattttggaattagccatgtcactccgcaggaagtccagtgtttgttttggatgaaaatgaactcctgtttttcggtttatcgctttatcatatacttttgcagattcagatggagagtacttctgaattttactatcagaaaatccacaaagattcttcaaatgttgttttaacatgagaagtaataaaataccctgggacacatttgcaaattcgattaaaggagctgaattttctggcaaacatttcatcactgaatttatatcgtcttctgaatctgaatctgaatctgaatctacacgtttccgtgacttccgaggcctggaaacttcttcttcactgtcgcttgactcattttccttactaggtgatgattttctctctttccttttgtcctttaccatagatgctgtgtcatcaaagaggttgagtaaagaaataagaaaggctcgtctgtgttggcggtttccacggatcatggagtaaaggtgtgaacacaaagcgctagaggactcgtcttgtctgaaaccccttacaggatcttttaggcatgtgttgattgcctgttgtacctggtaagacatcttcataccagccactgctttcatatgaatgaatccagcatattttttgtctatttccacaagttgctgatcagccttgttccgcatagcaggttctgggtctgtgcccatagcaattaaatatggcacacactgaactggatgaataagaccttgatttagagtcaatgcaatgacatttagggcaaagtggcgtacacttgactgggtgtgaaaaaatgcctcaagcacctgtttgagataaagctgcatgatggaactactcatccctgaggaaacatcacccatttcttttaagtcttcctgttttgcaactttcttccagtctctatctgcctgctgcatacgtgtatcttcttcttgtaggtaggtctggaggttttttaacacttgtatttttaaattgactgaggagttcttatcagataaaatattattatatagattcttcacttcttgctcgaacattagacttggatgctgaataaaggcaaatcctagaccaatgatagcttttgtttgtacttcttcatctgagtgttttgtaaaatacatcaatagttcaagtactttatcttttatgttaaccttgctgttgcctttaaaatcttccagatcaaaatcaaaatgccgacatagtgctccaacggtgaaaagggatctaagaagtgctggtttgtttgttagaagtgaagtgttatttgggtcctcttggtgttgactttttaattttgaaatggcaccatagtatctattgaaacaagcccacacaaatttaaaattttgtgtcactttatttacaacagctccaagacagctcacacaatgttgcactacagtcatgccatatttgatgatgagcttcattagatcttcctcaatagtggcaagaaaagtttcacttggatgctccatcagtggtacaactagctctaggatttttgcaacattgcagataaccatgaaatcattttgcgtactacatttagtggtaaggtatggttgcatagtcattgcatgtttaaccatgagctggggtcttattttgctgaataagaacaaagtggttatgcaagctaccaatcttccagaattcacacctttattgtcagagtcagctagagattcctcatatttaagaatgtgctcaactaggttatcaacaagttgagtacaagctttcttcacaggtttatatgaggaatcctcttcggacttcaacaa

SEQ ID NO: 12255 - DNA, 3801 bp, Homo sapiens
  SIMILAR (418)..(2238): 821254mologous to Homo sapiens putative p150,accession number U93569,Smith-Waterman Score=2508.
atgagaacagacacaacataccagaatctctgggacacattcaaagcagtgtgtagagggaaatttatagcactaaatgaccacaagagaaagcaggaaagatccaaaattgacaccctaacatcacaattaaaagaactagaaaagcaagagcaaacacattcaaaagctagcagaaggcaagaaataactaaaatcagagcagaactgaaggaaatagagacacaaaaaactcttcaaaaaattaatgaatccaggagctggttttttgaaaggatcaacaaaactgataaaccactagcaagactaataaagaaaaaaagagagaagaatcaaatagacgcaataaaaaatgataaaggggatatcactaccaatcccacagaaatacaaactaccatcagagaatactacaaacacctctatgcaaataaactagaaaatttagaagaaatggataaattcctcaacacatacactctcccaagactaaaccaggaagaagttgaatctctgaatagaccaataacaggatctgaaattgtggcaataatcaatagcttaccaaccaaaaagagtccaggaccagatggattcacagctgaattctaccagaggtacatggaggaactggtaccattccttctgaaactattccaatcaatagaaaaagagggaatcctccctaactcattttatgaggccagcatcatcctgataccaaagctgggcagagacacaaccaaaaaagagaattctagaccaatatccttgatgaacattgatgcaaaaatcctcaataaaatactggcaaacagaatccagcagcacatcaaaaagcttatccaccatgatcaagtgggcttcatccctgggatgcaaggctggttccatatacacaaatcaataaatgtaatccagcatataaacagaaacaaagacaaaaaccatatgattatctcaatagatgcagaaaaggcctttgacaaaattcaacaacgcttcatgctaaaaactctcaataaattaggtattgatgggacatatttcaaaatgataacagctatctacgacaaacccacagccaatatcatactgaatgggcaaaaactggaagcattccctttgaaaactggcacaagacagggatgccctctctcaccactcctattcaacatagttttggaagttctggccagggcaattaggcaggagaaggaaataaagggtattcaattaggaaaagaggaagtcaaattgtccctgtttgcagatgacatggtatgtctagaaaaccccattgtctcagcccaaaatctccttaagctgataagcaacttcagcaaagtctcaggatacaaaatcaatgtacaaaaatcacaagcattcttatacaccaacagacaaacagagagccaaatcatgagtgaactcccattcacaattgcttcaaagagaataaaatacctaggaatccaacttacaagggatgtgaaagacctcttcaaggagaactacaaaccactgctcaaggaaataaaagaggatacaagcaaatggaagaacattccatgctcatggataggaagaatcaacatcgtgaaaatggccatattgcccaaggtaatttacagattcaatgccatccccatcaagctaccaatgactttcttcacagaattggaaaaaactactttaaagttcatgtggaataaaaaaagagcccgcatcaccaagtcaatcctaagccaaaagaacaaagctggaggcatcacactacctgacttcaaactatactacaaggctacagtaaccaaaacagcatggacctggaagacccccttgccaaataccgtgggtgccccaactgcggaagtgggaaagggagaaccccgcctctcccaaacacacacccccactggagaagctgaagaacaggcgctggtatccacggctgagagacccatagatggctcacatcacaggactctgtgcacacacccccccagtagaagccaagagccaagtagactcactgagtggctagacccagaagagagacaacaatcactacagctaggctcacaggaagacacacccataggaaaagggggagagtactacatcaagggaacaccccgtgggacaaaagaatctgaacaacagccatcagccctagaccttccctctgacagaggctacccaaatgagaaggaaccagaaaaccaactctggtaattaatatgacaaaacaaggctctttgacactccccaaaaaatcacactagctcaccagcaatggatccaaaccaagaaaaaaatccctgattaacctgaaaaagaattcaggaggttagttattaagctaattagggaggcaccagagaaaggtgaagcccaatgcaaggaaatccaaaaatcaatacaagaagtgaagggagaaatcactcagggaaatagatagcttaaagaaaaaaacaataaaaagttcaggaaactttggacacacttttagaaatgcgaaatactctggaaagtctcagcaatagaattgaacaagcagaagaaagaaattcagagcttgaagacaaggtctttgaattaacccaatccaacaaagacaaagaaaaaagaataagaaaatataaacaaagcctcaaagaagtatgggattatgttaaaggaccaaacctaagaataatcagtgttcctgaggaagaagagaattctaaaagcttggaaaacatatttggggaaataatcgaggaaaacttgcccagccttgctagacacctagacattctaaatacaagaagcacaaagaatacccaggaagttcatcgcaaaaagatcttcacccaggcacactgtcatcaggttatccaaagttccaaagttaagacaaaagaaagaatcttaagagctgtaagacagaagcaccaggtgactcacctaacatgtaaggagtcatataaacttaaagtaaaagggtggaaaaggcattttatgcaaatggacaccaaaaatgagcagggaattaaaaatgaaaatcacttgatcatctcaatagatgtagaaaaagcatctgacaaaatccagcaacgctttatgattaaaactcacaaaatcggcatacaagggacatacctcaatgtaataaaagccatctatgacaaacccacagcaaacataacactgaatagggaaaagttgaaagcattccctctgagaactggaacaagacaagaacatctgctctcaccactcctcaacatagtactggaagtcctagccagagcaatcagacaagagaaagaaataaggggcacccaaatcggtaaagaggaagtcaaactgtcactgttcgctaatgatatgatcatctacattgaaaatcctaaagactcctccagaaagctcctggaactgataaaagaattcagcaaagtttctggatacaagattaatgtacacaaatcagtagctcttctacacaccaccagcaaccaagcagagaatcaaatcaagaacccaacccctattataatagttgcaaaaaaaatcaaatactcaggaatacacctaaccaaggagtcaaaagacctctacaaggaaaactacagaatgctgctgaaagaaatcatacatgacacaaacaaatggaaacacatctcatgctcatggatgggtgcaatcaatattgtgaaaatgaccatactgctaaaagcaatctacaaattaaatgcaatccctatcaaaacatcaccatcattcttcatagaattagaaaaaaaatgctaa

SEQ ID NO: 12256 - DNA, 258 bp, Homo sapiens
  SIMILAR (94)..(255): 851254mologous to Homo sapiens c-myc binding protein,accession number D50692,Smith-Waterman Score=234.
atggcccattacaaagccgccaacttgaagcgtgagcagttccggaggtacttggagaagtcaggggtgctggacacactgaccaaggtgttgcatcacttaggaactgctaccccagaaaatccagaaatagagctgctgtgcctagaactggcgaaaacgaaagagaaatataaagctattgtagaaaaaaataaaaaactgaaagcaaagcttgctcagtatgaaccacctcaggaggagaagtatgctgaatag

SEQ ID NO: 12257 - DNA, 557 bp, Homo sapiens
  SIMILAR (664)..(1803): 801254mologous to Homo sapiens unnamed protein product,accession number AK001676,Smith-Waterman Score=1431.
atgtcgcgccgacctgaattcccggatcgacgatttcgttcccaacccgtcagtcgcggtctccggcgccagctacgccgttgccgctgtgactatggcccattacaaagccgccgactcgaagcgtgagcagttccggaagtactttgaaaaagtcgggggtgctggacacgctgacccaaggtgttggtagccttatatgaagaaccagaagaaacttaacagtgctttggatttttttaaagcatcacttaggagctgctactcccagaaaatccagaaatagagctgcttcgcctagaactggccgaaatgaaagagaagtatgaagctattgtagaagaaaataaaaaactgaaagcaaagcttgctcagtatgaacccacctcaggaggagaagcgtgctgaattaggattcttctcagtttgaaagacaatgaaaaatggtttttgtatggacttggaatagtttgtatagtattataatcttttctgaacagatgctatagaactcttttaatatgtttaattcacctatcacactctgttaaaaacac

SEQ ID NO: 12258 - DNA, 860 bp, Homo sapiens
  SIMILAR (1)..(978): 951254mologous to Homo sapiens putative p150,accession number U93563,Smith-Waterman Score=1678.
  misc_feature (1)...(860): n = a,t,c or g
ttttttttttttttttttaagcattttggttatttttagttaaaagaaaaaccagctttgctccaaaggcgaccaaagtgaaacctaaaggtcagaaggaagctgggttccgggctttcctgcaagactcttgcctcccaaaaacctggaaattgaggagagggccgcttccggagcttctggggaaaggttggtgcaacaacaggggttcccgttggtgggggccgaagaagaccccccagccccaccacacggtccaactggattgggtgtgaagtggggttccccaaacgaactgcccatgtggctaagtcccacttgaccatgaattggaccatttaaccaattccttgggggggcaattaaaaattaaggaaatggacacagggaacccaaacagagtggccttaattcggtttggattcctgaattcaacaaatcaggaaaatagtcctttancctgggtgcaaacccataatttcatttttccttgggagcgaatttcgaaggaaggtgaagatcgttcctgggggtcgatgttcaacgcaccggtgctccgtgcccttcaggatgaagctagtgcatgaaggctggcatactagggtggtaggtgggggtgtcccattgtgctcttgatgggaaatgcccttctgtgttncacgacgatgatttccctgcacttcccttctggcttctgcagtcgctttcagtgtctcctccaacctctgcccagggtggagtgcagtggtgcagtcacggctcactgtagccttgacctcctgggctcaggcgatctctccacttcagccatttccgaccgatccggtagccccgcgtagcgaacacttagcgagtcctgt

SEQ ID NO: 12259 - DNA, 450 bp, Homo sapiens; identical to SEQ ID NO: 5563
  SIMILAR (1)..(168): 1001254mologous to Homo sapiens Human secreted protein, SEQ ID NO: 7284,accession number G03203,Smith-Waterman Score=298.
  misc_feature (1)...(450): n = a,t,c or g

SEQ ID NO: 12260 - DNA, 2037 bp, Homo sapiens; identical to SEQ ID NO: 5565
  SIMILAR (924)..(2006): 941254mologous to Homo sapiens putative p150,accession number U93563,Smith-Waterman Score=1816.

SEQ ID NO: 12261 - DNA, 327 bp, Homo sapiens
  SIMILAR (31)..(156): 1001254mologous to Mus musculus synbindin,accession number AF233340,Smith-Waterman Score=213.
atgggggagtcctggaggattggatttggagggatcaagtttgtggttctagcagatcctaggcaagctggaatagattctcttctccgaaagatttatgagatttactcagactttgccctcaagaatccattctattccttagaaatgcctatcagtgctccagccggtgaggagtaccagctggagaatccttttgtcctagtaaccccggcaacgggatgcctaatctcagacccccagcagccccaaaggttccacccagaacttgtggctgcccagagctcagctccgaatcccaacctggaacctccgctgggggaatga

SEQ ID NO: 12262 - DNA, 989 bp, Homo sapiens
  SIMILAR (598)..(1473): 941254mologous to Homo sapiens putative p150,accession number U93574,Smith-Waterman Score=1453.
attcggcacacggggcaaggcagcgatggcgatttttagtgtgtatgtggtgaacaaagctggcggcttgatttaccagttggacagctacgcgccacgggctgaggctgagaaaactttcagttatccgctggatctgctgctcaagctacacgatgagcgtgtgttggttgctttcggccagcgggacggcatcccgagtgggtcatgcagtgctggccatcaatggcatggacgtgaatggcaggtacacggccgacgggaaagaggtgctggagtatctgggtaaccctgctaattacccggtgtccattcgatttggccggccccgcctcaacttctaatgagaagcttatgctggcctccatgttccactcgctctttgccatcgggctcccagctgtctcctgaaccagggaagctcaggcattgagatgctggagacagacacattcaaattgcactgcctaccagacactgacagggatcaagttttgtggttctaagcagatcctaggccaagctggaatagattctcttctccgaaagatttatgagatttactcagactttgccctcagagaatccattctaattccttagaaatgcctatcaggtgtgagctctttgaccagaacctgaagctagctctggaggtggcagagaaggctggaacttttggacctgggtcataggctgaacctgttatggacccccaaattctgagagttcctgcaacaagaatactgctgttggacactccagtggaaatcccagcagccttgttagtgcacttgaaagtgggagaatgctgaccctggatgacttgtactgattcctgagccttaacactgtgctctttccttctgtatataccatggtcttactttccaactctgtacagatttatttatggaggagctaggtccataaatgttgtaataaatattcctttgatcttggtgtttgcaaaaaaaaaaaaaaaaaaa

SEQ ID NO: 12263 - DNA, 1660 bp, Homo sapiens; identical to SEQ ID NO: 9412
  SIMILAR (1)..(684): 921254mologous to Homo sapiens putative p150,accession number U93564,Smith-Waterman Score=1060.

SEQ ID NO: 12264 - DNA, 1117 bp, Homo sapiens
  SIMILAR (475)..(1167): 451254mologous to Homo sapiens steroid receptor RNA activator isoform 3,accession number AF293026,Smith-Waterman Score=361.
gagtacagaaacccaacagacagtggaggttagtgcaagatctcaggatcatcaatgaggctgttgtccctctataccaagctgtacgtaacccttatactctgctttcccaaataccagaggaaacagggtggtttacagtcctggaccttaaggatgcccttttctgcatcgctgtacatcctgactctcaattcttgcttgcctttgaagatcctttgaacccaacgtctcaactcacctggactgttttaccccaagggttcagggatagcccccatctatttggccaggcattagcccaagacttgagccagttctcatacctggacactcttgtccttcggtacgtggatgatttacttttagccgccccttcagaaaccttgtgccatcaagccacccaagtactcttaaatttcctcgccacctgtggctacaaggtttccaaactaaaggctcagatctgctcacagcaggttaaatacttagggctaaaactatccaaaggcaccagggccctcagtgaggaacgtatccagcctatattggcttatcctcatcctaaaacccgaaaacaactaagagggctccttggcatcacaggcttctgccaaatatggattcccaggtacagcgaaatagccaggccattacatacactaattaagaaaactcagaaagccaatacccatttagtaagatggacacctgaagcagaagcagcttttcaggtcttaaagaaggccctaacccaagccccagtgttaagcttgccaacggggcaagactttttccttatatgtcacagaaaaaacaggaatagctctaggagtccttacacagcactatggagaggaaaggaattcctgacttccgacggaatacctatcaaacatcaggaagccattaggagattattattggctgtacagaaacctaaagaggtggcagtcttacactgccagggtcatcagaaaggaaaggaaagggaaatagaagggaaccgccaagtggatattgaagccgaaaaagctgcaacgcaggaccctccattagaactgcttatagaaggacccctagtatggggtaatcccctctgggaaaccaaacccca

SEQ ID NO: 12265 - DNA, 421 bp, Homo sapiens; identical to SEQ ID NO: 8520

SEQ ID NO: 12266 - DNA, 4805 bp, Homo sapiens; identical to SEQ ID NO: 9408
  SIMILAR (458)..(168): 581254mologous to Homo sapiens Human secreted protein sequence SEQ ID NO:195,accession number Y87156,Smith-Waterman Score =242.

SEQ ID NO: 12267 - DNA, 2226 bp, Homo sapiens; identical to SEQ ID NO: 3397
  SIMILAR (421)..(1500): 811254mologous to multiple sclerosis associated retrovirus polyprotein,accession number AF009668,Smith-Waterman Score=1517.

SEQ ID NO: 12268 - DNA, 3867 bp, Homo sapiens; identical to SEQ ID NO: 4425
  SIMILAR (1102)..(3372): 821254mologous to multiple sclerosis associated retrovirus polyprotein,accession number AF009668,Smith-Waterman Score=3109.

SEQ ID NO: 12269 - DNA, 2186 bp, Homo sapiens
  SIMILAR (330)..(911): 751254mologous to multiple sclerosis associated retrovirus polyprotein,accession number AF009668,Smith-Waterman Score=701.
ctgatggcagtgtgggtcagggagggggtgttgccattactggggatggggaagctgtttcttctggcaaaaaagtttcatcagagtttacaaactcagtgtccccagctctatcagggtcctcccatacgtccccattccaagttgcagggtcccattcttttccaatcaatgccctcactttaacagtagacacctggtgagactgtgcatgcacctttcattgcaggtcagccacaaagattgttaaggacctaaaagcccaaggcctagtaaaaccatgcaatagcccctgcagtactccaattttaggagtacagaaacccaacggacagtggaggttagtgcaagatctcaggattatcgatgaggttgttgtatatgtggatgatttacttttagctgcccgttcaaaaaccttgtgccatcaagccacccaagcactcttaaacttcctcatcacctgtgactacaaggtttccaaaccaaaggctcagctctgctcacagaaggttaaatacttagggctaaaattatccaaaggcaccagggtcctcagtgaggaacgtattcagcctataccagcttatcctcatcccaaaaccccaaagcaattaagagggttccttggcataacaggcttctgccgaatatggattcccaggtacagcgaaatagccaggccattatacacactaattaagaaaactcagaaagctgatacccatttagtagaatggacacctgaagcagaagtggctttccaggctctaaaggaggccctaacccaagccccagtgttaagcttgccaatgggacaagacgttcctttatatgtcacagaaaaaacaggaatagctctaggagtcctaggagtcctgacacaggtccgagggccagcttgcaacccatggcatacctcagtaaggaaatggatgtagtggcaaagggttggcctcactgatattgaagccaaaagagccgcaaggtgggaccctccattacaaatgcttatagaaggactcctagtatggggtaatcccctccaggagaccaagccccagtactcagcagaagaaatagaatggggaacctcacgaagacatagtttcctcccctcaggatggctagccactgaagaaggaaaaataattttgcctgcagctaaccaatggaaattacttaaaacccttcaccagacctttcacttgggcattgatagcacccatcagatggccaaatcattatttactggacgaggccttttcaaaactatcaagcagatagtcagggcctgtgaagtgtgccaaataaataatcccctgccttatcaccaagctcctccaggagagcaaagaacaggccattactcaggagaagactggcaactagattttacccacatgcccaaatctcagggatttcagtatctactagtctgggtagatattttcactggttgggcagaggccttcccttgtaggacagaaaaggaccaagatgtaataaaggcactaattcatgaaataattcccagattcggacttccccgaggcttacagagtgacaatggccccgttttcaaggctacagtaacccagggagtatcccaggcattaggcatacaatatcacttacactgcgcctggaggccacaatcctcaggaaaagtcaagaaaatgaatgaagcactcaaacgacatttaaaaaagctaacccaagaaacccaccttgcatggcctgctctgttgcctacagccttactaagaatccaaaactctccccaaaaagcaggacttagcccatacaaaatgctgtatggatggcccttcctaaccaaggaccttgtgcttgaccgagagatggccagcttagttgcagacatcacctccttggccaaatatcaacaagttcttaaaacattacagggaacctgttcccgagaagagggaaagtaattattgcaccctggtgacatggtattagtcaagtcgccccagatgcagtccatggctaagatctaccacggacccctggaccggcctgctagcccatgctctgatgttgatgacattgaaggcacggcttccgaggaaatctcaactgcacgacccctactacaccccaatttagcgggaagcaattagagcagtcattggccaacctccccaacagcacttactcta

SEQ ID NO: 12270 - DNA, 1929 bp, Homo sapiens; identical to SEQ ID NO: 7522
  SIMILAR (1)..(861): 801254mologous to multiple sclerosis associated retrovirus polyprotein,accession number AF009668,Smith-Waterman Score=1223.

SEQ ID NO: 12271 - DNA, 841 bp, Homo sapiens
  SIMILAR (1)..(840): 811254mologous to multiple sclerosis associated retrovirus polyprotein,accession number AF009668,Smith-Waterman Score=1214.
atgcctgaaagccccactcccttgttagggagagacattctagcaaaagcaggggccattatacacctgaacataggagaaggaacacctgtttgttgtcccctgcttaaggaaggaattaatcctgaagtctgggcaacagaaggacaatatggacgagcaaagaatgcccatcctgttcaagttaaactaaaggattctgcctcctttccctaccaaaggcaatacccccttagacctgaggcccaacaaggactccaaaagattgttaaggacctaaaagtgcaaggcctagtaaaaacatgcaatagcccctgcgatactccaattttaggagtacagaaacccaatggacagtggaggttggtgcaagatctcaggattatcgatgaggccattgtccctctatacccagctgtacctaacccttatactctgctttcccaaataccagaggaagcagagttgtttacagtcctggaccttaaggatgcctttttctgcatccctgtacatcctgagtctcaattcttgtttgcctttgaagatccttcaatcccaatgtctcaactcacctggactgttttaccccaagggttcagggatagtccccatctatttcaccatacattagcccaagacttgagccagttctcatacctggacactcttgtcctttgcctcccgttgagaaaccaacaggagtgccatcaagccacccaagtgctcttaaatgtcctcgctacctgtggctacaaggtttccaaacaaaaggctcagctctgctcacagcaggttaaatacttaggggtaaaattatccaaagggaccagggccctca

SEQ ID NO: 12272 - DNA, 1428 bp, Homo sapiens; identical to SEQ ID NO: 3412
  SIMILAR (159)..(1238): 811254mologous to multiple sclerosis associated retrovirus polyprotein,accession number AF009668,Smith-Waterman Score=1517.

SEQ ID NO: 12273 - DNA, 309 bp, Homo sapiens
  SIMILAR (142)..(243): 401254mologous to Homo sapiens TNF-R extracellular Cys-rich domain TNF-R p75,accession number W94641,Smith-Waterman Score=55.
atggtggtggctgcttccaagatggtggcaagcctcgtgttctctgccctggggttcttggcctcacagattccaaggaatggaatcttgggccatgtggaactgtggcaagcctttagcccaatcaagagtggcaatgggtgccttgctggatcaagagcacagcagacaccctgccagatccagagggatagaagtcagcggcgggtctgcgactgcggccggcatcagtggtggacagcgagcgaaagctcagctcgagctgtaacaaacacggaccagaagagtgcagttgcaagatttaataga

SEQ ID NO: 12274 - DNA, 900 bp, Homo sapiens; identical to SEQ ID NO: 3403
  SIMILAR (238)..(897): 881254mologous to multiple sclerosis associated retrovirus polyprotein,accession number AF009668,Smith-Waterman Score=1019.

SEQ ID NO: 12275 - DNA, 1650 bp, Homo sapiens; identical to SEQ ID NO: 3407
  SIMILAR (622)..(1254): 761254mologous to multiple sclerosis associated retrovirus polyprotein,accession number AF009668,Smith-Waterman Score=814.

SEQ ID NO: 12276 - DNA, 1002 bp, Homo sapiens
  SIMILAR (370)..(951): 751254mologous to multiple sclerosis associated retrovirus polyprotein,accession number AF009668,Smith-Waterman Score=701.
gcggagcagggtttatctcctcagacaaaggtggaaaggctgatggcagtgtgggtcagggagggggtgttgccattactggggatggggaagctgtttcttctggcaaaaaagtttcatcagagtttacaaactcagtgtccccagctctatcagggtcctcccatacgtccccattccaagttgcagggtcccattcttttccaatcaatgccctcactttaacagtagacacctggcagtactgtgcatgcacccgaggccgatcaaggactccaaaagattgttaaggacctaaaagcccaaggcctagtaaaaccatgcaatagcccctgcagtactccaattttaggagtacagaaacccaacggacagtggaggttagtgcaagatctcaggattatcgatgaggttgttgtatatgtggatgatttacttttagctgcccgttcaaaaaccttgtgccatcaagccacccaagcactcttaaacttcctcatcacctgtgactacaaggtttccaaaccaaaggctcagctctgctcacagaaggttaaatacttagggctaaaattatccaaaggcaccagggtcctcagtgaggaacgtattcagcctataccagcttatcctcatcccaaaaccccaaagcaattaagagggttccttggcataacaggcttctgccgaatatggattcccaggtacagcgaaatagccaggccattatacacactaattaagaaaactcagaaagctgatacccatttagtagaatggacacctgaagcagaagtggctttccaggctctaaaggaggccctaacccaagccccagtgttaagcttgccaatgggacaagacgttcctttatatgtcacagaaaaaacaggaatagctctaggagtcctaggagtcctgacacaggtccgagggccagcttgcaacccatggcatacctcagtaaggaaatggatgtagtggcaaagggttggcctcact

SEQ ID NO: 12277 - DNA, 2220 bp, Homo sapiens; identical to SEQ ID NO: 3408
  SIMILAR (87)..(14699): 991254mologous to Homo sapiens brain ryanodine receptor,accession number AB001025,Smith-Waterman Score=25396.

SEQ ID NO: 12278 - DNA, 8279 bp, Homo sapiens
  SIMILAR (366)..(1): 881254mologous to Escherichia coli gamma-glutamyl phosphate reductase,accession number X00786,Smith-Waterman Score=587.
atgtggggcagcgatcgcctggcgggtgctgggggaggcggggcggcagtgactgtggccttcaccaacgctcgcgactgcttcctccacctgccgcggcgtctcgtggcccagctgcatctgctgcagaatcaagctatagaagtggtctggagtcaccagcctgcattcttgagctgggtggaaggcaggcattttagtgatcaaggtgaaaatgtggctgaaattaacagacaagttggtcaaaaacttggactctcaaatgggggacaggagctgcatgctgtttcccttgaacaacatcttctagatcaaattcgaatagtttttccaaaagccatttttcctgtttgggttgatcaacaaacgtacatatttatccaaattgttgcactaataccagctgcctcttatggaaggctggaaactgacaccaaactccttattcagccaaagacacgccgagccaaagagaatacattttcaaaagctgatgctgaatataaaaaacttcatagttatggaagagaccagaaaggaatgatgaaagaacttcaaaccaagcaacttcagtcaaatactgtgggaatcactgaatctaatgaaaacgagtcagagattccagttgactcatcatcagtagcaagtttatggactatgataggaagcattttttcctttcaatctgagaagaaacaagagacatcttggggtttaactgaaatcaatgcattcaaaaatatgcagtcaaaggttgttcctctagacaatattttcagagtatgcaaatctcaacctcctagtatatataacgcgtcagcaacctctgtttttcataaacactgtgccattcatgtatttccatgggaccaggaatattttgatgtagagcccagctttactgtgacatatggaaagctagttaagctactttctccaaagcaacagcaaagtaaaacaaaacaaaatgtgttatcacctgaaaaagagaagcagatgtcagagccactagatcaaaaaaaaattaggtcagatcataatgaagaagatgagaaggcctgtgtgctacaagtagtctggaatggacttgaagaattgaacaatgccatcaaatataccaaaaatgtagaagttctccatcttgggaaagtctggcctaaagacataagtgaagaagacataaaaactgtattttattcatggctacagcagtctactaccaccatgcttcctttggtaatatcagaggaagaatttattaagctggaaactaaagatggtccttctagatcctatggtaaaagaagaaaacaaggagtgaattccttaggcgtatcctccttggagcacatcactcacagcctcctgggacgccctttgtctcggcagctgatgtctcttgttgcaggacttaggaatggagctcttttactcacaggaggaaagggaagtggaaaatcaactttagccaaagcaatctgtaaagaagcatttgacaaactggatgcccatgtggagagagttgactgtaaagctttacgaggaaaaaggcttgaaaacatacaaaaaaccctagaggtggctttctcagaggcagtgtggatgcagccatctgttgtcctgctggatgaccttgacctcattgctggactgcctgctgtcccggaacatgagcacagtcctgatgcggtgcagagccagcggcttgctcatgctttgaatgatatgataaaagagtttatctccatgggaagtttggttgcactgattgccacaagtcagtctcagcaatctctacatcctttacttgtttctgctcaaggagttcacatatttcagtgcgtccaacacattcagcctcctaatcaggaacaaagatgtgaaattctgtgtaatgtaataaaaaataaattggactgtgatataaacaagttcaccgatcttgacctgcagcatgtagctaaagaaactggcgggtttgtggctagagattttacagtacttgtggatcgagccatacattctcgactctctcgtcagagtatatccaccagagaaaaattagttttaacaacattggacttccaaaaggctctccgcggatttcttcctgcgtctttgcgaagtgtcaacctgcataaacctagagacctgggttgggacaagattggtgggttacatgaagttaggcagatactcatggatactatccagttacctgccaagtatccagaattatttgcaaacttgcccatacgacaaagaacaggaatactgttgtatggtccgcctggaacaggaaaaaccttactagctggggtaattgcacgagagagtagaatgaattttataagtgtcaaggggccagagttactcagcaaatacattggagcaagtgaacaagctgttcgggatatttttattagagcacaggctgcaaagccctgcattcttttctttgatgaatttgaatccattgctcctcggcggggtcatgataatacaggagttacagaccgagtagttaaccagttgctgactcagttggatggagtagaaggcttacagggtgtttatgtattggctgctactagtcgccctgacttgattgaccctgccctgcttaggcctggtcgactagataaatgtgtatactgtcctcctcctgatcaggatggaagttccagctctgatagtgacctaagtctgtcttcaatggtctttcttaaccatagcagtggctctgacgattcagctggagatggagaatgtggcttagatcagtcccttgtttctttagagatgtccgagatccttccagatgaatcaaaattcaatatgtaccggctctactttggaagctcttatgaatcagaacttggaaatggaacctcttctgatttggaggacgaatccatgaaccaaccaggaccaatcaaaaccagactggctattagtcagtcacatttaatgactgcacttggtcacacaagaccatccattagtgaagatgactggaagaattttgctgagctatatgaaagctttcaaaatccaaagaggagaaaaaatcaaagtggaacaatgtttcgacctggacagaaattctttgatgaaatcactgagctgacatacctgccctcttttcaccataaagctgctcctcaccaggccgagccaggtcccaattcttcctcagcctctgctcccccaccctataatccttttatcacctcctctcctcacactcagtccggcttacagtttcgttctgtgactagccctcccccatctgcccaacaatttcctcttaaagaggtggctggagctaaaggcatagtcaagacagctttagagactgctcccacactagctctccctgtctcatcccaacccttttcattacacacagccgaagtgcagggctgtgcagtcggaattcttacacaaggaccgggaccatgccctgtagcctttttgtccaaacaacttgaccttactgttttaggctcgccatcatgtctccatgcggtagcttccgctgccctaatacttttagaggccctcaaaatcacaaactatgctcaactcactctctacagctctcacaacttccaaaatctattttctttctcacacctgacgcatatactttctgctccccggctccttcagctgtattcactctttgttgagtctcccacaattaccattcttcctggcccagacttcaatctggcctcccacattattctggataccacacctgaccctgatgattgtatgtctctgatctacctgacattcaccccatttccccatatttccttcttttctgttcctcatgttgatcacatttggtttactgacggcagttccaccaggcctgatcgccactcaccagcaaaggcaggctatgctatagaatcttccacatccatcattgaggctactgctctgcccccctccactacctctcagcaagccgaactgattgccttaactcgggccttcactcttgcaaagggactacacgtcaatatttatactgactctaaatatgccttccatatcttgcaccaccatgctgttatatgggctgaaagaggtttcctcactacgcaagggtcctccatcattaatgcctctttaataaaaactcttctcaaggctgctttacttccaaaggaagctggagtcacacactgcaagggccaccaaaaggcgtcagatcccattactctaggaaatgcttatgctgataagggtgtccgctgtgctcctgatccagcgaggcgcccattgccgctcccaattgggctaaaggcttgccattgttcctgcacggctaaaattggaggaaaataccgggcacttgtcggccagttaaaaacgattagtgtggccaccggacttaagactcaggacaggacgatagatggttcctcccaggtgattgaggaaaaaaaccacaatgggtattcagtaattgatacggggactcttgtggaagcagagttagaaaaattgcctaataactggtctcctcaaacgtgtgagctgtttgcactcagccaagccttaaagtacttacagaatcaaaagactatctcaatcctgattcaaaaggaacccagcccagctctaggactcacccctgagcgcaaaggcaatgttgggcatgctggtaaaggaccactagaatccagcagcccagacccctttctttgtggtcaagaaaggcgggaaaaggggtgcaggactgctacatcggtaagcataactaatccgataaacagaggtccatgggtggttacgcaccctggaaaggaactcacccctgagcacaaaggcaatgttgggcacgctgggagagacattctagcaaaagcaggggccattatacacctgaacataggagaaggaacacccgtttgttgtcccctgcttgaggaaggaattaatcctgaagtctgggcaacagaaggacaatatggacgagcaaagaatgcccgtcctgttcaagttaaactaaaggattccacctcctttccctaccaaaggcagtaccccctcagacccaaggcccaacaaggactccaaaagattgttaaggacctaaaagcccaaggcctagtaaaaccatgcagtaacccctgcagtactccaattttaggagtacagaaacccaacagacagtggagaaaccttgtgccatcaagccacccaagcgctcttcaatttcctcgctacctgtggctacatggtttccaaaccaaaggctcaactctgctcacagcaggttacttagggctaaaattatccaaaggcaccagggccctcagtgaggaacacatccagcctatactggcttatcctcatcccaaaaccctaaagcaactaaggggattccttggcgtaataggtttctgccgaaaatggattcccaggtatggcgaaatagccaggtcattaaatacactaattaaggaaactcagaaagccaatacccatttagtaagatggacaactgaagtagaagtggctttccaggccctaacccaagccccagtgttaagtttgccaacagggcaagacttttcttcatatgtcacagaaaaaacaggaatagctctaggagtccttacacagatccgagggatgagcttgcaacctgtggcatacctgactaaggaaattgatgtagtggcaaagggttgacctcattgtttacgggtagtggtggcagtagcagtcttagtatctgaagcagttaaaataatacagggaagagatcttactgtgtggacatctcatgatgtgaatggcatactcactgctaaaggagacttgtggctgtcagacaactgtttacttaaatgtcaggctctattacttgaagggccagtgctgcgactgtgcacttgtgcaactcttaacccagccacatttcttccagacaatgaagaaaagataaaacataactgtcaacaagtaatttctcaaacctatgccactcgaggggaccttttagaggttcctttgactgatcccgacctcaacttgtatactgatggaagttcctttgtagaaaaaggacttcgaaaagtggggtatgcagtggtcagtgataatggaatacttgaaagtaatcccctcactccaggaactagtgctcagctagcagaactaatagccctcacttgggcactagaattaggagaagaaaaaagggcaaatatatatacagactctaaatatgcttacctagtcctccatgcccatgcagcaatatggaaagaaagggaattcctaacttctgagagaacacctatcaaacatcaggaagccattaggaaattattattggctgtacagaaacctaaagaggtggcagtcttacactgccggggtcatcagaaaggaaaggaaagggaaatagaagagaactgccaagcagatattgaagccaaaagagctgcaaggcaggaccctccattagaaatgcttataaaacaacccctagtatagggtaatcccttccgggaaaccaagccccagtactcagcaggagaaacagaatggggaacctcacgaggcagttttctcccctcgggacggttagccactgaagaagggaaaatacttttgcctgcaactatccaatggaaattacttaaaacccttcatcaaacctttcacttaggcatcgatagcacccatcagatggccaaatcattatttactggaccaggccttttcaaaactatcaagcagatagtcagggcctgtgaagtgtgccagagaaataatcccctgccttatcgccaagctccttcaggagaacaaagaacaggccattaccctggagaagactggcaactgattttacccacaagcccaaacctcagggatttcagtatctactagtctgggtagatactttcacgggttgggcagaggccttcccctgtaggacagaaaaggcccaagaggtaataaaggcactagttcatgaaataattcccagattcggacttccccgaggcttacagagtgacaatagccctgctttccaggccacagtaacccagggagtatcccaggcgttaggtatacgatatcacttacactgcgcctgaaggccacagtcctcagggaaggtcgagaaaatgaatgaaacactcaaaggacatctaaaaaagcaaacccaggaaacccacctcacatggcctgttctgttgcctatagccttaaaaagaatctgcaactttccccaaaaagcaggacttagcccatacgaaatgctgtatggaaggcccttcataaccaatgaccttgtgcttgacccaagacagccaacttagttgcagacatcacctccttagccaaatatcaacaagttcttaaaacattacaaggaacctatccctgagaagaggaaaagaatattccacccaagtgacatggtattagtcaagtcccttccctctaattccccatccctagatacatcctgggaaggaccctacccagtcattttatctaccccaactgcggttaaagtggctggagtggagtcttggatacatcacacttgagtcaaatcctggatactgccaaaggaacctgaaaatccaggagacaacgctagctattcctgtgaacctctagaggatttgcgcctgctcttcaaacaacaaccaggaggaaaaatcgaagctgtaaaactacaaatggagcccaagatgcagtccaagactaagatctaccgcagacccctggaccggcctgttagcccacgatctgatgttaatgacatcaaaggcacccctcctgaggaaatctcagctgcacaacctctactacgccccaattcagcaggaagcagttagagcggtcgtcggccaacctccccaacagcacttaggttttcctgttgagatgggggactgagagacaggactagctggatttcctaggctgattaagaatccctaagcctagctgggaaggtgaccacatccacctttaaacacggggcttgcaacttagctcacacctgaccaatcagagagctcactaaaatgctaattaggcaaagacaggaggtaaagaaatagccaatcatttattgcctgagagcacagcaggagggacaatgatcgggatataaacccaagttttcgagccggcaacggcaaccccctttgggtcccctccctttgtatgggagctctgttttcatgctatttcactctattaaatcttgcaactgc

SEQ ID NO: 12279 - DNA, 4349 bp, Homo sapiens
  SIMILAR (466)..(906): 1001254mologous to Homo sapiens neurotensin receptor,accession number X70070,Smith-Waterman Score=775.
  misc_feature (1)...(4349): n = a,t,c or g
actgcactcttctggtccatgtttcttacggctcgagctgagcttttgctcaccgtccaccactgctgtttgccaccaccgcagacctgccgctgactcccatccctctggatcctgcagggtgtccgctgtgctcctgatccagcgaggcggcgcccattgccactcccagtcgggctagaggctcaccattgttcctgcacaggctaagtgcctggggttcatcctaatcgagctgaacactaatcactgggttccatggttctcttctgtgacccacggcttctaatagaactataacacttaccacatggcccaagattccattccttggaatccgtgaggccaagaactccaggtcagagaatacgaggcttgccaccatcttggaagcggcctgctaccgtcttggaagtggttcaccaccatcttgggagctctgtgagcaaggaccccccggtaacattttggcaaccaacgacggacatccaaagtgatgggaaacgttccccgcaagacaaaaacgcccctaagacgtattctggagaattgggaccaatttgaccctcagacactaagaaagaaacgacttatattcttctgcagtgccgcctggcactcctgagggaagtataaattataacaccatcttacagctagacctcttttgtagaaaaggcaaatggagtgaagtgccataagtacaaactttcttttcattaagagacaactcacaattatgtaaaaagtgtgatttatgccctacaggaagccttcagagtctacctccctatcccagcatccccgactccttccccaactaataaggaccccccttcaacccaaatggtccaaaaggagatagacaaaagggtaaacagtgaaccaaagagtgccaatattccccaattatgacccctccaagcagtgggaggaagagaattcggcccagccagagtgcatgtgcctttttctctcccagacttaaagcaaataaaaacagacttaggtaaattctcagataaccctgatggctatattgatgttttacaagggttaggacaattctttgatctgacatggagagatataatgtcactgctaaatcagacactaaccccaaatgagagaagtgccaccataactgcagcctgagggtttggcgtctctggtatctcagtcaggtcaatggatanggatgacaacagaaggaaaganaatgattccccacaggccagcaggcagttcccagtctagaccctcattgggacacagaatcagaacatggagattggtgctgcagacatttgctaacttgtgtgctagaaggactaaggaaaactaggaagaagtctatgaattactcaatgatgtccaccataacacagggaagggaagaaaatcctactgcctttctggagagactaagggaggcattgaggaagcgtgcctctctgtcacctgactcttctgaaggccaactaatcttaaagcgtaagtttatcactcagtcagctgcagacattagaaaaaacttcaaaagtctgccgtaggcccggagcaaaacttagaaaccctattgaacttggcaacctcggttttttataatagagatcaggaggagcaggcggaacaggacaaacgggattaaaaaaaaggccaccgctttagtcatgaccctcaggcaagtggactttggaggctctggaaaagggaaaagctgggcaaattgaatgcctaatagggcttgcttccagtgcggtctacaaggacactttaaaaaagattgtccaagtagaaagccccaggtatgcttgaccattgagagccaagaggttaactgtctcctggacgccggtgcggccttctcagtcttactctcctgtcccggacaactgtcctccagatctgtcactatccgaggggtcctaggacagccagtcactagatacttcttccagccactaagttgtgactggggagctttacccttttcacatgctttcctaattatgcctgaaagcctcactcccttgttagagagagagattctagtaaaagcaggggccattatacacctgaacataggagaaggaacacccatttgtcgtctcctgtttgaggaaggaattagtcctgaagtctgggcaacagaaggacaatatggacaagcaaagaatgcccattttgtccaagttaaactaaaggattccacctcctttccctatcaaaggcagtaccccctcagacccgaggcccaacaaagactccaaaagattgttaaggacctaaaagcccaaggcctagtaaaaccatacagtagcccctgcaatactccaattttaggagtacagaaacccaaaagacagtggaggttagtgcaagatctcaggattatcaatgaggctgtttttcctctatacccagctatacctagcccttatactctgctttcccaaataccagaggaagcagagtggtttacagtcctggatcttaaggatgcctttttctgcatccctgtacatcctgactctcaattcttgtttgcatttgaagatccttcaaacccaacatctcaactcacctggactgttttaccccaagggttcagggatagtccccatctatttggccaggcattagcccaagacttgagccagttctcatacctggacactcctgtccttcagtgcatggatgatttacttttagctgcccgttcagaaaccttgtgccatcaagccacccaagcgctcttaaatttcctcactacctgtggctacaaggtttccaaaccaaaggctcagctctgctcacagcaggttaaatgcttagggctaaaattatccaaagtcaccagggccctcagtgaggaacgtatccagcctatactggcttatccttatcccaaaaccctaaagcaactaagagggttccttggcataacaggtttctgccgaatatggattcccaggtacggcaaaatagccagaccgttatatacgctaattaaggaaactcagaaagccaatacccatttagtaagatggacacctgaagcagaagcagctttccatgccctaaagaaggccctaatgcaagccccagtgctaagcttgctaacggggcaagacttttcctcatatgtcacaaaaaacaaacaaacaaagaaaaaaaaaaacatgaatagctctaagagtccttgcgctggtctgagggacgagtttgcaacccgtggcatacctgataaggaaattgatgtagtggcaaagggtcagcctcattgtttacgggtagtggtggcagtagcagtcttagtatctgaagcagttaaaataatacagggaagaaatcttactgtgtggacatctcatgatgtgaatggcatactcactgctaaaggagacttgtggctgtcagacaaccatttacttaaatatcaggctctattacttgaagggccaatgctgcgactgtgcacttgtgcagctcttaacctggacacatttcttccacacaatgaagaaaagatagaacataactgtcaacaagtaattgctcaaacctatgccactcgaggggaccatttagaggttcccttgactgatcccaaccctaacttgtatactgatggaagatcctttgtagaaaaaggacttcaaaaagtggggtatgcagtagtcagtgataatggaatacttgaaagtaatcccctcactccaggaactagtgctcagctggcaaaactcactcgggcactagaattaggagaaggaaaaagggtaaatatatatacagactctaagtatgcttacctagtcctccatgcccatgcagtaatatggagagaaagggaattcctaacttctgagggaacacctatcaaacatcaggaagccattagggaattattattggccgtacagaaacctaaagaggtggcagtcttacactgccggggtcatcagaaaggaaaggaaagggaaatagaaaggaaccgccaagcagatattgaagccaaaagagctgcaaggcaggaccctccattagaaatgcttatagaaggacccctagtatggggtaatcccctctgggaaaccaagccccagtattcagaagaagaaatagaatggggaatctcacgaggacatagttttctcccctcaggatggcaagccaccgaacaaggaaaaatacctttgcctgcagctaaccaatggaaattacttaaaaccactcaccaaaactttcacttatgcattgatagcacccatcagatggccaaattgttatttactggaccaggacttttcaaaactctcaagcagatagttggggcctgtaaa

SEQ ID NO: 12280 - DNA, 344 bp, Homo sapiens
  SIMILAR (1)..(279): 401254mologous to Mus musculus arylsulfatase A,accession number X73231,Smith-Waterman Score=142.
ctagatcattttgagtaattccatgtcatccacacacattggcctcccagtgttacaggaaaggggtctcgatccagaccccaagagagggttcttggatcttgcacaagaaagaattcagggcgagtccatagagtaaggtgaaagcaagttttttaagaaagtagaggaataaaagaatggctacttcataaacagagcagccccgagggccatgggttgcccatttttatgattatttcttgatgatatgctaaacaaggggtggattattcatgcttccccttttataccatatagggtaacttcgtgatgttaccatggcatttgtaaaccatcatggt

SEQ ID NO: 12281 - DNA, 912 bp, Homo sapiens
  SIMILAR (58)..(192): 1001254mologous to Homo sapiens homologous to mouse Rsu-1; putative,accession number L12535,Smith-Waterman Score=242.
atggcaaagcttgctgtactagaggctttggaaagaagcatatgtggtcgttttgcaggaaacttggatttaactggccagaagcaggtattcaaagcagagaacaatccctgggtgacccccattgcagaccagttccagcttggcgtgtcccatgtttttgagtatatccgttctgagacatacaaatatgctgggattacaggcttgccgatacttccaccccgtggtgaagaagagggtgcagaggaatacagaggatgtaaggaagaatacgtgtggatcctgggacctgtgtggtcctgtgtaatggctcttggagttttgttacaggaaaggggtcccgatccagaccccaagagagggttcttggattttgcacaagaaagatccagggtgagtctgcagggcaaagtaaaaaagcaaagcggtgttcctgtgacggcagggtccccagtgcgttctgatcgggaaacccacgacacgtttccaactctgtacagaagcatcaaccatgacttggtaatgagaaagaaagtggacggaaatcaagacgagcaacaacaaacatcaacacatttgggttccagggtccctaaggttccaatcgtaatcagcatccaactgtctgctagcaaaccatttctaataattaatttggccatcacagagaaaactgtcacgttccacaggagagatgtgaaggcaagctcttgcatgacagctgcaatgtcatcaattggggggacggttccgagcgtgtctccagagggaagaattcagggcgccgccgtgtcgccagctcggctccttcgctacattgctggctacaccgcgctaaactctcccgcctctcggaccttgcgcgcccccctcggcccccccatagtaatagtgcccgcggccccctga

SEQ ID NO: 12282 - DNA, 1758 bp, Homo sapiens
  SIMILAR (48)..(425): 1001254mologous to Homo sapiens histone H2B,accession number X57985,Smith-Waterman Score=628.
ctatgatcggcgttcacagtgaccttcctcagagcacgtcctcaagttcttctgagtctgtgtggtcctgtgtaatggctcttggagttttgttacaggaaaggggtcccgatccagaccccaagagagggttcttggattttgcacaagaaagatccagggtgagtcctgctcagagccaaactgtacaacccagcccgtgccttcctgctctcctgcctggatgggaagtcggtctgctgtgaaagtgggcacgactgctactggatgtgaacctgggatgaatatcccctgaattcttccctctggagacacgctcggaaccgtccccccaattgatgacattgcagctgtcatgcaagagcttgccttcacatctctcctgtggaacgtgacagttttctctgtgatggccaaattaattattagaaatggtttgctagcagacagttggatgctgattacgattggaaccttagggaccctggaacccaaatgtgttgatgtttgttgttgctcgtcttgatttccgtccactttctttctcattaccaagtcatggttgatgcttctgtacagagttggaaacgtgtcgtgggtttcccgatcagaacgcactggggaccctgccgtcacaggaacaccgctttgcttcagtgagtttttgatgactgcttcatgtttctgggaggtatttcgttcctgtgcgtttctggagttttcatcttttgaaaaaaatgactcataagagcccttcatattgttagatttttactaatgctttcttgctggtttaattttaggttaagtctttcctatccacaacagcataggccttgttctccctcgtgcaatctcaaaagctcaaaaggcaattaaaaaaattcaggcggaggcatacatggcacctataaaaatgatatcaacgtctatccctaaaccaggggatgggacctgggggaaacccacttccccacaatttaaatgttctatcaggaaatttgtctagaagccagaagttttagaccttgctctgtggcctctctgattgaaatgcgaagtctgtttcctaagtaactcagaacttgtttgtttgattttgatttttgacttttttatatgccccagtgggtcctggtcttggggagctcaactgggaagccgaaaggattacagcagagattttatatgccccagtgggtcctggtcttggggagctcaactgggaagccgaaaggacacagcagagaagggcaggccccctctcccaggccatttgactctcccaggccatttgaaaagacggtgcatcttcacataccaatttttttgtgtcggccttctggggttgacagccctttcagtgagcacaaaacctcagcttgcatttattttgattttcgtaggtatcactgttgaaaagaaggaaagctgcctatcacagatgttaaacaaacaattgattgtttaatgactctgcaactgtggtttccaccctgggtgtggtgtagcgcgtgcacatttacacaacttccttggcatcgaagtcgcttagaagaatgcttcgatgcgagcagattttccgccgtgacaaaatacacagttgaggttttttctctctctctttcacagttcttgtctaccagcccctggcagaaatcaccatttcttccggcgaaggaatgctactttccaaaatcctttgggcagaatctcctaaaaaattgtttttcctgcttcctaaatttaaaaaagtct

SEQ ID NO: 12283 - DNA, 1083 bp, Homo sapiens
  SIMILAR (150)..(431): 561254mologous to Homo sapiens Human breast tumour-associated protein 7,accession number Y48546,Smith-Waterman Score=163.
atggagaaggagaaagaggaggaggaggaggaagagagaagaaaagcggaggaggagaaggagggaaagaaggaaaatgaatggtggagaggagaggagagagttcttcaggctctttggaagcaccctttcatgctctcgactccaccaagggtgcgtgcacgaaactcccaagtggacattgagtgccagccattgtctctcaacatcccttcaaggggcaagagggtggttttcctgaagcagctggctagtggcttattacttgtgactggacctctggtcctcaatcgagttcctctacgaagaacacaccagaaatttgtcattgccacctcaaccaaaatcgatatcagcaatgtaaaaatcccaaaacatcttactgatgcttacttcaagaagaagaagctgcggaagcccagacaccaggaaggaggatctgaacacgaagcaatgagggagtggaaactgacctgtgtgaagggtgttcccagtaaggagaagtgtagaagtcctgagatggctgcttatgaagctgctcaaggaacaacagaagccaaggagacagagcaggcatattcacactgtaagaatgtactggaatccaatcacaccctcatcctcttcccaaaccacgaaaagtgcacagggcaaaaaatgcaccgggcaagaagacagcttatagaatgcaaagtacagcttataagagaggacaggaagaagtgtctggagatagttttcgttgtcacagctaaggagggggaggtgctacagacatctcctgagacatccaaattgttggccctggatttagatcttaacgccatttgttacacagcaccaattagggtacgtgtgcaggttggttacataggtaaacttgtttcctgggggtttgttgtacagattatttcatcacccaggtggaatagattagaaaaccgaagagccacactacacttatttcagccaaggactgaaactggagcctgccacaagcatcttctagaacagctccaacagaaggatccaggagatgggccaccagcaagtcatagtggagtccaaacaagtgtgaagtga

SEQ ID NO: 12284 - DNA, 993 bp, Homo sapiens
  SIMILAR (119)..(304): 401254mologous to Homo sapiens dJ309I22.2 (synapsin III),accession number Z98256,Smith-Waterman Score=95.
  misc_feature (1)...(993): n = a,t,c or g
aggttcccagaaagtctgtgcacagtggagatgccgaataccataaagtactgaaagaagaagcatcagatagtagagagaacaaagttggaacgacctggcttcaaatcctgagtggctcctttgctagccgtgtgactgagcacattactcagcctttgcaagagtcagtttccctgtggatatcctcagaacaaaatattcctcccaagtttatgggaagattaaataaattaagaaaggccacgtataagaggaagtactcagccgctaaatccaaggttgaaaagaaaaagaaggagaaggtttttgcaactgttacaaaaccagttgggtggtgacaagaacggcggtaccccgggtggttcaaactcgcaacactgcctagatatcatcctactgaagatgtgccccggaagattgttgagccaccgcaaaaaaacctctttagtcagcacgtgagaaaaactgcgaaaacagcattacccccggggaccattctgatcatcctcactggaacgccacaggggcaagaagggtggttttcctgaaaccagctggctagtggcttaatacttgtgcactgcacctctggtcctcaatcgagttcctctgcgaagaacacaccagaaatttgtcattgccacttcaaccaaaatcgatatcagcaatgtaaaaatcccccaagaaaaaaaanaaaaccccattncttactgatgcttacttgagagaagaagaagctgcggaagcccagacccccaggaagggtgagatcttcgacacagtaaaaagaggaaatatgaggattacggagacagcgcacgattgatcagaaagctgtggactcacaaattttaccaaaaatcaaagctattcctcaagctcccagggctacctgcggatcctgtgtttgctctgacggaatggaatttatcctcacaaattggtgttctaaatgtcttaagaaccctaattaagtagctgactacaaaa

SEQ ID NO: 12285 - DNA, 558 bp, Homo sapiens
  SIMILAR (286)..(35): 571254mologous to Homo sapiens Human secreted protein sequence SEQ ID NO:195,accession number Y87156,Smith-Waterman Score =185.
gggtcaactaacacctcatacaggagagctctggctggcatctggtgggtgccctctggacgaagcttccagaggaaggagcaggctgcaatctttgctgttctgcagcctctgctggtgatactcaggcaaacagggtctggagtggctccccagcaaactccagcagacctgcagcgggaaaatgaacaaatgaaaaggaatagcatcaacatcaacaaaaaggacatccacacaaaaaccccagaaaccccatgcgaaggtcacaaacatcaaagaccaaaggattacaactccttgccagcaagggaacaaaactggacagagaatgagtttgatgaattgacagaagtaggcttcagaaagagggtaataacaaactcctccgagctaaaggagcatgttctaacccaatgcaagaaagctaagaaccttgaaaaaaggttagaggaattgctaagtagaataactagtttagagaagaacataaaagacctgatggagctgaaaaatgcagcacgagaactttgtgaaccatacacaagtatcagtagctga

SEQ ID NO: 12286 - DNA, 300 bp, Homo sapiens
  SIMILAR (276)..(139): 821254mologous to Homo sapiens Human secreted protein, SEQ ID NO: 7217,accession number G03136,Smith-Waterman Score=198.
atgaggaaaagccagtgcaaaaaggctgaaaattccaaaaaccaggacacctcttctcctccaaaggatcacacctccttgtcggcaaaggaacaaaactggacagagaatgagtttgacaaactgatagaagtaggcttcagaagggacatggatgaaggtgaaaactatcattctcagcaaactaacacaggaacagaaaaccaaacactgcatgttctcactcataagtgggagttggacaatgagaacacatggacacagggaggggaacatcacacaccggagcctgtcatgggg

SEQ ID NO: 12287 - DNA, 591 bp, Homo sapiens
  SIMILAR (292)..(588): 621254mologous to Homo sapiens PRO2221,accession number AF116695,Smith-Waterman Score=292.
atggccaaacaggaacaactccagtttgtagctcccagcaagatcaatgcagaaggcagagcacctcggggaaggggtggctgtgggcgcagcttcagcagacttaaatgttcctgcctgccagctctgaaaagagcagtggatttcccggcacagctttcaacctctgctaagggacagactgcctcctcagaaagtaacagcatcaacatcaaccaaaaggacgtccacacagaaactccatctgaacctcaccaacatcaaagacctaaggtagataaatccacaaagatgaggaaaaaccagcgcaaaaaggctgaaaattccaaaaaccagaatgcctcttctccaaaggatcacaactcctcaccagcaagggagcaaaactggatggagaatgagtttgatgaattgacagaagtaggcttcagaaggtgggtaataacaaactcctctgagctaaaggagcatgttctaacccaatgcaaggaaggtaaaaaccttgaaaaaaggttagaggaattgctaactagaataaccagtttagagaagaacataaatgacctgatggaactgaaaaacacagcatga

SEQ ID NO: 12288 - DNA, 267 bp, Homo sapiens
  SIMILAR (1)..(147): 651254mologous to Homo sapiens Human secreted protein, SEQ ID NO: 7003,accession number G02922,Smith-Waterman Score=175.
atgaggaaaaaacaggacaaaaaggctgaaaattccaaaaaccagaatgcctcttctcctccaaaggatcacaactccttaccagcaagggaacaaaactggatggagaatgagtttgatgaattgacagaagtaggcttcagaaggtgggaattgaacaatgagaacacatggacacaggaaggggaacatcacacactgaggactgttgtgggctggggggaggagggagggatagcattaggagatatacctaatgctaaatga

SEQ ID NO: 12289 - DNA, 873 bp, Homo sapiens
  SIMILAR (676)..(1962): 901254mologous to Homo sapiens putative p150,accession number U93563,Smith-Waterman Score=2117.
atggccgaatcggaacagctccagtctacagctcccagcaagatcaatgcagaaggcaggcaaacagagtctagagtggacctccagcaaactccagcagacctgcagcagaggggcctgaatgttagaaggaaaactaacgaacaaaaaggaatagcatcaacatcaacaaaaaggatgtccactcaaaaaccctatcagaaggatcacaactcgtcggcagcaagggaacaaaactggatggagaatgagtttgatgaattcacagaagtaggcttcagaagttgggtagtaacaaactctttcaagctaaaggatcatgttctaacccaatgcaaagaagctaagaaccttaaaaaaagaattggaaaaaactactttaaagttcatatggaaccaaaaagagcccacattgccaagaccatcctaagcaaaaagaacaaagctggaggcatcacactacctgacttcaaactatactacaagcctacagtaaccaaaacaacatgggacatggatgaagctggaaaccatcattctcagcaaactaacacaggaacagaaaaccaaacactgcatgttctcactcttaagtgggagttgaacaatgagaacacatggacacagggaggggaaggaacatcacacaccgaggccctgtccctgcaatcattcaaagaacagactccctcaactgtgcaatacaaacgaaagagaagtgacaggcactcagaggtcttggccaccaacatacgttcttgtgggacagtgccacaaaccttcaacccttacagccacaaggaactgtttgctgcctttggatttttcaggtccccaaatatgtctaaggtaaaagttggcactgaattctaa

SEQ ID NO: 12290 - DNA, 557 bp, Homo sapiens
  SIMILAR (182)..(730): 651254mologous to Homo sapiens ferritin heavy subunit,accession number M12937,Smith-Waterman Score=624.
agattgtgagtccatgttttgtctgttgtgcctataaaggaaatttgaaatctgtatcattctactataaagacacatgcacacgtatgtttattgcagcactgtttacaatagcaaagacttggaaccaaccaaaatacccacaaatgatagaccggataaagaaaacgtgacacatatacaccatggaatactatgcagccatagaaaaggatgagttcatattcttcacagggacatggatgaagctggaaaccatcatcctcagcaaactaacacaggaacagaaaaccaaacaccgcatgttctcactcataagtgggaattgaacaatgagaatacatggacacaggaaggggaaacaccacaccctggggcctgttggggggatgggggctaggggagggatagcattaggagaaatacctgatgtagatgatgggttgatgggtgcagcaaagtaccatggcacatgtatacctgtgtaacaaacctgcacattcagcacatgtatcccagaacttaaagtataataaaaataaataaataatttcagt

SEQ ID NO: 12291 - DNA, 240 bp, Homo sapiens
  SIMILAR (78)..(1): 881254mologous to Homo sapiens Human secreted protein, SEQ ID NO: 7217,accession number G03136,Smith-Waterman Score=116.
atggatgaagctggaaaccatcattctcagcaaactaacacaggaacagaaaaccaaacaccacatgttctcactcacaagtgggagttgacctatgagaacacatggacacaggactttaatgtgactacatcttggaatgacttcctgcctttgcaggaaacaggcagcttcctgactgagacggaagttactagtccttattgccggttcgttttcattgtcctggttgccctcaag

SEQ ID NO: 12292 - DNA, 298 bp, Homo sapiens; identical to SEQ ID NO: 10138
  SIMILAR (1)..(111): 831254mologous to Homo sapiens PRO1546,accession number AF116638,Smith-Waterman Score=158.

SEQ ID NO: 12293 - DNA, 590 bp, Homo sapiens
cccatcaaagtgacagcccagagcacaagatcatctttaataaaaccccaacttcaccgggaaagaggatggaaatcatagatgacgatgtacccagcttccacgccaatggctaccagagaaaggtgtcatctgtgtgggtgcggagtggcatgtgggttggctactagtaccctggctaccgtgggctgcagtacctgctggagaagggagactacaaggacagcagcgactttggggcccgtcaccctcagggacatggatgaagctggaaaccatcattctcagcaaactaacacagaagcagaaaaccaaacaccacatgttctcactcataagtgggagttgaacagtgagaacacatggacacaaggaggggaacatcacacaccgaggcctgtcagggagtgggggacaagagggagagagagcattgggacaaataccaaatgcatgcacggcttaaaacctagatgacaggttgatgggtgcagcaaaccaccatggcacatgtatacctgtgtaacaaacctgcacgttctgcacatgtatcccagaacttataataaaaaagaaaccagtaagtgctc

SEQ ID NO: 12294 - DNA, 529 bp, Homo sapiens
  SIMILAR (170)..(583): 731254mologous to Anthocidaris crassispina outer arm dynein light chain 2,accession number AB010054,Smith-Waterman Score=515.
ctcctctttctgtacagattgcaaagggggtctccagagagtgtgtggagcaatattccttttttggaactttacttcttttttcacttctagttcttccctgagtgtggtcagaatcaggaagctgtactaaggctgctgtggtggaaccatcaaaaactccttctctttccctccactccccaactggccccggtttgtgatgttcccctccttgtgtgttctcattgttgagacatgtgagacttggatatgtactctcattgttcaactcccacttatgagtgagaacatgcggtgtttgattttctgttcctgtgttagtttgctgaggatgatggtttccagcttcgtccatgtccatgatcacaaggtgaagtcccacagtagaccgtctgcaatctgaggagcaaggaagccagtccgagtcccaaaacctcaaaagtagggaagctgacagtgcagccttcagtctgtggttgaaggtctcagagcccctgttgcctggactgtagagggcgttgcaagc

SEQ ID NO: 12295 - DNA, 1209 bp, Homo sapiens
  SIMILAR (244)..(354): 941254mologous to Homo sapiens tryptase-I,accession number M33491,Smith-Waterman Score=206.
atgtggtggtcatatgagaaggaaggccagcattctgtagtcttatggtcagatgatgaagtgtcagccttttacattcccatctccagggtatggggcaggagttttctcatcagacaagataggtcagatgacctttatggaaaggacatgaaggatgagctgcaaggaagctgctcaagatcacacagctcgggaaaaggaaaaagtagagctgaaatttccatcgctgcccttccgaaggaaagaactgctctagccatgcacctggctgggatcgccaatttcccttgttaccttggatttcccctggccccagggctcaggacgcttgtccatgcctgtcctatggacttgtcttatcccaggttccttagaaataggataatgggtctgctgtggtttgaatgcatttctgccaaaattcaggacatgggtgaagctggaaaccatcatcctcaacaaactaacacaggaacagaaaaccaaacactgcaagttctcactcataagtgggagttgaacaatgagaacacgtggacacaggaaggggaacatcacacaccgggcctgtcgggaggacaaagttctcatcatgggggattgccttccccagcacccttccagatagcatcagcagccactcccatagctagtgggaaagccagaatgctatcccctggtaaaggagcacatgtggcttgtgaaatcacaggagaagccagaactgcacagtctgctgggattgtgcaaaggcactggggctgctgtggtttacaccattgtgggcacaatggaggccatgccagagccctactctcacctcaaggacacatggctggtgctaggggaggaagaaaaagatggggtagcaacctgggctctgtattaaacaagcagcatggggataggtgggctgagcagaactggggaggtaaattaaccagtacagcactcgcctggtgtgggcagcttcactgtgcttgtctgcctgttcctgctcccccaagaatggagctgaaattcattaccctgctgtgtgtctcaatcattcatgtacctcatgagctttctggggcattagatgacagtcagatgaatgcaggggcaaacggaagagggcctgtagagacaccaggattccaaagtttcatagaaatggtgatgcagtatccgggagaattgaaaaccgagttatcacctagttga

SEQ ID NO: 12296 - DNA, 909 bp, Homo sapiens; identical to SEQ ID NO: 5685
  SIMILAR (1)..(432): 791254mologous to Homo sapiens putative p150,accession number U93564,Smith-Waterman Score=587.

SEQ ID NO: 12297 - DNA, 2192 bp, Homo sapiens
  SIMILAR (1801)..(2376): 691254mologous to Homo sapiens olfactory receptor,accession number Y10529,Smith-Waterman Score=702.
ggagaaaatttacagaaacccagagccaaaggtgctctcaggggatcccctgaaacattcaaagccattgcggccccagaagcttgggtaggcggggaagcagctggagtgcgaccgccgcggcagccaccctgcaaccgccagtcggaggtgcagtccgtaggccctggcccccgggtgggcccttggggagtcggcgccgctcccggggagctgcaaggctcgcccctgcccggcgtggagggcgcggggggcgcggaggatattcttggtgatcttggaagtgtccgtatcatggaatcaatctctatgatgggaagccctaagagccttagtgaaacttttttacctaatggcataaatggtatcaaagatgcaaggaaggtcactgtaggtgtgattggaagtggagattttgccaaatccttgaccattcgacttattagatgcggctatcatgtggtcataggaagtagaaatcctaagtttgcttctgaattttttcctcatgtggtagatgtcactcatcatgaagatgctctcacaaaaacaaatataatatttgttgctatacacagagaacattatacctccctgtgggacctgagacatctgcttgtgggtaaaatcctgattgatgtgagcaataacatgaggataaaccagtacccagaatccaatgctgaatatttggcttcattattcccagattctttgattgtcaaaggatttaatgttgtctcagcttgggcacttcagttaggacctaaggatgccagccggcaggtttatatatgcagcaacaatattcaagcgcgacaacaggttattgaacttgcccgccagttgaatttcattcccattgacttgggatccttatcatcagccagagagattgaaaatttacccctacgactctttactctctggagagggccagtggtggtagctataagcttggccacattttttttcctttattcctttgtcagagatgtgattcatccatatgctagaaaccaacagagtgacttttacaaaattcctatagagattgtgaataaaaccttacctatagttgccattactttgctctccctagtatacctcgcaggtcttctggcagctgcttatcaactttattacggcaccaagtataggagatttccaccttggttggaaacctggttacagtgtagaaaacagcttggattactaagttttttcttcgctatggtccatgttgcctacagcctctgcttaccgatgagaaggtcagagagatatttgtttctcaacatggcttatcagcagtctacacttggatatgtcgctctgctcataagtactttccatgttttaatttatggatggaaacgagcttttgaggaagagtactacagattttatacaccaccaaactttgttcttgctcttgttttgccctcaattgtaattctggatctgtctgtggaggttctggcttccccagctgctgcctggaaatgcttaggtgctaatatcctgagaggaggattgtcagagatagtactccccatagagtggcagcaggacaggaagatccccccactctccaccccgccgccaccggccatgtggacagaggaagccggggcgaccgccgaggcccaggaatccggcatcaggaacaagtctagcagttccagtcaaatcccggtggttggggtggtgacggaggacgatgaggcgcaggattccattgatcccccagagagccctgatcgtgccttaaaagccgcgaattcctggaggaaccctgtcctgcctcacactaatggtgtggggccactgtgggaattcctgttgaggcttctcaaatctcaggctgcgtcaggaaccctgtctcttgcgttcacatcctggagccttggagagttccttgggagtgggacatggatgaagctggaaaccataattctcagcaaactaacacaggaacagaaatccaaacactgcatgttctcactgataagtgggagttgaacaatgagaacacatggacacagggaggggaacgtcacacaccagggcctgtcgggggtgggaggcctagcaattcattagaattacctgtgaagcttttaaaatgtaaggtttggatggaatgctcagaccctaccttagacccaattaagcccacagctttgagg

SEQ ID NO: 12298 - DNA, 439 bp, Homo sapiens
  SIMILAR (568)..(966): 441254mologous to Feline leukemia virus gag-pol precursor polyprotein gPr80,accession number AF052723,Smith-Waterman Score= 276.
cttgtggctgtaagggttgaaggtttgtggcactgtcccacaagaacgtatgttggtggccaagacctctgagtgcctgtcacttctctttcgtttgtattgcacagttgagggagtctgttctttgaatgattgcagggacagggcctcggtgtgtgatgttccttcccctccctgtgtccatgtgttctcattgttcaactcccacttaagagtgagaacatgcagtgtttggttttctgttcctgtgttagtttgctgagaatgatggtttccagcttcatccatgtcccatgttgttttggttactgtaggcttgtagtatagtttgaagtcaggtagtgtgatgcctccagctttgttctttttgcttaggatggtcttggcaatgtgggctctttttggttccatatgaactttaaagtagttttttccaatt

SEQ ID NO: 12299 - DNA, 538 bp, Homo sapiens
  SIMILAR (89)..(226): 821254mologous to Homo sapiens Human secreted protein, SEQ ID NO: 6720,accession number G02639,Smith-Waterman Score=212.
acatgcacatgtgtgtttattgcagcactatttacaatagcaaagacttggaactgatcaaaatgcccatcaatgagagattggataaagaaaaatgtggcacatacacaccatggaatactatgcagccataaaaaggaatgagttcatgtcctttgcagggacatggatagagctggaaaccatcatcctcagcaaactaacacaggaacagaaaaccaaacactgcatgttctcactcataagtgggagttgagcaatgaggacacatggacacagggaggggaacatcacacaccggggcctgttggggggtgaggggccaggggagggacagcattaggacaaatacctaatgcatgcggggcttaaaacctagatgatgggttgataggtgcagcaaaccaccatgacacatgtatacctatgtaacaaacctgcatgttctgcacatgtatcccagagtgtaaagtaaaataaaaaataaaaattaaacacaaataacatttctaataaaacacagctcttatctgttcta

SEQ ID NO: 12300 - DNA, 395 bp, Homo sapiens
  SIMILAR (279)..(419): 851254mologous to multiple sclerosis associated retrovirus polyprotein,accession number AF009668,Smith-Waterman Score=217.
atgataggatcaaaaatcaatgaaattgaacataaaaaacaacagagaaaaatcaaagaagcgaagacccggttctttgtaaagatcaataacaaatctctagcaagacaaagaaaaaacagagaagacaatataagaactgaaataagggacatggatgaagctggaaaccatcattctcagcaaactaacacaggaacagaaaaccaaacactgcatgttctcactcataagtgggagttgaacaatgagaacccatggacacagggaagggaacatcacacaccggggcctgtgagggggtggaggaatgtggatcttcagacaagtttgatcagttcccagctgtcatctgtacagccacacgacagtgcctttcttaccattatgagtaa

SEQ ID NO: 12301 - DNA, 1421 bp, Homo sapiens
  SIMILAR (325)..(284): 501254mologous to Measles virus M protein,accession number U29278,Smith-Waterman Score=41.
gagagagcacctggcggaagggatggctgtgggcacagcttcagcagacttaaacatttctgcctgctggctccgaagagagcaacagatctcccagcacagtgctcgagctttgctaagggacagactgcctcctcaagagaactccagctggcatccggcaggtgcccctctgggacgaaacttccagaggaaggagcaggcagcaatctttgctgttctgcagcctccactggtgatacccaggaaaacagggtctggagtggacctcgagcaaactccagcagacctgcagaagaggggcctgactgttacaaggaaaactaacaaacagaaagcaatagcatcaacatcaacggaaaggacgcccacgcagaaacccccattcaaaagtcaccaacatcaaagaccaaacgtagataaatccgcgaagatgaggaaaaaccagagcaaaaaggctgaaaattccaaaaaccagaatacctcttctcctccaaaggatcacaactcctcgccagcaagggaacaaaactggatggagaattgagtttgatgaattgacagaagtaggcttcagaaggtgggtaataacaaactcctctgagctaaagaagcatgttctaacccaatgcaaggaagctaagaaccttgaaaaaagggacatggatgaagctggaaaccatcattctcagcaaactaacacaggaacagaaaaccaaacaccgcatgttctcactcataaatgggagttgaacaatgagaacacacggacacggatatacaagaagcatggtgctgccatctgcttggcttcagggatctaccattctgtggatctgccattctggggtctggatctaccattctgggatctggaggacagtggatctaccattctggggtctggaggacagtggccctcttctcacagctccactaggcagtgcaccagtgtggattctgtgtgggggctttgatctcacatttccttctgtactgccctttattccagttcccaacaagttctttatctccattgagatcgcttcagcctgaactttattgtccatatcactatcagcattttggtcaaagccattcaacaagtctctaggaagttccaaactttcccacatcttcctgtcttctgagctctccaagtctctaggaagtacaaacctctgcctgttacccatttcaaagtcacttccacattttctgtatcttgggaagaggattctagtttctatggctaggcttgggggagcatgggagagtgagaaaatgcggtgtttggttttctgttcctgtgttagtttgctgagaatgatggtttccagcttcatccatgtgcctgcaaaggacatgaactcatccttttttatggttgcatagtattccacggtgtatatgtgccacat

SEQ ID NO: 12302 - DNA, 1012 bp, Homo sapiens
  SIMILAR (506)..(694): 651254mologous to Homo sapiens PRO1546,accession number AF116638,Smith-Waterman Score=195.
atggatctgtccgcctgggtcctcccgccctgggggccggagcgcgcggcgggagagccgggggagcgctctcggagggagcgcgctttctttggagtcggcgaaacccgggtgagttcgaagagcctgtgcgagggtctgcgggcaccgggcgccgctggggggactctccggcctttcctttttgtcctgttctctccgcttccgttaaccctgcggaccttccgtccgcccctcggagggaagcctgctagctcgggaccgcttcagtttttattgaaaccagacaacggcagcccttggtactcagggagggatgaggctggtgggaaagcgagagggcggggactcgggggcgaccggggcggccctttctgggagcctgatccctggagaggcgggacgggttggctgcgagggaggcgcgcggcggggggggcggttgtgctctgcgccgggggagctagagtgtgtgttgtcttgcgagttgtaaggaaaagtgcctttttactgtttccacgccgggacatggatgaagctggaaaccatcattctcagcaaactaacacaggaaccagaaaaccaaacaccgcatgttctcactcgtaagtgggagttgaacaatgagaacacatggacacagggatggggaacatcacaaacccagggcctgttgaggggtggggggtggggggcaagggaagggagagcatcaggccaaatacctaatgcatactggggcttaaaacctagatgatgggttgacaggttgatgggtgcagcacaccaacatggcagatgtatacatatgtaacaaacctgcacgctgtgcacatgtaccctaaaacttagagtccaataaaaaaaaaagcccaaagaaaaaaaaaagaaaaatatttcatgttcatggataggaagagtcaatatcattaaaatggccatagtgcccacaggaatttacagattcaatgcaattcctatcagataccaacgagattcttcacagaatttg

SEQ ID NO: 12303 - DNA, 346 bp, Homo sapiens
  SIMILAR (43)..(333): 1001254mologous to Homo sapiens ribosomal protein L21,accession number X89401,Smith-Waterman Score=514.
cccacgcgtccgggaaccgccatcttccagtaattcgccaaaatgacgaacacaaagggaaagaggagaggcacccgatatatgttctctaggccttttagaaaacatggagttgttcctttggccacatatatgcgaatctataagaaaggtgatattgtagacatcaagggaatgggtactgttcaaaaaggaatgccccacaagtgttaccatggcaaaactggaagagtctacaatgttacccagcatgctgttggcattgttgtaaacaaacaagttaagggcaagattcttgccaagagaattaatgtgcgtattgagcacattaagcgtctaatcgcga

SEQ ID NO: 12304 - DNA, 588 bp, Homo sapiens
  SIMILAR (1)..(351): 631254mologous to Homo sapiens dJ228H13.1 (similar to Ribosomal protein L21e),accession number AL031985,Smith-Waterman Score=376.
atgatgaacacaacgggaaagatgagaggcaccccatatgtgatttttaggccttttagaaaacatgaagttgttcctttggccatgtacatgcaaatctgtaagaaaggtgatatcatagacatcaaaggagtgggtactgttcaaaaaggaatgccccacaagtgttaccatgggaaagctgaaagagtctaccttgttccccagcatgctgctggcattgttgtaaacaaacaacttaagggcaagattcctgccaagagaattaatgaaaatgatcagaaaaagaaagaagccaaagagaatggtacctgggttcaactgaagcgccagcctcctccacccagaaaagcagactttgtgagaaccaatgggaaaaagcctgagctgctagaccctcttccttatgaattccgcggatcctctccctataatgtcaacgctctagacaaaagccctgctgagtacaacaaaaccgaaaacctgacagaggaaaaacctttatatctttatatctacaagcccaaacacaattgtccctgcaggatgaaaatgcatatgtgctgcatcttcacatccaatccataa

SEQ ID NO: 12305 - DNA, 15583 bp, Homo sapiens
  SIMILAR (3)..(1211): 941254mologous to Homo sapiens PEX1,accession number AB008112,Smith-Waterman Score=1934.
gggcagcagcagtcagcgcacgccgagcggctgccgggggaagcagaggcgccggaggctggggcaccgccgacgcctcgggagccatggccgaagggggagaaggaggcgaggacgagatccagtttctgaggactgaggatgaagtggtactccagtgcatcgccaccattcataaggagcagaggaagttctgcctggcagccgagggacttgggaatcgcctgtgcttcttggaacccacttcagaagccaagtacattcctccagatctctgcgtctgcaattttgtgctggaacagtccctatctgtcagagccctgcaggaaatgcttgccaacacaggtgaaaatggcggcgaaggggcagcacaaggaggtggccacaggaccctgttatacggccatgcagttctcctgaggcactctttcagcggaatgtatctaacatgcttgactacatcaagatcccagacagacaaacttgcctttgatgtaggtctacgggaacatgccacaggagaagcctgttggtggactatacatcctgcttccaaacagaggtccgaaggagagaaagttcgaattggcgatgacctcatcctcgtcagcgtgtcctctgaaagataccttcatctctcagtatcaaatggtaacatacaagtggatgcctcctttatgcaaacactctggaatgtacatcctacgtgctcaggaagtagcatcgaagaaggatacctacttggtgggcatgtagtacgtcttttccatggtcatgatgaatgtttgacgataccatctacagaccagaatgattcccagcacaggaggatattctacgaagctgggggagctgggactcgagccaggtctctttggagagtggaaccccttcggataagctggagtggcagtaacatcagatggggccaggctttccgactccggcatctcaccacaggccactacctggccttgacagaagaccaaggccttatactgcaagaccgggcaaagtcagacaccaagtccacagctttctctttccgggcatcaaaggaactcaaggagaaattagactccagtcacaagcgagacatagaaggcatgggagttccagaaatcaagtatggagattctgtctgctttgtgcagcatatagccagtggtctgtgggtgacctacaaagcacaagacgccaaaacttcccgcctgggacctctaaaaagaaaggtcatactccatcaggaaggccacatggatgatggattaacactgcagagatgccaacgtgaggagtcccaggctgctcggatcatccggaacactacagccttattcagccagtttgtcagtggaaacaatcgcacagctgcccccatcaccctgcctatagaagaagtcctgcagaccctacaggacttgatcgcctacttccagcccccagaggaggagatgcgacatgaagacaagcagaacaagctccgctcactcaaaaacagacaaaatcttttcaaggaagagggaatgttggcccttgtcttaaattgcattgaccgcttaaatgtctacaatagcgtagcacactttgcagggattgcaagggaagagagtggcatggcctggaaagaaattctgaacctcctctacaaattgctggctgctctcattcgcggaaacagaaacaattgcgctcaattctccaataaccttgattggctcatcagtaaattggacagactagaatcttcctcaggtatcttggaagttttgcactgcatcttaactgaaagcccagaagccttaaatctgatagcggagggccacatcaagtcgatcatctccctgttggataagcacgggcggaatcacaaggttctggatatcctgtgctccctctgtctctgcaatggggttgcagtgagagccaaccagaatctgatctgtgacaacttgctgccccggagaaacctactcctgcagacacgactgattaacgatgtaaccagtatccggccaaacatcttcctgggagtcgcggagggctcagcccagtacaagaagtggtacttcgagctgattatcgaccaggtggaccccttcctaacagcagagcccacacatctgcgggtgggctgggcctcttcttcaggctatgccccatacccaggaggtggagaaggatggggaggcaatggtgttggtgacgacctgtactcctatggctttgatggacttcacctttggtcaggccggatacccagagctgtggcttccatcaaccagcacctcctgagatcggatgacgtgggtaagctgctgcctggacctcgggggtgcccagcatctcattccgcatcaatgggcagcccgtgcaggggatgtttggagaacttcaacacagacgggctcttcttccctgtgatgagcttttcagcaggtgtcaaagtacgtttcctgatgggtggacgtcatggagagtttaagttcctgcctccctctggctatgccccttgctatgaagccttacttccaaaagagaagatgagattggagcctgtcaaagaatataaacgtgatgctgatggcattagagatctcttgggtaccacccagttcctctcccaagcctctttcatcccatgccccgtagacaccagtcaggttattttgccacctcacctagaaaagatccgagacagactagctgaaaacatccatgagctttggggaatgaataaaatagaacttggctggactttcggcaagatacgagatgacaataaaagacaacacccttgccttgtggagttttcaaagctcccagaaactgagaagaactataacctgcaaatgtcaactgaaaccttaaaaaccctcttgaccctgggttgccacattgctcatgttaacccagctgctgaggaggatctcaagaaggtcaaactgcccaaaaactatatgatgtccaacggctataagccagcccctttggatttgtctgatgtgaagctgttacctcctcaagaaattttagtggataagcttgcagaaaatgcacacaatgtttgggcaaaagacagaataaaacaaggatggacctatggcatccaacaggatttgaagaacaaaagaaatccccgtctggtgccatatgcattactggatgagcgtaccaagaagtcaaacagggacagcctgcgggaagctgtgcgcacttttgttggttacgggtataacattgagccatcagaccaagaactagctgactcggctgtggagaaggtcagcatagacaagatccgatttttccgggtagagcgatcttatccagtgagatctggaaagtggtattttgagtttgaagtggtgactggaggagacatgcgagtcggctgggcgaggccaggctgtcgacctgatgtcgagctgggggccgatgaccaagcctttgtgtttgaaggcaacaggggccagcgttggcatcaaggaagtgggtattttgggcgtacctggcagccaggggatgtggtcggatgtatgattaacctggatgatgcttcaatgatcttcacactgaatggggagctgctgatcaccaacaaaggctctgaacttgccttcgctgactacgagattgagaatggcttcgtgcccatctgctgtctgggtctatctcagatcggccgcatgaatctcgggacagatgccagtaccttcaagttttataccatgtgcggtctccaagagggctttgagccttttgctgtcaacatgaacagagatgttgctatgtggttcagcaagcgcctcccgacgtttgtcaacgtgccaaaggatcatccacacatagaggtcatgaggattgatggcaccatggacagccctccgtgtctcaaggtgacgcataagacatttggcacacagaatagcaatgccgacatgatctattgccgcttgagcatgcctgtcgagtgccactcctccttcagtcacagcccctgtctggacagtgaagctttccagaaaaggaaacagatgcaagaaatactctctcatacaacaacacagtgctactacgccatccgcatctttggtggacaggatccatcctgtgtctgggtcggatgggtgactccagactatcacttgtacagtgaaaagtttgacctgaataaaaactgcacagtgactgtcaccctaggggatgaaagaggccgggtccatgaaagtgtgaaacgcagcaactgctacatggtctggggtggagacattgtagccagttcccagagatcaaatcggagcaacgtggacctggagatcggctgtctcgtggatctggccatgggcatgttgtccttctcagccaatggaaaggaactgggcacctgctaccaggtggagcctaataccaaagtgtttccagcagtcttcctgcagcctacaagtacttctttgtttcagtttgaacttggaaagctgaagaacgcaatgcccctgtcagcggccatattcaggagtgaagaggagaacccagtcccacagtgtccacctcggctggacgtccaaaccatccagcccgtgctctggagccgcatgcccaacagcttcctgaaggtggagaccgagcgtgtgagcgagcgccacggctgggtggtgcagtgcctggagcccctgcagatgatggcgctccacatccccgaggagaacaggtgtgtggatatcctggagctctgtgagcaggaggacctgatgcggttccattaccacacgctgaggctctacagcgcggtgtgcgccctgggaaacagccgcgtggcctacgccctgtgcagccacgtggacctctcccagctcttctatgccattgacaacaagtacctccccggcctccttcgatctggtttctatgacctgctcatcagcatccacctggccagcgccaaggagaggaagctgatgatgaagaacgagtacatcatccccattaccagcaccaccaggaatatctgcctcttcccggacgagtccaagaggcatggactgcctggggtgggcctgagaacatgtctcaagcccgggttcaggttctccaccccttgctttgttgtgactggtgaggatcaccaaaagcagagccccgagattcccttggagagtctcaggacgaaggctctgagtatgctgacagaggcagtgcagtgcagcggggcccacatccgagaccctgtaggggggtctgtggagttccagtttgtgcctgtgctgaaactcattggaaccctgctggtcatgggcgtgtttgatgatgatgatgttcggcagatcctcctcctgattgatccctctgtgtttggggagcatagtgcggggacagaggagggagcagaaaaggaggaagtgacccaggtggaggagaaggctgtggaggctggggagaaggccggcaaggaggctcctgtcaaaggcttgttgcagactcgattacccgaatccgtcaagctgcagatgtgtgagctcctcagctatctctgcgactgtgagctgcagcaccgagtggaggccattgtggcatttggtgacatttatgtctccaagctgcaggcaaatcagaagttccgctacaatgagctcatgcaggccctgaacatgtctgcggccctgactgcccggaagaccaaggagttccgctcacccccacaggagcagatcaacatgctgcttaactttcaactgggagagaactgcccctgcccagaggagattcgggaggagctgtatgatttccatgaggaccttctccttcactgtggggttcctttggaagaagaggaagaggaggaggaggacacctcctggacaggaaaactctgtgccttggtttacaaaatcaaaggcccacccaagccagagaaggagcagccgacggaggaggaggagagatgccccacaacattgaaggaactcatctcacagacgatgatctgctgggcccaggaggaccagatccaggattcagagctggtccgaatgatgttcaacctcctccggaggcagtatgacagcattggggagctgctgcaggcgctgcggaagacctacaccatcagccacacctctgtaagcgacaccatcaacctgctggctgccctgggccaaatccgctccctcctcagtgtcaggatgggcaaggaagaggagttgctcatgatcaatgggctgggagacataatgaacaacaaggtgttttaccagcatcccaacctcatgagagtcctgggcatgcacgagacggtgatggaggtgatggtgaacgtgttgggtacagagaaatctcagattgcatttccaaagatggttgctagctgctgccgtttcctttgctatttctgtcgaattagccggcaaaatcagaaggccatgtttgagcatctgagttatcttctggagaatagcagtgttggcctagcctccccgtcgatgaggggatccaccccgctggatgtggcagcttcctctgtgatggacaacaatgagttagcgctgagcttagaggaaccagacctcgagaaggtggtgacctacttggcaggctgtggcctacagagctgccccatgcttctggccaaaggataccctgatgtcggctggaaccccattgaaggggaacgctacctgtccttcctgaggtttgctgtcttcgtgaacagtgagagtgtggaagaaaacgccagcgttgtggtcaagctgctcatcagacgcccagagtgcttcggcccggccctgcggggtgaggggggaaacggactcttggcagccatgcagggtgccattaagatctctgagaacccagcgctcgacctcccctctcaaggatacaaaagagaagtcagcacggaggacgatgaagaggaagaagaaatcgtgcatatgggcaatgcaattatgtcattttattcggcccttatagatctactgggccgctgtgctcctgaaatgcacctcatccagacaggaaagggggaagccatccgcatcaggtccatcctgcgctccctggtccccacagaagacctggttgggatcatcagcatccccttgaaactgccctccctcaacaaagatgggtcggtcagtgagccagatatggcgggcaatttctgccctgaccacaaggcacctatggtgctgttcttggaccgcgtttatggcattaaggatcaaacttttctgctccacttgctggaggttggatttttacctgacctaagagcttctgcctctctagatacagtttccctaagcaccacagaggctgcgcttgcactaaataggtatatatgttctgctgtgctcccgctcctcacaagatgtgcccctctctttggcggaacagaacactgcacctctctgattgattccacactgcagacaatatacaggctatccaagggacgttccctcaccaaagcacaaagggacactatagaagaatgtttgcttgccatttgcaatcacttgaggccttccatgttacagcaactcctgcgacgcctcgtttttgatgtgccgcaactcaatgaatactgcaaaatgcctctcaagcttctgacgaatcactatgaacagtgttggaagtattactgcctgccttcaggatgggggagctacgggctagctgtggaagaagagctgcacctaacggagaagcttttctgggggattattgactcgctctcccataagaaatatgacccagatcttttccgaatggccctgccttgtctcagtgctatagctggggccttgccaccagattatttagattccagaatcacagccacgttggagaaacagatctcagtggatgcggatggcaactttgacccaaaacctattaacaccatgaatttttccttgcctgaaaaattggaatacatcgtcaccaagtatgctgagcattcacatgataaatgggcctgtgacaagagtcagagtggatggaaatatgggatttccctggatgaaaatgtgaagacccacccactgataaggcctttcaagacattaacggagaaggagaaggaaatttatcgctggcctgcgcgagagtccctgaaaaccatgctggctgtgggctggactgtggagaggaccaaagagggagaagctttggttcaacagcgggaaaatgagaagcttcgaagtgtgtcccaggccaaccagggcaacagctacagtcctgctcccctcgacctctcaaacgttgtgctctccagagagctccagggaatggtggaggtcgtggctgagaactatcacaatatctgggccaagaagaagaagctggagctggagagcaaaggtggtggcagccaccctcttctggtaccatatgacaccttgactgccaaggaaaagttcaaggaccgggagaaggcacaggacctgtttaagttcctccaagtgaatggcatcatagtttccaggggtatgaaggatatggagctggatgcctcctccatggagaagaggtttggctataagttcttgaagaagatcctgaaatacgttgattctgctcaagaatttattgcccatttagaagccattgtcagcagtgggaaaactgaaaagtctccccgtgaccaggagatcaaattctttgccaaagttctcctcccgctggttgaccagtacttcaccagtcattgcctctacttcttgtcatcccctctgaagccccttagcagcagcggatatgcctcccataaggagaaagaaatggtggccggcctgttctgcaaacttgccgctctcgttagacacagaatttccctctttggtagtgattctactacaatggtgagctgtcttcacatcttagctcagacacttgacacaaggactgtcatgaagtcaggctcagagctggtgaaggctgggttacgagcattctttgaaaatgctgcagaagatttggagaagacttcagaaaacctgaaacttgggaagttcacccattcccgaacgcagattaaaggcgtttctcagaatattaactacactacagtggctctgctccccatcctgacgtccatctttgagcacgtcactcagcatcagtttggaatggatctactcttgggtgatgtgcagatttcatgctaccacatactgtgcagcctctactcccttgggacgggaaagaacatttatgttgaaaggcaacgccctgcccttggagaatgtctggcctcgctggcagctgccataccagtggcattcctggagcccacccttaatcgctacaatccactctcggtcttcaacaccaaaacccccagggagaggtctattctggggatgccagacacggtagaagacatgtgtcctgacatcccccagctggaaggcctgatgaaggaaatcaacgacctggccgagtcaggggcccggtacacagagatgccccatgtcatcgaggtgatcttacccatgctctgcaactacttgtcctactggtgggagcggggtcctgagaacctgccccccagcacagggccatgctgcaccaaggtcacctctgaacacctcagtctcatcctgggcaacattctgaaaatcatcaacaacaacctgggcatcgatgaggcctcctggatgaagcgcattgcagtgtatgcacagcccatcatcagcaaagccaggcccgacctgctgagaagccacttcatcccaactctggagaagctgaagaaaaaggctgtcaagacggtgcaggaggaggagcagttgaaagccgatggcaaaggggacacccaggaggcagaactcctcatcctggacgagttcgcggtcctctgcagagatctctatgccttctaccccatgctgatccgctacgtggacaacaacagatctaactggctgaaaagtcctgatgctgattctgaccagctcttccgcatggtggcagaagtcttcattctgtggtgtaaatctcataacttcaagagagaagagcaaaattttgtgattcagaatgaaattaataatttggcatttttaactggagacagcaaaagcaagatgtcaaaagccatgcaagtaaagtctggaggacaagaccaggagcggaagaagacaaagcggcggggagacttgtattccatccagacctccctcatcgtggctgcactcaagaaaatgctgcccattggtttgaatatgtgtactccaggcgaccaggagctgatctccctcgcaaaatcgcgatacagccatagggacacagatgaagaggtcagagaacatctgcggaacaacttgcacttgcaggaaaagtctgatgacccagctgtaaaatggcaactgaacctctacaaggatgttctgaagagtgaagaacctttcaatccggaaaagacagtggagcgtgtgcagagaatttcagcagctgtcttccacctggaacaggtggaacagcctttgaggtccaagaaggccgtctggcacaaactgttatcaaagcaacggaaacgggcagtggtggcctgtttcaggatggcccctctctacaacctgcccaggcaccgctctattaacctcttcctccatggctatcagagattttggatagaaacagaggagtattcctttgaagagaaactagtacaggatttggctaaatctccaaaggtggaagaggaggaggaggaagagacagaaaaacaacctgacccactacatcagatcattctctattttagccgcaacgctctcacggagaggagcaaattggaagacgaccctttgtacacctcctattccagcatgatggccaagagttgtcaaagtggtgaggatgaagaagaagatgaagacaaggaaaaaacattcgaagagaaagagatggagaagcaaaaaaccctctatcagcaagctcggctgcatgagcgtggtgctgcggagatggtccttcagatgataagcgctagcaaaggtgagatgagccccatggtggttgagacgctgaagctggggatcgccattctgaacggaggcaatgctggtgtgcaacagaaaatgctagattacctaaaggagaaaaaggatgctggattctttcaaagcctttctggtcttatgcagtcttgcagtgtccttgatttgaatgcatttgagaggcagaataaagctgaaggcctggggatggtgactgaagaaggaacactcattgttcgggaacgtggtgaaaaagtactccagaatgacgagttcacgcgtgatctctttagattcctacagttactttgtgagggacataacagtgactttcagaacttcctgcggactcagatgggcaacaccaccaccgtgaatgtcatcatcagcactgtggactaccttctgcgtctgcaggaatcaatcagtgatttctactggtattattcagggaaggacatcattgatgaatctggacagcacaatttttccaaagctctggcagtcaccaagcagattttcaattctcttacagaatacatccagggcccttgcattggtaatcaacagagcctggctcacagcaggctgtgggacgcagtggttggcttcctccatgtctttgctaatatgcagatgaaactctctcaggattccagtcagatcgagctgctgaaggaactcttggatctccttcaggacatggtggtgatgcttctgtccctcctggaagggaatgtggtaaatggcaccattggcaagcagatggttgacacactggtagaatcatctaccaatgtagaaatgatcttgaaattctttgacatgttcttgaaacttaaagacttaaccagctcagacaccttcaaagaatatgacccagatggtaaaggaattatctccaaaaaagaattccagaaggccatggaagggcaaaaacagtacacgcagtcagagattgactttctcctgtcgtgtgcagaagctgatgagaatgacatgtttaattacgttgattttgtagaccggttccatgagccagccaaggacatagggtttaatgtggctgtgttattgacaaatctttctgaacacatgccaaacgattcccgcctgaagtgtctgttggacccagcagaaagtgtgctaaattacttcgaaccctacctaggacgcatcgagatcatgggtggggccaagaagattgagcgtgtttattttgagatcagtgaatccagtcgcactcagtgggagaagccccaggtgaaggaatctaagcgacagttcatttttgatgttgtcaatgaaggtggggagcaggaaaagatggagctgtttgtgaacttctgtgaggacaccatctttgaaatgcagttagcatctcagatctctgaatccgattcagctgacaggccagaagaggaggaagaagatgaagattcttcttacgtgttagaaattgcgggtgaagaggaagaagacgggtctcttgagccggcctctgcatttgctatggcctgtgcctctgtgaagaggaatgtcaccgacttcctgaagagagcaaccctgaagaacctcaggaagcagtacaggaacgtgaaaaagatgactgcgaaggagctggtgaaggtgctcttctcctttttctggatgctgttcgtggggctattccagttgctcttcaccatcctgggaggaatctttcagatcctctggagcacagtgtttggagggggcctggtagaaggggcaaagaacatcagagtgaccaagatcctgggtgacatgcctgacccaacccaatttggtatccatgatgacactatggaggctgagagggcagaggtgatggagccaggtatcaccactgaactagtacacttcataaagggggagaagggagatacagatatcatgtcagacctctttggactccacccaaagaaagagggcagcttaaagcatgggcctgaagtgggtttgggtgacctctcagaaattattggcaaggatgaaccccctacattagagagtactgtacagaagaagaggaaagctcaggcagcagaaatgaaagcagcaaatgaagcagaaggaaaagtagaatccgagaaggcagacatggaagatggagagaaggaagacaaagacaaagaagaggagcaagctgagtacctgtggacagaagtgacaaaaaagaagaagcggcggtgtggtcagaaggttgagaagccggaagctttcacagccaatttctttaaagggctggaaatctatcagaccaagttactgcattacctggccaggaatttctacaacctgaggttccttgctctgtttgtagccttcgctatcaacttcatcctgcttttttataaggtcactgaagaacctttagaagaagagacagaggatgttgcaaacctatggaattcctttaatgacgaggaagaggaagaagcgatggtattctttgtccttcaggagagcaccgggtatatggcaccaaccctgcgtgccctggccatcatccataccatcatctctctagtctgtgtggtgggctactactgcctgaaggtgcctttggtggttttcaaaagggaaaaagaaatcgccaggaagctggagtttgatggcctatatatcaccgaacagccatctgaagatgacatcaaggggcagtgggaccgcttggtgatcaacacaccatcttttcctaataactactgggacaagtttgtaaagagaaaggtgatcaacaagtatggagatctctacggagcagaacgcattgctgaacttctgggtttggacaaaaatgctcttgactttagcccagtagaagagaccaaagcagaagcggcttctctggtgtcatggctaagttccatagacatgaagtaccatatctggaagcttggagttgtttttactgacaactcctttctctaccttgcctggtatacaaccatgtcagtcctgggccactacaataacttcttctttgctgctcacctattggacatcgcaatgggcttcaagacactgaggaccattctgtcatctgtaactcacaatggcaaacagttggttctgactgtcggtctcctggccgtggtggtttatctctatactgtggtggctttcaacttcttccgcaagttctacaacaaaagcgaagacgatgacgagcccgatatgaagtgcgacgacatgatgacgtgttaccttttccacatgtacgtgggagtgagagcaggaggtggcattggtgatgaaattgaagaccctgctggtgatccttatgaaatgtatcgcattgtctttgacattacctttttcttcttcgtcattgtcatcttgctggccatcattcaaggtcttattattgatgctttcggagagctaagagaccagcaggaacaagtacgagaagatatggagactaaatgtttcatctgtgggattggcaatgactactttgacacaacccctcatggttttgaaacacatacattacaagagcacaacttagccaactacttgttctttctgatgtatttgattaataaagatgaaacagagcacacgggtcaggaatcttatgtctggaagatgtaccaagaaaggtgttgggatttcttcccagccggtgactgctttcgtaaacaatatgaagatcagcttggataaatctgaatcaaagaagcgcgacaattctggacagtcaacttcccatgaaataaagtcccctttttacagttctgcaacatatctgaaatgtgacattttctaaatgcctcccttaaaaaaaaaactgctgaaaatctgtgctattttgaaattgatttggctttttgtgcctaatggacatacactgtgggagagaacctgtcaaaatgtcgaagaaggaaggcgaagaatcaagtaatctctaggcaaatgccttcaagttttccagttctgaggtaactagttcagtttgttgggatggaagcatgaaggaaagggctagagaagtatgaaatctcgaatgtgtaatacctgaaaatttaaacacttgaatgtcatcatggtatccaacttgtgactcatagggtctgaactcactccaaaagataataactgcagtctaatttttcccatggtacttgctagtgactgtatccagaaaagctttaagcagttaaagaaacagaaaaaaaccgacactttgtcgacactgaaatatcgattaagtgccttaaaacctctttagacatagctatgcaagttttttatgtttgtgttccagaaggacagttccattcattagttgtgatcttccgtcttactttatgaaactgcacttgaaggttattcatacaagtttttttagtaacagctgtcagtcaactgctgttattagaagaaaagtactgtactgaaaattcagaaaaaaaaatctcaaccttatgccaaaatggagtaatgctttatggtcccttgtaagtagtggagctgctctgtttaggtgaatctcctcaaatacaatgaagtgcccactgcaataaagtaatacgtaccaataaaaa

SEQ ID NO: 12306 - DNA, 639 bp, Homo sapiens
  SIMILAR (46)..(201): 841254mologous to Homo sapiens ryanodine receptor 3,accession number AJ002512,Smith-Waterman Score=214.
atgaggagacaggaagaaggcagtactgtgggtgtcgaagggcatttaatgtccaaatttgatgtttgtggcattcatgtaggtatcttggaagttttgcactgcatcttaactgaaagcccagaagccttaaatctgatagcggagggccacatcaagtcgatcatctccctgttggataagcacgggcggaatcacaagaatggtagcactattgctgatgaactagatggtaccagtgctgcacttctggggatcacacttgaaataaggagatctttgggctttggaatcccttgttggatatctgtatccagtggaaggaagatcagtgacctacaagggagggagaagtacaagaaggcttctggaggacgtggccatcaccctggacatctggtgttacagattttagccaaactctctgtgtatgtctgtgttgtgtatgtttatgtggaaaatggcatgccaatagatcatgaaaagcagaaacagcctgaaaatggagaaagaaaagttctgctgaaaagacacagcattattgccaccatgcaggcggagaccagtgcaaacattactctctgccctcgtgtcacagtgggcagacagttacaacaatctcagcgcagtcagaactga

SEQ ID NO: 12307 - DNA, 4149 bp, Homo sapiens
  SIMILAR (373)..(1626): 1001254mologous to Homo sapiens neurotensin receptor,accession number X70070,Smith-Waterman Score=2161.
tcaagctcgccccgcgcagcccgagccgggctgggcgctgtcctcgggggcctggggaaccgcgcggtttggagatcggaggcacctggaacccgtggcaagcgccgagccgggagacagcccgaggaaccacgggttctggagctaggagccggaagctgggagtccggaggagagcggagcccggagcccggagcccggggcggcgcgtctgggtctggcgcttcccgactggacggcgcgcccgctggtcttcgccacgcgccctcccctgggctcgcgttcatcggtccccgcctgagacgcgcccactcctgcccggacttccagccccggaggcgccggacagagccgcggactccagcgcccaccatgcgcctcaacagctccgcgccgggaaccccgggcacgccggccgccgaccccttccagcgggcgcaggccggactggaggaggcgctgctggccccgggcttcggcaacgcttcgggcaacgcgtcggagcgcgtcctggcggcacccagcagcgagctggacgtgaacaccgacatctactccaaagtgctggtgaccgccgtgtacctggcgctcttcgtggtgggcacggtgggcaacacggtgacggcgttcacgctggcgcggaagaagtcgctgcagagcctgcagagcacggtgcattaccacctgggcagcctggcgctgtccgacctgctcaccctgctgctggccatgcccgtggagctgtacaacttcatctgggtgcaccacccctgggccttcggcgacgccggctgccgcggctactacttcctgcgcgacgcctgcacctacgccacggccctcaacgtggccagcctgagtgtggagcgctacctggccatctgccaccccttcaaggccaagaccctcatgtcccgaagccgcaccaagaagttcatcagcgccatctggctcgcctcggccctgctgacggtgcctatgctgttcaccatgggcgagcagaaccgcagcgccgacggccagcacgccggcggcctggtgtgcacccccaccatccacactgccaccgtcaaggtcgtcatacaggtcaacaccttcatgtccttcatattccccatggtggtcatctcggtcctgaacaccatcatcgccaacaagctgaccgtcatggtacgccaggcggccgagcagggccaagtgtgcacggtcgggggcgagcacagcacattcagcatggccatcgagcctggcagggtccaggccctgcggcacggcgtgcgcgtcctacgtgcagtggtcatcgcctttgtggtctgctggctgccctaccacgtgcggcgcctcatgttctgctacatctcggatgagcagtggactccgttcctctatgacttctaccactacttctacatggtgaccaacgcactcttctacgtcagctccaccatcaaccccatcctgtacaacctcgtctctgccaacttccgccacatcttcctggccacactggcctgcctctgcccggtgtggcggcgcaggaggaagaggccagccttctcgaggaaggccgacagcgtgtccagcaaccacaccctctccagcaatgccacccgcgagacgctgtactaggctgtgcgccccggaacgtgtccaggaggagcctggccatgggtccttgcccccgacagacagagcagcccccacccgggagccttgatgggggtcaggcagaggccagcctgcactggagtctgaggcctgggacccccccctcccaccccctaacccatgtttctcattagtgtctcccgggcctgtccccaactcctccccacccctcccccatctcctctttgaaagccagaacaagagagcgctcctctcccagataggaaaagggcctctaacaaggagaaattagtgtgcggcaaaaggcagttttctttgttctcagactaatggatggttccagagaaggaaatgaaatgtgctgggtggggccgggcctccggcggcccggctgctgttcccatgtccacatctctgaggcctgcaccccctctgtctagctcggggagtccagccccagtcccgcaggctccgtggctttgggcctcacgtgcagaccctgccatgcagacccatgcccccctcccccaggcagctccaagaaagctccctgactcgccccttcaggcctggcaagctgggggcccatcgccgtggggagtccctcccaccaccctcgccgcaggcagctgcagcccccagaggggaccacaagcccaaaaaggacaaaaatgggctggcctggaatggcccagaccccagcctcccctcctccctcccatcctcacccaggccaaggcccaggggctctgccaggacaccacatgggagggggctcaggcctcagcctcaagatcttcagctgtggcctctcgggctcggcagaagggacgccggatcaggggcctggtctccagcacctgcccgagtggccgtggccaggatggggtgcgcattccgtgtgctttgcttgtagctgtgcaggctgaggtctggagccaggcccagagctggcttcagggtggggccttgagaaggggaatgtgggacaggggcgatggtgcctggtctctgagtaagatgccaggtcccaggaactcaggcttcaggtgagaaggagcggtgtgtccaggcaccgctggccggcagccctgggctgaggcacagactcatttgtcaccttctggcggcggcagccctggccccggcctccaagcagttgaaaaagctggcgcctccttggtctctaggatccaggctccacagagcacatgactagccaggcccctggcttaagaaggtcgcctaagcctaagagaagacagtcccaggagaagctggccgggaccagccaggagctgggagccacaggaagcaaaagtcagccttttcttcaagggatttccctgtctcagagcagcctttgccccagggaaatgggctctgggctggctgcctgcaccggccatgtcgacccaggacccggacacctggtcttgggctgtgttcagccactttgccttctctggactcagtttccccgtcttgagaaatgagagtcgaatgttacagtatcttgcagttcgtttggatcttggctgtttgagtttgacgggttccttgaaccccacaaaatccctctccaaccacaggacccttcggctcaccaagaacggggcccaggggagtcaggcctattcgctgcacttcctgccaaactttgcccccacaagcctggtcatcagccaggcagccctcccagtgcccaagggccaccaaccccagggaaacagggccagcacagaggggccttcctcccccacagagctcccatgacatagtctgctctgggcggaagagctttgctgccagccagggatgtccagaggtcggtgcagcccctatccctgctcaggagtgggctcagagtctagcaaatgctaaggcccctcaggctgggctctgaacgaggacctggactcagagccagacagggcagcctcagacccttctctggggctcctggaccttgggccataatttctgagcctcggtttccccatctaaggaacagatgtggtcgttccgccctctcagctggatgagactgtcctggaggatccaccccggaacagacagaacggtgtctctcaaggatggtgctctgagagagggcagagtggatgccccactgccctagaccctcggtagacgtggggtctctggggcggggtctgtggctgtgactgaagtcggcttttcccgttgatgtcttgatgctcctatctgtgcactttaccgtaggtagggacacgtgtccatgcaccacacgacacacccacgacacctgatctcgtatcacctagcttgcggcccaggtcatgatgtggccccggaagactggccctgcgtgccatgagtgcgtcggtcatggagtccggagcccctgaagccgggccccttggtgacggcaacaagccctcacagctcaaacgcccacccccactcccaccatctgcaggtggtgaaaacaaaccccgtgtatctctcaataaaggtggccgaagggcctcgatgtgg

SEQ ID NO: 12308 - DNA, 3249 bp, Homo sapiens
  SIMILAR (1153)..(2754): 891254mologous to Homo sapiens PEX1,accession number AB008112,Smith-Waterman Score=2320.
tttccccactttgaaactgtagaagtcccatgtgtctatgcacaacagctctcgtgttttatagggactggatgcacagacgtgatctcaacgggtccttctgtccaggaaggggcctgtccttcccctcgctcagtcctcccctcacctcccctcacccccaggcagcagtcgcaggctttcctccgagtccccgcgctgccgatggacgtgctccctttgcttgttgtggaggatcctccaacgggggcagccagggggccggggccagaccctacaacccaccagcccccagaggtagctatttttgcagccagccgtgttgaaggtggacttcggccagagcaggagaacaggagggacgcgggacggcctcagatccggacgcccaagcaggggagggcagaacagacccgccacccagccagggtcagcagcggtggtggtggctctcaggagcccacacaggtcaacaccttcatgtccttcatattccccatggtggtcatctcggtcctgaacaccatcatcgccaacaagctgaccgtcatggtacgccaggcggccgagcagggccaagtgtgcacggtcgggggcgagcacagcacattcagcatggccatcgagcctggcagggtccaggccctgcggcacggcgtgcgcgtcctacgtgcagtggtcatcgcctttgtggtctgctggctgccctaccacgtgcggcgcctcatgttctgctacatctcggatgagcagtggactccgttcctctatgacttctaccactacttctacatggtgaccaacgcactcttctacgtcagctccaccatcaaccccatcctgtacaacctcgtctctgccaacttccgccacatcttcctggccacactggcctgcctctgcccggccaaggcccaggggctctgccaggacaccacatgggagggggctcaggcctcagcctcaagatcttcagctgtggcctctcgggctcggcagaagggacgccggatcaggggcctggtctccagcacctgcccgagtggccgtggccaggatggggatccaggctccacagagcacatgactagccaggcccctggcttaagaaggtcgcctaagcctaagagaagacagtcccaggagaagctggccgggaccagccaggagctgggagccacaggaagcaaaagtagggacacgtgtccacgcaccacagacacacccacgacacctgatctcgtatcactagcttgcggccaggtcatgatgtggccccggaagctggccctgcgtgccatgagtgcgtcggtcatggagtccggagcccctgagccggcccctggtgacggcacagccctcacagctcaaacgcccacccccactcccaccatctgcaggccagtgtccctcctggcccagagcggtacccgggccctcgactgctgccctccacgggctccctgcctgaacctgtccacaccccgattcgtccccagagttggacactccgtgatgtttaagggatccctgggctctgtgccaaggaggaaggagctggagcagcgaggcaacaaggcagatgggcgggctcacgtcagaaccaccagggagcctgttccagaccagtttcccaggccccagctgagccccaggcgatcagaagggcataggagatcactgcaccccaaccggaggaacactgacattgacgacaacatcataggaatggaaatacaaccatggaattccagctcagtcatggagcgggagatctggggacactggccgggcagcctgccccaggcacccctgaactccagtcccctgaagccagagcccgggccaactaaccaggtgactagcagagccactggggacacccccagccaggcccagaccccagccaattacccagggcctggagcaaggccctgtcagctcaacccccatcatctgacctggttcaaggcccatggccaccgagagccagtctgcagctgggcaaaagggcagacagggccaggtgaggtggacgtctcttgcacctacacatcctcgcgacaggaggatgcacgtcgtacagatggggaaacaggctgggaaagggagtgtgacctgcccgtgatcccagaggtgtggctaccagagctggaactaaaaccggagcccttcaccaaatccagctcccaggacctaagctggccttggatgaacccagtacggtgcctctcctgcctgtatcggggcatccgggcactgccagcgtcccattactggactctggtcaaggagcttggggacagagtggccgccgaggggacggagcctgccgtgtcccgtgtgcagcggcggaccaccaggcagagcgccaaggggagtgtccggagatccagcatgggaagagccccctgccacttccagcaaggagcacacagagagggggagcctcctgttaagcatccaagtcccaagtcaccggccggcatcggctgcagctctctgtgtgtggagacatctcattctggtgtcttctttacacagggtctgcatctgggggtccactggggaggactcagcctctcccgcgtcctccatcccacacacctgtccctgggcagccacggggaacaggagcacaggggacagcaggcagagggcagcgcccgggcgaaggggactttcgcccttgcttcatgcagccctggcacccgcagcaggacctcggctgatcccaagggggtccacagtggatatggtccttcaggggtgcccttgaaggcaggaaggggacaggactttatactgttcctcccaccccttcgagcagtcaccaactgcagcccagatgaggtcaacagcatgtctgatggcgtggtccccagcctgcctgatggcgtggtccccagcctgtctgatggcatggtccccggcctgtctgatggcgtggtccccagtctgtctgatggcgtggtccccggcctgtctgatggcgtggtccccggcctgtctgatggcatggtccccggtctgtctgatggtgtggtccccagcctgtctgatggtgtggtccccggcctgtctgatggcttggtccctggtctatttgatggtgtggtccccagcctgtctgaaggtgtggtccccagcctgtctgatggcgtggtccccggcctgtctgatggcttggtccctggtctatttgatggtgtggtccccagcctatctgaagatggggagaggagctga

SEQ ID NO: 12309 - DNA, 265 bp, Homo sapiens
  SIMILAR (262)..(140): 411254mologous to Caenorhabditis elegans coded for by C. elegans cDNA yk61e11.3; coded for by C. elegans cDNA yk69a7.5; coded for by C. elegans cDNA yk61e11.5,accession number U41510,Smith-Waterman Score=69.
cgcttaggatgacgcatagggcatctccacagagttttggccacttgcatcctagagcttgatgcttttcctgagatacgcgcccttggtgggtggtagtttctgcatctggtctcacccactccagttcttcctcacctccatcaaggtgaactttgtagaaacactcttctgcttccagtccttcaaagacattttttagccctctgctcttgtggaactctaacctagataagggagccagcagcagcaagaagacaaatcc

SEQ ID NO: 12310 - DNA, 553 bp, Homo sapiens
  SIMILAR (1791)..(4061): 821254mologous to multiple sclerosis associated retrovirus polyprotein,accession number AF009668,Smith-Waterman Score=3109.
cgggtcccagcactggcttactggcctggcagagttccagttaatgtcaccagcactgccttgttaagcgtgctggacatttttccaactgtggtagccctggcccaggccagcttacctcaaggacggcgctttgatgatgtggacgtctccgaggtgctctttggccggtcacagcctgggcacagggtgctgttccaccccaacagcggggcagctggagagtttggagccctgcagactgtccgcctggagcgttacaaggccttctacattaccggtgagtgaggggccacttagccctgcctcccacagtcacagctgcacggggaccccatggactctcacccaggcctctgggaatgagtgtgagtccctcctttgtggggggttctcagcacctcttgacaagcgtctcctccaaacccagggtccctgcacaggctctctggatccctcatatgcaaataagatctttgtgctgttcacctgaatttctagtgagctgggagctctcagcacgtgtatgcggccgctcagaggatcgagcgac

SEQ ID NO: 12311 - DNA, 1179 bp, Homo sapiens
  SIMILAR (718)..(798): 811254mologous to Homo sapiens Human secreted protein, SEQ ID NO: 5210,accession number G01129,Smith-Waterman Score=125.
atgttgttttcacatagacgctgcacagccaagttctttgccatggagatggcctcctggatctgccttaaggcggcaataagaataatggctaaggaagaagaggaggaggaagaggagaggttggtcttgctgtctcaggggtggcagtggcagaagaaaattcatgtattacgtggacccatgcagttcaaatccgtgtcgctcaaaggggcacaatttagagaaaactcgagcaaacagctccaaaccaccgcggccttttcagactgctttgtggtcctctttgctttccggagcagaaatccaggtggaactgaaaggaaaaacaagcaggccagcttacctcaaggacggcgctttgatggtgtggacgtctccgaggtgctctttggccggtcacagcctgggcacagggaagtgatcattttgtccagctgttcttacacctcgttctatgaaacgctgggctctgataacacctacagctgggcggctccggcaatgaaaacaccgccacgtgggcctgctgcctttgcgtcacgcgcctttgtccaatggagagccgcgttacgaagccagggggtggtcgcagccgggcgggtccgcatcagctgccacggattggccaaggggggcggtgccgcatgccgtggcttgggctcgtggccaatggtggccggacgaggggccccgccttatcagggatttgtcttcttgctgctgctggctcccttatctaggttagagttccacaagagcagagtaagctctgccaccctttctcaggtgctgttccaccccaacagcggggcagctggagagtttggagccctgcagactgtccgcctggagcgttacaaggccttctacattaccgtttccaaggttttagggaatgagaagagacttggaaatcaccgtttccagtttctctccatctttccagaaatcaacaatccatataaaatagataggggccgagtcgcagcttacgtgcagtcctggttgaaagagaagcagttgagcgccgactcaaccccgcccgggggagcgtccgcggcctcggcctccatcgggggctcggcccgggaacatacagctccctccaaagcctttcctattaattactgggagtccccggaaatgcctcgcacgtgcggggacctgcccttttag

SEQ ID NO: 12312 - DNA, 942 bp, Homo sapiens
  SIMILAR (91)..(276): 851254mologous to Mus musculus GTF2I,accession number AF289666,Smith-Waterman Score=274.
atggggttttaccatgttggtcaagctggtactgaactcctgacttcaaatgatccactcacctcagcctctcaaagtgctcgcattacagggaaagctttacaaaaacccacagaggtacctgtaccatatgagaagatgctacaagaccagtcagctttgatagtacaggggcttccggaaggtgttgcctttaaacaccctgagaactatgatcttgcaaccctgaaatggattttggagaacacagctgggatttcatttattattaatagaaacaggatcttgctctgtcaccctggatggagttcagtggtgcaatcacagctcattgtagcctcaaccccccaagctagcaatcctaccacggcctttcgagtagctgtgactacaggacgtgagcaattggtagggggcattactttggccaccacagtgaccaaaaggattggtgggggacaggttaaagacacagggaagttggaggaagaactgacaagtgaggttccagagagggcagagtctcctgataaagatggtcttctgaagagtttccttgagactctcttacagaatgatgtgtgtttacccaaggctacacatcaaaaagaatttgataccttaagtggaaaattagaaggtattccaagagctgaggaaaatgagaaaataagaaaggagaaagtagtaaaagaggaaatgaagatcgagaaagacagagagtacagagaggacgggaaggaacaagaggcaggtttatataatggaggatgggacatggatgaaactggaaaccatcattctcagcaaactatcgcaaggacaaaaaaccaaacactgcgcgttctcactcataggtgtgaattgaacaatgagaacacatggacacaagaagcggaacatcacactccagggactgttgtggggttggaggagggatag

SEQ ID NO: 12313 - DNA, 1281 bp, Homo sapiens; identical to SEQ ID NO: 5683
  SIMILAR (47)..(331): 811254mologous to Homo sapiens FLJ00061 protein,accession number AK024468,Smith-Waterman Score=425.

SEQ ID NO: 12314 - DNA, 684 bp, Homo sapiens
  SIMILAR (742)..(957): 731254mologous to Homo sapiens FLJ00061 protein,accession number AK024468,Smith-Waterman Score=278.
atggatgaagctggaaaccatcattctcagcaaagtatcacaaggacagaaaaccaaacactgcatgttctcactcctaggtgggaattgaacaatgagatcacttggacacaagaaatacaaactaccatcagagaataccataaacacctctatgcaaataaactagaaaatctagaagaaatggataaattcctggacacatacaccctcccaagactaaaccaggaagaagtggaatccctgaatagaccaataacaggctctgaaattgaggcaatagttaatagcctactaaccaaaaaaagtccaggaccagatggattcacagccgaattctaccagaggtacaaagaggagctggtaccattccttctgaaactattccagtcaatagaaaaagagggaatcctccctaactcattttatgaggccagcatcatcctgataccaaagcctggcagaggcacaacaaaaaaagagaattttagaccaatatccctgatgaacatcgatgcaaaaatcctcaataaaatactggcaaaccgaatccagcagcacatcaaaaagcttatccaccaagatcaagttggcttcatctctgcgatgcaaggctggttcaacatacacaaatcaataaacgtaatccatcatataacagaaccaaagacagaaaccacgtga

SEQ ID NO: 12315 - DNA, 711 bp, Homo sapiens; identical to SEQ ID NO: 11952
  SIMILAR (367)..(705): 751254mologous to Homo sapiens putative p150,accession number U93563,Smith-Waterman Score=423.

SEQ ID NO: 12316 - DNA, 514 bp, Homo sapiens
  SIMILAR (487)..(311): 301254mologous to Human immunodeficiency virus type 1 envelope glycoprotein,accession number AF307204,Smith-Waterman Score=65.
ggacatggatgaagctggaaaccatcattctcagcaaactatagcaaagacaaaaaaccaaacaccgcatgttcttactcataggtgggaattgaacaatgagtacacttggacacaggaaggggaacatcacacactggggcctgtcatgagccaagatcatactgaatgggcaaaagttggaagcattccctttgaaaactggcacaagacaaggatgctctctctcaccaatcctattcgacagagtattagaagccctggccagagaaatcaggcaagaaaagagataaaggacattcaaatagtaaaagaggaaatcaaactatccctgtttgcagatgatatgattctgtctctagaaaatctcacagtctctgctaaaaagctccttctgcttataaacaacttcagcaaagattcaagatacaacaccaatgtacaaaaatcaacaggaagactgagagccaaatcaggaatgcagtcccattcacaattgccacaaaaagcataa

SEQ ID NO: 12317 - DNA, 1965 bp, Homo sapiens; identical to SEQ ID NO: 7403
  SIMILAR (676)..(1962): 901254mologous to Homo sapiens putative p150,accession number U93563,Smith-Waterman Score=2117.

SEQ ID NO: 12318 - DNA, 1833 bp, Homo sapiens
  SIMILAR (1)..(1602): 951254mologous to Homo sapiens putative p150,accession number U93563,Smith-Waterman Score=2644.
atgattatctcaatagatgcagaaaaggcctttgacaaaattcaacaacccttcatgctaaaaactctcaataaattaggtattgatgggacgtatttcaaaataataagagctatctatgacaaacccacagccaatatcacactgaatgggcaaaaactggaagcattccctttgaaaactggcacaagacagggatgccctctctcaccactcctattcaacaaagtgttggaagttctggccagggcaattaggcaggagaaggaaataaagggtaatcaattaggaaaagaggaagtcaaattgtccctctttgcagatgacatgattgtatatctagaaaaccccattgtctcagcccaaaatctccttaagctggtaagcaacttcagcaaagtctcaggatacaaaatcaatgtacaaaaatcacaagcattcttatacaccaacaacagacaaacagagagccaaatcatgagtgaactcccactcacaatcgcttctaagagaataaaatacctaggaatccaacttacaagggatgtgaaggacctcttcaaggagaactacaaaccactgctcaaggaaataaaagaggatgcaaacaaatggaagaacattccctgctcatgggtaggaagaatcagtatcgtgaaaatggccatactgcccaaggtaatttacagattcaatgccatccccatcaagctaccaatgcctttcttcacagaattggaaaaaactactttaaagttcatatggaaccaaaaaagagcccgcatcaccaagtcaatcctaagccaaaagaacaaagctggaggcatcacactacctgacttcaaactatactacaaggctacagtaaccaaaacagcatggtactggtaccaaaacagagatatagatcaatggaacagaacagagccctcagaaataacgctgcatatctacaactatctgatctttgacaaacctgagaaaaacaagcaatggggaaaggattccctatttaatagatggtggtgggaaaattggctagccatatgtagaaagctgaaactggatcccttccttacaccttatacaaaaatcaattcaagatggattaaagacttacatgttagacctaaaatcataaaaaccctagaagaaaacctaggcattaccattcaggacataggcctgggcaaggacttcatgtctaaaacaccaaaagaaatgggaacaaaagccaaaattgacaaaggggatctaattaaactaaagagcttctgcacagcaaaagaaactaccatcagagtgaacaggcaacctacaaaatgggagaaaattttcacaacctactcatctgacaaagggctaatatccagaatctacaatgaactcaaacaaatgtacaagaaaaaaacaaacaaccccatcaaaaagtgggcaaaggacatgaacagacacttctcaaaagaagacatttatgcagccaaaacacacatgaaaaaatgctcaccatcactggccatcacagaaatgcaaatcaaaaccacaatgagataccatctcacaccagttagaatggcaatcattaaaaagtcaggaaacaacagcactgttgacaatagcaaagacttggaaccaacccaaatgcccatcaatgataggctggataaagaaaatgtggcacatatacaccatggaatactatgcagccataaaaaggatgagttcatgtgctttgcatggacatggatgaagctggaaaccatcattctcagcaaactatcacaagaacataaaaccaaacaccacatgttctcactcacaagtgggagttga

SEQ ID NO: 12319 - DNA, 554 bp, Homo sapiens
  SIMILAR (81)..(551): 1001254mologous to Cloning vector pBACe3.6 levansucrase,accession number U80929,Smith-Waterman Score=814.
ggacatggatgaagctggaaaccatcattctcagcaaactatcacaaggagaaaaaaccaaacaccgcatgttctcacacatagagttaaataatgattacacattgaaaaaagtaatgaagccgctgatcacttcaaacacggtaactgatgaaatcgagcgcgcgaatgttttcaaaatgaacggcaaatggtacttgttcactgattcacgcggttcaaaaatgacgatcgatggtattaactcaaacgatatttacatgcttggttatgtatcaaactctttaaccggcccttacaagccgctgaacaaaacagggcttgtgctgcaaatgggtcttgatccaaacgatgtgacattcacttactctcacttcgcagtgccgcaagccaaaggcaacaatgtggttatcacaagctacatgacaaacagaggcttcttcgaggataaaaaggcaacatttgcgccaagcttcttaatgaacatcaaaggcaataaaacatccgttgtcaaaaacagcatcctggagcaaggacagctgacagtcaactaa

SEQ ID NO: 12320 - DNA, 1431 bp, Homo sapiens; identical to SEQ ID NO: 2316
  SIMILAR (1)..(846): 871254mologous to Homo sapiens putative p150,accession number U93567,Smith-Waterman Score=1362.

SEQ ID NO: 12321 - DNA, 937 bp, Homo sapiens; identical to SEQ ID NO: 5684
  SIMILAR (5)..(658): 1001254mologous to Escherichia coli Potassium-transporting ATPase (EC 3.6.1.36), b chain (ATP phosphohydrolase (potassium- transporting), B chain),accession number D90708,Smith-Waterman Score=1074.

SEQ ID NO: 12322 - DNA, 759 bp, Homo sapiens
  SIMILAR (121)..(528): 851254mologous to Homo sapiens gag,accession number AF156961,Smith-Waterman Score=625.
atggaatactatgcagccataaaaaatgatgagttcacggtctttgtagggacatggatgaagctggaaaccatcattctcagcaaactatcacaaggacaaaaatccaaacaccgcatgttctcgctcatagacttgaagcgaattaaaatagacctaggtaaattctcagataaccctgatggctatattgatattttacaagggttaggaaaatcctttgatctgacatggagagatataatgttactactagatcagacactaaccccaaatgagagaagtgccgccataactgcagcccgagagtttgacgatctctggtatctcggtcaggtcaatgataggatgacgacagaggaaagagaacaattccccacaggccagcaggcagttcccagtgtagaccctcactgggacacagaatcagaacatggagattggtgccacagacatttgctaacttgcatgctagaaggacttaggaaaactaggaagaagccttttgcctcttccaccattgaaactgcaaaactacaaatcattcttcaaatggagtcccagatgcagtccatgactaagatctactgtgtacccctgaactggcctgctagtccatgctccaatgttaatgacatcgaagtcacccctcccaaggaaatctcaactgcacaaccctactacgccccaattcagcaggaagcagttaagagtgatcgtcaaccaacctccccaacagcacttgggttttcctgttga

SEQ ID NO: 12323 - DNA, 900 bp, Homo sapiens; identical to SEQ ID NO: 7933
  SIMILAR (640)..(897): 661254mologous to Homo sapiens PRO2221,accession number AF116695,Smith-Waterman Score=280.

SEQ ID NO: 12324 - DNA, 963 bp, Homo sapiens; identical to SEQ ID NO: 5740
  SIMILAR (112)..(681): 941254mologous to Homo sapiens putative p150,accession number U93563,Smith-Waterman Score=972.

SEQ ID NO: 12325 - DNA, 1230 bp, Homo sapiens
  SIMILAR (91)..(531): 551254mologous to Mus musculus GTF2I,accession number AF289666,Smith-Waterman Score=355.
atggggttttaccatgttggtcaagctggtactgaactcctgacttcaaatgatccactcacctcagcctctcaaagtgctcgcattacagggaaagctttacaaaaacccacagaggtacctgtaccatatgagaagatgctacaagaccagtcagctttgatagtacaggggcttccggaaggtgttgcctttaaacaccctgagaactatgatcttgcaaccctgaaatggattttggagaacacagctgggatttcatttattattaatagtgccaccattgagcctcctgctgctcagcccatgtcctttactcacatgggacactctttgtgtgttcttgtggtagagactcacgcaaagccagttgctgtgcagagctcaagcttcaccagaaacccagaggtcatttccctggaagtggcagctgtgacagtaaaggaagaatcagaagatcctgattatgattatatcacattcaaggatgaagctggaaaccatcattctcagcaaattaacacaagaacaggaaaccaaacgctgcatgttctcacacatagaaacaggatcttgctctgtcaccctggatggagttcagtggtgcaatcacagctcattgtagcctcaaccccccaagctagcaatcctaccacggcctttcgagtagctgtgactacaggacgtgagcaattggtagggggcattactttggccaccacagtgaccaaaaggattggtgggggacaggttaaagacacagggaagttggaggaagaactgacaagtgaggttccagaaagggcagagtctcctgataaagatggtcttctgaagagtttccttgagactctcttacagaatgatgtgtgtttacccaaggctacacatcaaaaagaatttgataccttaagtggaaaattagaaggtattccaagagctgaggaaaatgagaaaataagaaaggagaaagtagtaaaagaggaaatgaagatcgagaaagacagagagtacagagaggacgggaaggaacaagaggcaggtttatataatggaggatgggacatggatgaaactggaaaccatcattctcagcaaactatcacaaggacaaaaaaccaaacactgcgcgttctcactcataggtgtgaattgaacaatgagaacacatggacacaggaagcggaacatcacactccagggactgttgtggggttggaggagggatag

SEQ ID NO: 12326 - DNA, 684 bp, Homo sapiens
  SIMILAR (12)..(254): 801254mologous to Homo sapiens crystallin beta-B2,accession number L10035,Smith-Waterman Score=345.
cccatcaaagtgacagcccagagcacaagatcatctttaataaaaccccaacttcaccgggaaagaggatggaaatcatagatgacgatgtacccagcttccacgccaatggctaccagagaaaggtgtcatctgtgtgggtgcggagtggcatgtgggttggctactagtaccctggctaccgtgggctgcagtacctgctggagaagggagactacaaggacagcagcgactttggggcccgtcaccctcagggacatggatgaagctggaaaccatcattctcagcaaactaacacagaagcagaaaaccaaacaccacatgttctcactcataagtgggagttgaacagtgagaacacatggacacaaggaggggaacatcacacaccgaggcctgtcagggagtgggggacaagagggagagagagcattgggacaaataccaaatgcatgcacggcttaaaacctagatgacaggttgatgggtgcagcaaaccaccatggcacatgtatacctgtgtaacaaacctgcacgttctgcacatgtatcccagaacttataataaaaaagaaaccagtaagtgctcaataaatgttactaacatctatttcttcattcattcttcaaccattacccactgagtgcctatttggatacttggcttagtacctgggtgatga

SEQ ID NO: 12327 - DNA, 2685 bp, Homo sapiens
  SIMILAR (976)..(2217): 851254mologous to Homo sapiens ORF2 contains a reverse transcriptase domain.; ORF2,accession number M80341,Smith-Waterman Score=1935.
atgaacatcgatgcaaaaatcctcaataaaatactggcaaaccgaatccagcagcacatcaaaaagcttatccaccatgatcaagtgggcttcatccctgggatgcaaggctggttcaacatacgaaaatcaataaacatagtccagcatataaacagaaccaatgacaaaaaccacatgattatctcaatagatgcagaaaaggcctttgacaaaattcaacaacgcttcatgctaaaaactctcaataaattaggtattgatgggacgtatctcaaaataataagagctatctatgacaaatccacagccaatattgtactgaatgggcaaaaactggaagcattccctttgaaaactggcacaagacagggatgccctctctcaccacttctattcaacatagtgttggaagttctggccagggcaatcaggcaggagaaggaaataaagggtattcaattacgaaaagaggaaatcaaattgtccctgtttgcagatgacatgattgtacatctagaaaaccccattgtctcagcccaaaatctccttaagctgatagacaatttcagcaaagtctcaggatacaaaatcaatgtgcaaaaatcacaagcattcttatacaccaataacagacaaacagagagccaaatcatgagtgaactcccattcacaattgcttcagagagaataaaatacctaggaatacaacttacaagggacgtgaaggacctcttcaaggagaactacaaaccactgctcaatgacataaaagaggatacaaacaaatggaagaacactccacgctcatgggtaggaagaatcaatatcatgaaaatggccatactgcccaaggtaatttatagattcaatgccatccccatcaagctaccaatgactttcttcacagaattggaaaaaactactttaaagttcatatggaaccaaaaaggagcccgcattgccaagtcaatcctaatttatagattcaatgcccaagaattggaaaaaactactttaaagttcatatggaaccaaaaaggagcccgcattgccaagtcaatcctaagccaaaagaacaaagctggaggcatcacgctacctgacttcaaactatactacaaggctacagtaatcaaaacagcatggtactggtaccaaaacagagatatagaccaatggaacagaacagagccctcagaaataatgccacatatctacaaccatctgatctttgacaaacctgacaaaaacaagaaatggggaaatgattccctatttaataaatggtgctgggaaaactggctagccatatgtagaaagctgaaactggatcccttccttataccttatacaaaaattaattcaagatggattaaagacttaaatgttagacctaaaaccataaaaaccctagaagaaaacctaggcaataccattcaggacatagccatgggcaaggactttatgtctaaaacaccaaaagcaatggcaacaaaagccaaaattgacaaatgggatctaattaatctaaagagcttctgcacagcaaaagaaaccaccatcagagtgaacaggcaacctatagaatgggagaaaatttttgcaatctactcatctgacaaagggcgaatatccagaatctacaatgaactcaaacaaatttacaagaaaaaaacaaacaaccccatcaaaaagtgggcaaaggatatgaacagacacttctcaaaagaagacatttatgcagccaaaagacacatgaaaaaatgctcatcatcactggccattagagaaatgcatatcaaaaccacaatgagacaccatctcacatcagttagaatggcgatcattaaaaagttaggaaacgactggtgctggaggggatgtggagaaataggaagacttttacactgttggtgggactgtaaactagttcaaccattgtggaagtcagtgtggcgattcctcagggatctagaactagaaacaccatttgacccagccagcccattactgggtatataccaaaaggaattataaatcatgctactataaggacatatgcaccaagtatgtgtacctgcggcactattcacaatagcaaacacttggaaccaacccaaatgtacatcaatgatagactgggttaagaaaatgtggcatatatacaccatggaatactatgcagccataaaaacagatgagttcatgtcctttggcagggacatggatgaagctggaaaccatcattctgagaaaactatcacaaggacagaaaaccaaacaccgcatgtactcactcataggtgggaatttaacaatgagaacatttggacacagtgcagggagccatcacacaccagggcctatcatgaggtgtggggctgggggagggatagcattaggagaaatacctaatgtaaatgacgagttaatgggcacagcaaaccaacatggcacatgtatacctatgcaacaaaactgcacattgtgcacatgtaccctaaaacttaaagtatagtaataaaaaaaaattcaccaaacaccacaaaaaaaatcaagattgtcaaagaaaatttccacgtcccccgaaatcaaataaatagttagacaagcaggagttaaccagatatggcccattgcaagcgcccagacgcggggataagcgctgtccgtagatctact

SEQ ID NO: 12328 - DNA, 5654 bp, Homo sapiens
  SIMILAR (1580)..(4045): 931254mologous to Homo sapiens putative p150,accession number U93572,Smith-Waterman Score=4009.
  misc_feature (1)...(5654): n = a,t,c or g
ggcaatcaggcaggagaaggaaataaagggcattcaattaggaaaagaggaagtcaagttgtccctgtttgcagatgacatgattgtatatctagaaaacgccatcatctcagcccaaaatctccttaagctgataagcaacttcagcaaagtctcaggatacaaaatcaatgtgcaaaaatcacaagcattcttacacaccaataacagacaaacagagagccaaatcatgagtgaactcccattcacaattgcttcaaagagaataaaatacctaggaatccaacttataagggacgtgaaggacctcttcaaggaaaactacaaaccactgctcaatgaaataaaagaggatacaaacaaatggaagaacattccatgctcatgggtaggaagaatcaatatcgtaaaaatggccatactgcccaaggtaatttatagattcaatgccatccccatcaagctaccaatgactttcttcacagaattggaaaaaacgactttcaagttcatatggaaccaaaaaagagcccgcatcgccaagtcaatcctaagccaaaagaacaaagctggaggcatcacgctacctgacttcaaactatactacaaggctacagtaaccaaaacagcatgggacatggatgaagctggaaaccatcattctcagcaaactatcacaaggacaaaaaaccaaacaccgcatgttctcactcataggtgggaattgaacaatgagaacacatggacacaggaaggggaacatcacacaccagggcctgctgctctaacattctataagtctgtgaatgtgctagaaaacctaaaagtacaagtgttactggaaagggatgccaatctggacgccaagagagggttcttggatctcgccaaagaaagaattcagggtgtcatccctacccatacatccccacccccaataaatgtctcacactccctactgtgtctcagcatctgcttcctggaggacccaactgacacagttgctatagaccatgattcaagaaagcaggatgtctccccgttcaatgttgtggcctggcacgggaattatacaccctacaagtacaacctgaagaatttcatggttatcaactcagtggcctttgaccatgcagacccatccattttcacagtattgactgctaagtctgtccgccctggagtggccattgctgattttgtcatcttcccacctcgatggggggttgctgataagaccttcaggcctccttattaccataggaactgcatgagtgagttcatgggactcatccgaggtcactatgaggcaaagcaaggtgggttcctgccagggggagggagtctacacagcacaatgaccccccatggacctgatgctgactgctttgagaaggccagcaaggtcaagctggcacctgagaggattgccgatggcaccatgagtcctgaaaagacaggctcaaatcccagttctgcgatgacttgtcgccttaagcaagtcgtttcccagctctcagccttaattcctcctctgcaaaatgggaagtatgactttcctcacaaggacatagccacaatcaacaaaattgatagactactagcaagactaataaagaagaaaagagagaagaatcaaatagatgcaataaaaaatgataaaggggatatcaccaccgatcccacagaaatacaaactaccatcagagaatactacaaacacctctacacaaataaactagaaaatctagaagaaatggataaattcctcaacacatacaccctcccaagactaaaccaggaagaagttgaatctctgaatagaccaataacaggctctgaaattgtggcaataatcaatagcttaccgacgaaaaagagtccaggaccagatggattcacagccgaattctaccagaggtacaaggaggaactggtaccattccttctgaaactattccaatcaatagaaaaagaaggaatcctccctaactcattttatgaagccagcatcatcctgataccaaagccaggcagagacacaaccaaaaaagaaaattttagaccaatatccttgaggaacattgatgcaaaaatcctcagtaaaatactggcaaaccgaatccagcagcacatcaaaaagcttatccaccatgatcaagtgggcttcatccctgggatggaaggctggttcaatatacgcaaatcaataaatgtaatccagcatataaacagaaccaaagacaaaaaccacatgattatctcaatagattcagaaaaaacctttgacaaaattcaacaacccttcatgctaaaaactctcaataaattaggtattgatgggacatatctcaaaataataagagctatctatgacaaacccacagccaatatcatactgaatgggcaaaaactggaagcattccctttgaaaactggcacaagacagggatgccctctctcaccactcctattcaacatagtgttggaagttctggccagggcattcaggcaggaggaggaaataaagggtattcaactgggaaaagaggaagtcaaattatccctgtttgcagatgacatgattgtatatctagaaaaccccatcgtctcagcccaaaatctccttaagctgataagcaacttcagcaaagtctcaggatacaaaatcaatgtacaaaaatcacaagcattcttatacaccaataacacagacaaacaagagagccaaatcatgagtgaactcccattcacaactgcttcaaagagaataaaatacctaggaatccaacttacaagggatgtgaaggacctcttcaaggagaactacaaaccactgctcaatgaaataaaagaggatacaaacaaatggaagaacgttccatgttcatgggtaggaagaatcagtatcgtgaaaatggccatactgcccaaggtaatttatagattcaatgccatccccatcaagctaccaatgactttcttcacagaattggaaaaaactactttaaagttcatatggaaccaaaaaagagcccacatcaccaagtcaatcctaagccaaaagaacaaagctggaggcatcacgctacctgacttcaaactatactacaaggctacagtaaccaaaacagcatggtactggtaccaaaacagatatatagaccaatggaacagaatagagccctcagaaataatgccgcatatctacaactatctgatctttgacaaacctgacaaaaacaagaaatggggaaaggattccctatttaataaatggtgctgggaaaactggctagccatatgtagaaagctgaaactggatcccttccttacaccttatacaaaaattaattcaagatggattaaagacttaaatgttagacctaaaaccataaaaaccctagaagaaaacctaggcaataccattcaggacacaggcatgggcaaggacttcatgtctaaaacaccaaaagcaatagcaacaaaagccaaaattgacaaatgggatctaattaaactaaagagcttctgttctttgctggggtatctgaagactgaaaacacagcaaaagaaactaccatcagactgaacaggcaacctacagaatgggagaaaatttttgcaatctactcatctgacaaagggctaatatccagaatctacaaagaactcaaacaaatttacaagaaaaaaacaaacaaccccatcaaaaagtgggcaaaggatatgaacagacacttctccaaagaagacatttatgcagccaaaaaacacatgaaaaaatgctcatcatcactggccatcagagaaatgcaaatcaaaaccacaatgagatactatctcacaccagttagaatggcgatcattaaaaagtcaagaaacaacagatgccggaggggatgtggagaaataggaacacttttacactgttggtgggactgtaaactagttcaaccattgtggaagacagtgtggcgattcctcaaggatctagaactagaaaaaccatttgacccagccatcccaatactgggtatatactgggtgtatacccaaaggattataaatcatgctgctataaagatacatgcacacatatgtttattgcagcactattcacacaatagcaaagacttggagccaacccaaatgtcccatccaatggatagacctggattaagaaaatgtggccccttatacacccatggaatacctatgcaagccataaaaaaatgatgagtttatgtcctctgtcgggacgtggatgaagctggaaaccatcattctcagcaaactatcgcaaggacaaaaaaaccaaacaccgcatgcttctcactcataggtgggaattgaacaatgagaacacttggacacaggacacaaggcggggaacatcacacaccgggacctataggaagnagatcccctactttacttatgcatgtgcactacatcaaagttatatcctggagagaactcttgttgatttggctccgagctgccaatgcatctatcaaccccggagttgagcagtcaccctccggggatccaaagacagtcacgggcttccctttcctgcggctggaggccgcagactgggtggaagaggcatctgtccccaagggcgtgcacattgccctctccagccaagagcagcgtgctggggaccctcgtgatttggaagcaccttctaacttagttatttctgagcgaacccatcgttcttttagagtgagctggacaccaccttctgacagtgtggatcgatataaggtggaatactatccagtttctggagggaaacgtcaagaagtcgtgcgaacacctggggtcccggatctccgcttgcctgccatcatcccccaggctgcttggctgctggctcatctgcccgcaccgtccgccccgccgactgagctccccacaaagcacacagaggcgcagagccagcgctgttggagtcttttattgtgttctgtcaccgaggtcgcagccccgagccaggtagtaaaagaagctccaccttctttccacacgggaacagaaaacggataccaaggcgaagaatctttatttaacaaagcgtactacggcggcggcacgaacttcttccgtaaagaaagccagaagcttcagcagagcgctaaaaaacgcgatgctgagttagcgaacggcgccctcggtatcatagagttaaataatgattacacattgaaaaaagtaatgaagccgctgatcacttcaaacacggtaactgatgaaatcgagcgcgcgaatgttttcaaaatgaacggcaaatggtacttgttcactgattcacgcggttcaaaaatgacgatcgatggtattaactcaaacgatatttacatgcttggttatgtatcaaactctttaaccggcccttacaagccgctgaacaaaacagggcttgtgctgcaaatgggtcttgatccaaacgatgtgacattcacttactctcacttcgcagtgccgcaagccaaaggcaacaatggtggttatcacaagctacatgacaaacagaggcttcttcgaggataaaaaggcaacatttgcgccaagcttcttaatgaacatcaaaggcaataaaacatccgttgtcaaaaacagcatctggagcaaggacagctga

SEQ ID NO: 12329 - DNA, 505 bp, Homo sapiens
  SIMILAR (132)..(341): 361254mologous to Homo sapiens Human secreted protein, SEQ ID NO: 8030,accession number G03949,Smith-Waterman Score=87.
atttcaggtgcaattaaaaactagcatttctagtcagtatgtaattcggatgcagccgactaatacgatgcctttctacactggagtgacgacagctgctgctctttccatcttggagacaaataatgtacatacaagagcatatttccagtacagggaaagaagtccattcagtaagagaaaatcagaccaaaacaaagagaagcataccgccaagaaacagaactgccatgagaaccagatccagcaaagcctgaagcctctcctactcactctgaacctcaccggccacaccagctcatgtgtccatcagcctgtattccataaggcaacaccagctcatgcgtccatcagcgtgtattacctcacggcaaaccagcgtcatggatccatcagcttgtattccctcaggcacaacagcttcatggtcgatcagctagtattcctcaggcacaacacgctcatggtccatcagcttgttatcctacggcacaccagctcatag

SEQ ID NO: 12330 - DNA, 693 bp, Homo sapiens
  SIMILAR (1)..(99): 601254mologous to Homo sapiens Peptide sequence derived from a human secreted protein,accession number Y40039,Smith-Waterman Score=101.
  misc_feature (1)...(693): n = a,t,c or g
atgtcctttgcagcaacatggatgcagctggacgccattatcctatgtgaattaatgcaggaacagaaaaccaaaccacatgttctcatatcaatgatcgatatcgatcgacggataccacgaggacaatctaaatgtaaattcttcccatataacgaaagaatagctcttgggatattaaataagtgtaccggaaatgtggtcaatcagccggtgcaattaaaaactagcatttctagtcagtatgtaattcggatgcagccgactaatagatgcctttctacactggagtgtgcagctgttgctctttccatcttggagaaaaataattacatacaagaggttttcacacgcaattatggtgtacagaagcctagtgcacacttcaaaagagctagaagaggaggactgaagggttccagcaaaaagaaaagacagatattgaaagtgacagatatcccaagttcacaganaagaccgacggccacaaatatagaaggacacacagagacggccaaaaaacacggccgcaaggtgcacaaatcttgggggaaagaccccgtgaaaactcgccggacaccccgggctaagagggctcggcgtgcattccaccttctgaaaagcggtgaacagacgggagaaggaaaaccggcgcgtcttaaaggggtcccacagagtcaggggaagaaatga

SEQ ID NO: 12331 - DNA, 480 bp, Homo sapiens
  SIMILAR (4)..(246): 981254mologous to Homo sapiens tripartite motif protein TRIM2,accession number AF220018,Smith-Waterman Score=429.
atgacaaaaattggatcaggaaagctgatgggacccaaaggagtttctgtggaccgcaatgggcacattattgttgtggacaacaaggcgtgctgcgtgtttatcttccagccaaacgggaaaatagtcaccaggtttggtagccgaggaaatggggacaggcagtttgcaggtccccattttgcagctgtaaatagcaataatgagattattattacagatttccataatcattctgtcaagttgtctgagggaagtcaaaagcatgcaagcctacagaaaagcattgagaaagctaaaattggccgatgtgaaacgatatcagaagagtttagtggttcagaaacgttcctaagaaagatgaagtcttgtgctcatcctgatcttaccagccaggacttttcagagctacctagcccctatctgctaattattcttgatgatggtggtgatcctgctgctggtaaagaagaaaaatag

SEQ ID NO: 12332 - DNA, 660 bp, Homo sapiens
  SIMILAR (124)..(270): 451254mologous to Homo sapiens Human secreted protein, SEQ ID NO: 7284,accession number G03203,Smith-Waterman Score=102.
atgcatgttgttgctcctgaagaccttcctgtgggacagattgtggaggtggaaacagtgatattggtgatcctgaacctgtgtaggcctacgctaattgctaggaatccaggtgtgagctattgcacctggctgaaagacaatattattaaggaaatactccccaaattgatctacagattcaatgctaaacctatcaaaatttcagctgcttttttgcagaaattgttgtctgagggaagtcaaaagcatgcaagcctacagaaaagcattgagaaagctaaaattggccgatgtgaaacggaagagcgaaccaggctagcaaaagagctttcttcacttcgagaccaaagggaacagctaaaggcagaagtagaaaaatacaaagactgtgatccgcaagttgtggaagaaataccaaggctggtcactctgaaaaaacaagctgagattcaagtgaatgcatccatccttgacaatggcatgttgtctgtggcaaatgagatgaagaagcaaaatgtcaaggattctgcttctcatgtatcctaagtttcattccgttaagggaaaaagtctttctgtgaaagcaaatctcataacctagttaagagacttataaaattttgctaattctacagggtaagtgaaaaaaatcattat

SEQ ID NO: 12333 - DNA, 432 bp, Homo sapiens
  SIMILAR (134)..(415): 731254mologous to Homo sapiens b55C20.2 (Spinal Muscular Atrophy SMA3 LIKE protein),accession number AL021368,Smith-Waterman Score=353.
gtactgccccgttccggttggggttaccgggccgacgatttcgtccagccatggagcgctctgggcccatcgaagttacaggctcagacgcatcgggaccggacccgcagcttgcggtcaccatgggcttcacggggttcggggttcggtaaaaaagctcacacatttgacttggaagcaatgtttgaacaaactcaaagaacagctgtggaaagaagtcacaaaacactgggatggtgattgctcacaccaaagccttggacccctcccagcctgtgacctttgtgaccaacgtcacctatgcagcagacaagggggctctgtatgtggatgtgatccgtgtgaacagctactactcttggtatcgcaactacgggcacctggagttgattcagctgcagctggccacccagtttgagaattggtgtaaga

SEQ ID NO: 12334 - DNA, 2018 bp, Homo sapiens
  SIMILAR (320)..(622): 931254mologous to Homo sapiens SMA5,accession number X83301,Smith-Waterman Score=509.
gcaaagccagctgggctcctgagtccggtgggtacttggagaacttactacgtctagctggaggattgtaaatgcaccaatcagcatgctgtgtctagctcaagattttctccatccccttattttgggccagtggctgtcattacatatgagatgagtctcttgaagactacagatgaactcaagctccatgaggagatgtttcattgtcgagagcagtcatgatggcctgcactccacacaatgcaacagagtgaaagagcaggttctgcttctttggtgtagtcctgaagcttcctaagaaacttcacatcaggtgatggataggagcaaccctgtaaaaccagccttagactatttttcaaacaggctggtgaattaccagatctccgtcaagtgcagtaaccagttcaagttggaagtgtgtcttttgaatgcagagaacaaagtcgtggacaaccaggctgggacccagggccagctgaaggtgctgggtgccaacctctggtggccgtacctgatgcacgaacaccccgcctacctgtactcctgggaggatggtgattgcttcacaccaaaagccttggaccccctcccagcctgtgacctttgtgaccaactcccacctacgcagcagacaagggggctctgtatgtggatgtgatccgtgtgaacagctactactcttgggtatcgcaactacaggcacctgcaattgattcagctgcagctggccgcccagtttgagaattggtgtaagacatcacaatcccattattcagagcgcgtatggagtggaaacgcttgtagggcttcaccaaggctggtgaattaccatatctccgtcaagtgcagtaaccatgttcaagttggaaggtgtgtcttttgaatgcagaaaacaaagtccgtggacaaccaggctgggacccagggccagctgaaggtgctgggtgccaacctctggtggccgtacctgatgcacgaacaccccgcctacctgtactcgtgggaggatggtgattgctcacaccaaaagccttggacccctcccagcctgtgacctttgtgaccaagtcccacctaccaggcagacaaggggcctctgtatggggaattgaaccgtgtgaacagctaccacccttggtatcgcaactacgggcacctgggagttgattcggctgcaggccctgcagctggccgcccagtttgtgaattggtgtaagacatcacaatcccattattcagagcgcgtatggagtggaaacgctttgtagggttttcaccaggtaagcggtgttgaactttctgcttgtgtattctctctgggcagagatgccacttgcctcccccaccatgccatctctgaagaatattacagaccattttggagcatggtgaataagaaattttcaccttaggagttcagttgaatagtcatttttatatttgtgactgcaagtcactcttaggggctgtacttccttagtactggtagcattattatccaatggacttttatagctttcattaggttttcttttgtttttgttctttaaagaacgttttacttatcttagtatttcatttttcatctatattatgaggcagtaagagtcttctgtttttccaaagttgagactgctttatatttatttcgtattgtctacagctgtagtgttcaatacattagccactagccacatgtggttatttaaataagataaaataaaaattggccgggcgtggtgggtcacgccggtaatcccagcactttgggaggccgaggcgggcagatcattaggtcaggagatcgagaccatccttactaagacggtgaacccccatctctattaaaaatacaaaaaattagccgggcgtggtggcgggcgcctgcagtcccagctactcaggaggctgaggcaggagaatggcgtgaacctgggaggcagagtttgcagtgagccgagatggcgccactgcactccagcctggggacagagcgagactccatctcaaaa

SEQ ID NO: 12335 - DNA, 776 bp, Homo sapiens
  SIMILAR (147)..(404): 981254mologous to Homo sapiens dJ447F3.3 (novel protein),accession number AL050348,Smith-Waterman Score=436.
ggtcgacggaagcgcgacctggagctgcggggttaccatgggaaccgaaccgccgcgcctcgcccaggacagttacacttagaggccttcaaaagagggagaatgccctcccgataagaacccatgcaaagagctgtgccagggcgatgaattgtgtccggctgaacagaagtgctgcaccacaggctgtggtcggatctgccgagacattcctaaggagtttggtggtgaatgtcccgctgacccccttccgtgtgaggagctgtgtgatggggatgcatcctgtccccaggggcataaatgctgcagaaccggctgtggccgcacctgcctcggagacattgagggagggcggggcggtgattgtccaaaagttctggtgggcctgtgcattgttggctgtgtgatggatgagaattgtcaagctggagaaaaatgttgcaagtcaggctgtggccgcttctgtgtcccaccagtcctgcccccaaaactgaccatgaaccccaactggactgtgaggtctgattccgaattagagatcccggtgccctagctgtgctgatttgtctggagcttctttggtaattctggaagcttttcctggcagtcaagagagggtgacatcctggggcttgtgacatttccaggggcactcatggccctctctgctctgcttctcctcctgccgctgaccagagcatgggaaatagccctggattgggtagtgggtgtgtggtgcttctctttcccaataaaggctggtgctgacctctaaa

SEQ ID NO: 12336 - DNA, 462 bp, Homo sapiens
  SIMILAR (11)..(130): 671254mologous to Homo sapiens Protein sequence encoded by clone p199-7 (PL mutet.rsT4),accession number P93371,Smith-Waterman Score=127.
atgacggtaacagcctctgacacatgcagctcctggacacgttctcagcttgtctgtaagcgcatgcctgtaccatacaagcccgtcagggcgcgtcagcgtgtgttgccgggtgtcggggctggcttacctatgcggcatcacagcagattgttcttagagtgccccatatgcggtgtgatataccgcacaaatgcgtacaggctgcgcaactgttgggaagggcgactcggtgcagggccttttagctattacgccagctgtcgaaaggggcaccctcccccacttgcgattcagtcgggttttcaagaacggaaagaaacctttgccgaaaaagaaatcaaggagacttgcagggtttgcgtctataaaattccgacagagggcgctgttgcccgttcaatgacagggaacggtccgtgggaacggtttaccttgcaatgtctaggacttttcgaataa

SEQ ID NO: 12337 - DNA, 957 bp, Homo sapiens
  SIMILAR (1023)..(4): 801254mologous to Homo sapiens p40,accession number U93569,Smith-Waterman Score=1376.
  misc_feature (1)...(957): n = a,t,c or g
atggtgggcgccctttccccagcctcgntgntgccttgcagtttgagctcagactgctgtgctagcaatcagcgagattccgtgggcataggaccctccgagccacgtgtgggatataatatcctggtgatccgttttttaagcccgtcggaaaagcgcagcccccgccgtgggagtgacccgattttccagtgcttgggaaccctcacaactggcagggattttgccgatttcggaaccaccatcaaacaggattttcgcctgctggggcaaaccagcgtggaccgcttgctgcaactctctcagggccaggcggtgaagggcaatcagctgttgcccgtctcactggtgaaaagaaaaaccaccctggcgcccaatacgcaaaccgcctctccccgcgcgttggccgattcattaatgcagctggcacgacaggtttcccgactggaaagcgggcatgattatcgtgtcctggtgggcgagctggatgatgagcagatggctgcattatccagattgggtaccgattatcgcccaacaagtgcttatgaacgtggtcagcgttatgcaagccgattgcagaatgaatntgctggaaatatttctgcgctggctgatgcggaaaatatttcacgtaagattattacccgctgtatcaacaccgccaaattgcctaaatcagttgttgctcttttttctcaccccggtgaactatctgcccggtcaggtgatgcacttcaaaaagcctttacagataaagaggaattacttaagcagcaggcatctaaccttcatgagcagaaaaaagctggggtgatatttgaagctgaagaagttatcactcttttaacttctgtgcttaaaacgtcatctgcatcaagaactagtttaagctcacgacatcagtttgctcctggagcgacagtattgtataagggcgataaccatggtgcttaa

SEQ ID NO: 12338 - DNA, 1188 bp, Homo sapiens
  SIMILAR (807)..(4): 861254mologous to Homo sapiens p40,accession number U93569,Smith-Waterman Score=1172.
atggataaattcctggacacaaacactctcccaagactaaaccaggaagaagttgaatttctgaatagaccaataacaggatttgaaattgtggcaataatcaatagcttaccaaccaaaaagagtccaggaccagatggattcacagccaaattctaccagacttacaaggaggaactgggattttgccgatttcggaaccaccatcaaacaggattttcgcctgctggggcaaaccagcgtggaccgcttgctgcaactctctcagggccaggcggtgaagggcaatcagctgttgcccgtctcactggtgaaaagaaaaaccaccctggcgcccaatacgcaaaccgcctctccccgcgcgttggccgattcattaatgcagctggcacgacaggtggtatttttgaatatgtcttatctggcccaatgggagctgaggaacttgcattcagatttgctgtgaacacaattaacagaaacagaacattgctacccaatactacccttacctatgatacccagaagataaacctttatgatagttttgaagcatccaagaaagggattttgccgatttcggataccaccatcaaacaggattttcgcctgctggggcaaaccagcgtggaccgcttgctgcaactctctcagggccagacggtgaagggcaatcagctgttgcccgtctcactgtattatccggataataatcagaccgacgattcgagggggaccgtggttccagacttaaaaacggacggcgaatacgagggggacggtggtccccagactaataatcagaccgccgatacgagtgggaccatggtgttaggttacaaaacatctcagttaagagagctgataaccaaaggttcaaccactgtgggtagtcagtacgtgcatttcttcaagagaattacaaattggaaaaaaccaattcgagcccagccatacccattcaagggactaataatcagacgcacgatacgagtgggaccatggtcccagctatataatcagaccgctgatacgagtgggacggtggtcccagtctcattatcagaccgaccatacgagtgggaccgtggtcccagactaataatcagaccgactatacgagtgggaccgtggtcccagactaataatcagaccgtcgatacgagtgggaccgtggtcccagtctga

SEQ ID NO: 12339 - DNA, 1233 bp, Homo sapiens
atgtgtatggtacgcgactgcgacgtgctgaagacgtatatccaccggggctacgtgttcttgctcgaggaaggcaacgacccccagggaacagcctcaatgtatcacggatgggtaccagatcatcatattcatgcagaagacactctcctgcctttctatcatggggaaaaggacgatgtcacttatgcaataaagcccacttgctggccggggctggacattattccttcctgtctggctctgcaccgtattgaaactgagttaatgggcaaatttgatgaaggtaaactgcccaccgatccacacctgatgctccgactggccattgaaactgttgctcatgactatgatgtcatagttatcgacagcgcgcctaacctgggtatcggcacgattaatgtcgtatgtgctgctgatgtgctgattgttcccacgcctgctgagttgtatgactacacctccgcactgcagttttcgatatgcttcgtgatctgctcaagaacgagggattttgccgatttcggaaccaccatcaaacaggattttcgcctgctggggcaaaccagcgtggaccgcttgctgcaactctctcagggccaggcggtgaagggcaatcagctgttgcccgtctcactggtgaaaagaaaaaccaccctggcgcccaatacgcaaaccgcctctccccgcgcgttggccgattcattaatgcagctggcacgacaggtttcccgactggaaagcgggcaggattttgccgatttcggaaccaccatcaaacaggattttcgcctgctggggcaaaccagcgtggaccgcttgctgcaactctctcagggccaggcggtgaagggcaatcagctgttgcccgtctcactggtgaaaagaaaaaccaccctggcgcccaatacgcaaaccgcctctccccgcgcgttggccgattcattaatgcagctggcacgacaggtttcccgactggaaagcgggcaggattttgccgatttcggaaccaccatcaaacaggattttcgcctgctggggcaaaccagcgtggaccgcttgctgcaactctctcagggccaggcggtgaagggcaatcagctgttgcccgtctcactggtgaaaagaaaaaccaccctggcgcccaatacgcaaaccgcctctccccgcgcgttggccgattcattaatgcagctggcacgacaggtttcccgactggaaagcgggcagtga

SEQ ID NO: 12340 - DNA, 1308 bp, Homo sapiens
  SIMILAR (850)..(1305): 991254mologous to unidentified cloning vector 29kD protein essential for the replication of mini F plasmid,accession number AB015619,Smith-Waterman Score=807.
atgtcttggtgtcttgtgaggacaccaagagggcagcgtcttcaggctaagcagaggcgtccaaggaaaccagcccagccggtgcctttatctccaactgccagcctccagaatgtgatcttatttcattatggtgaaagttggaacctcttacgtgccgatcaacgtctcattttcgccaaaagttggcccagggcttcccggtatcaacagggacaccaggatttatttattctgcgaagtgatcttccgtcacaggtatttattcgcgataagctcatggagcggcgtaaccgtcgcacaggaaggacagagaaagcgcggatctgggaagtgacggacagaacggtcaggacctggattggggaggcggttgccgccgctgctgctgacggtgtgacgttctctgttccggtcacaccacatacgttccgccattcctatgcgatgcacatgctgtatgccggtataccgctgaaagttctgcaaagcctgatgggacataagtccatcagttcaacggaagtctacacgaaggtttttgcgctggatgtggctgcccggcaccggggattttgccgatttcggaaccaccatcaaacaggattttcgcctgctggggcaaaccagcgtggaccgcttgctgcaactctctcagggccaggcggtgaagggcaatcagctgttgcccgtctcactggtgaaaagaaaaaccaccctggcgcccaatacgcaaaccgcctctccccgcgcgttggccgattcattaatgcagctggcacgacaggcccttattcacattttggcccgcttgatgaaggttctccgaagttccgtatggcaatgaaagacgaggatgccggcgatgaaaaaggctatgaatcttttccttggtttatcaaacgtgcgcacagtccatccagagggctttacagtgtacatatcaacccatatctcattcctttctttatcgggttacagaaccggtttacgcagtttcggcttagtgaaacaaaagaaatcaccaatccgtatgccatgcgtttatacgaatccctgtgtcagtatcgtaagccggatggctcaggcatcgtctctctgaaaatcgactggatcatagagcgttaccagctgcctcaaagttaccagcgtatgcctgacttccgccgccgcttcctgcaggtctgtgttaatgagatcaacagcagaactccaatgcgcctctcatacattgagaaaaagaaaggccgccagacgactcatatcgtattttccttccgcgatatcacttccatgacgacaggatag

SEQ ID NO: 12341 - DNA, 1215 bp, Homo sapiens
  SIMILAR (1)..(1809): 921254mologous to Homo sapiens putative p150,accession number U93563,Smith-Waterman Score=2816.
  misc_feature (1)...(1215): n = a,t,c or g
atgggtgtggtaccagaggagctgttcctggaggaactgaatctcagtggcttgaagtgggattttgccgatttcggaaccaccatcaaacaggattttcgcctgctggggcaaaccagcgtggaccgcttgctgcaactctctcagggccaggcggtgaagggcaatcagctgttgcccgtctcactggtgaaaagaaaaaccaccctggcgcccaatacgcaaaccgcctctccccggcgcgttggccgattcattaatgcagctggcacgacaggtttcccgactggaaagcgggcagcatcccgaatttgctcctccatcccacggggactgagagccattactattgctgtatttggtaagcaaaatacgtacatcaggctcgaaccctttaagatcaacgttcttgagcagatcacgaagcatatcgaaaaactgcagtgcggaggtgtagtcaaacaactcagcaggcgtgggaacaatcagcacatcagcagcacatacgacattaatcgtgccgatacccagatccctaaacagcagcaaancgaaaaataccaagtgcctcaattcgatcaatcaacgattaaaaatattgagtctgcaaaaggacttgatgtgtgggacagctggccgctgcaaaacgctgacggaacagtagctgaatacaacggctatcacgttgtgtttgctcttgcgggaagcccgaaagacgctgatgacacatcaatctacatgttttatcaaaaggtcggcgacaactcaatcgacagctggaaaaacgcgggccgtgtctttaaagacagcgataagttcgacgccaacgatccgatcctgaaagatcagacgcaagaatggtccggttctgcaacctttacatctgacggaaaaatccgtttattctacactgactattccgcgcaggtaaatgtgtcaaaatctgatgacacactcaaaatcaacggagtggaagatcacaaaacgatttttgacggagacggaaaaacatatcagaacgttcagcagtttatcgatgaaggcaattatacatccggcgacaaccatacgctgagagaccctcactacgttgaagacaaaggccataaataccttgtattcgaagccaacacgggaacagaaaacggataccaaggcgaagaatctttatgggggtcctttagagtcgcacaaagcagggctgtcaagtcctag

SEQ ID NO: 12342 - DNA, 1263 bp, Homo sapiens
  SIMILAR (296)..(607): 831254mologous to Homo sapiens dJ585I14.2 (novel protein (translation of cDNA Em:AK000219)),accession number AL121782,Smith- Waterman Score=422.
atgacgaaggctatcgccattgcacagtttaatgatgacagcccggaagcgaggaaaataacccggcgctggagaataggtgaagcagcggatttagttggggtttcttctcaggctatcagagatgccgagaaagcagggcgactaccgcacccggatatggaaattcgaggacgggttgagcaacgtgttggttatacaattgaacaaattaatcatatgcgtgatgtgtttggtacgcgattgcgacgtgctgaagacgtatttccaccggtgatcggggttgctgcccataaaggtggcgtttacaaaacctcagtttctgttcatcttgctcaggatctggctctgaaggggctacgtgttttgctcgtggaaggtaacgacccccagggaacagcctcaatgtatcacggatgggtaccagatcttcatattcatgcagaagacactctcctgcctttctatcttggggaaaaggacgatgtcacttatgcaataaagcccacttgctggccggggcttgacattattccttcctgtctggctctgcaccgtattgaaactgagttaatgggcaaatttgatgaaggtaaactgcccaccgatccacacctgatgctccgactggccattgaaactgttgctcatgactatgatgtcatagttattgacagcgcgcctaacctgggtatcggcacgattaatgtcgtagggggattttgccgatttcggaaccaccatcaaacaggattttcgcctgctggggcaaaccagcgtggaccgcttgctgcaactctctcagggccaggcggtgaagggcaatcagctgttgcccgtctcactggtgaaaagaaaaaccaccctggcgcccaatacgcaaaccgcctctccccgcgcgttggccgattcattaatgcagctggcacgacaggtttcccgactggaaagcgggcagtgagcgcaacgcaattaatacccagctgtgagaacctggaagcacagagaagaggaaatgaagccgaagcaggcggctctcacaagagatctggccagggccagaaccagagggtgccctgtcactgccagagtcctgatcagatgctgctctcctctcctcagggcttggaagtttctagaaagcagaggttagctcagggcccccacaattcaagtggagactcagggtcccgtattatagcaaagattcctaaagcatgtgttaactaccctaaagagagcccaaatcgttcccaaacctga

SEQ ID NO: 12343 - DNA, 1221 bp, Homo sapiens
  SIMILAR (703)..(1218): 1001254mologous to synthetic construct chloramphenicol acetyltransferase,accession number A02739,Smith-Waterman Score=957.
atggagaaaaaaatcactggatataccaccgttgatatatcccaatggcatcgtaaagaacaatttgaggcatttcagtcagttgctcaatgtacctataaccagaccgttcagctggatattacggcctttttaaagaccgtaaagaaaaataagcacaagttttatccggcctttattcacattcttgcccgcctgatgaatgctcatccggagttccgtatggcaatgaaagacgaatgtacaacaccaagagtgaacctgaatgtaaactatggaccttggatgataatggacgtggataaagctggaaaccatcattctcagcaaactaacacaggaacagaaaaccaaacaccctatgttctcacacataaatgggagttgactaatgagaacacatggacacagggaggggatcatcacgcacaggggcctgtcaggggctgtggggcaagggattttgccgatttcggaaccaccatcaaacaggattttcgcctgctggggcaaaccagcgtggaccgcttgctgcaactctctcagggccaggcggtgaagggcaatcagctgttgcccgtctcactggtgaaaagaaaaaccaccctggcgcccaatacgcaaaccgcctctccccgcgcgttggccgattcattaatgcagctggcacgacaggtttcccgactggaaagcgggcaacccgtaaagaaaaataagcacaagttttatccggcctttattcacattcttgcccgcctgatgaatgctcatccggagttccgtatggcaatgaaagacggtgagctggtgatatgggatagtgttcacccttgttacaccgttttccatgagcaaactgaaacgttttcatcgctctggagtgaataccacgacgatttccggcagtttctacacatatattcgcaagatgtggcgtgttacggtgaaaacctggcctatttccctaaagggtttattgagaatatgtttttcgtctcagccaatccctgggtgagtttcaccagttttgatttaaacgtggccaatatggacaacttcttcgcccccgttttcaccatgggcaaatattatacgcaaggcgacaaggtgctgatgccgctggcgattcaggttcatcatgccgtttgtgatggcttccatgtcggcagaatgcttaatgaattacaacagtactgcgatgagtggcagggcggggcgtaa

SEQ ID NO: 12344 - DNA, 1107 bp, Homo sapiens
  SIMILAR (3)..(938): 1001254mologous to Homo sapiens dJ522J7.2 (bromodomain- containing 1 (similar to peregrin, BR140)),accession number Z98885,Smith-Waterman Score=1588.
aaggggccatctgctgcaatggaagccgaaccattgtccgacacccaggcattaaagagtttcgcggggaaggaagtggttttttatcgccctgaagaggatgccggcgatgaaaaaggctatgaatcttttccttggtttatcaaacgtgcgcacagtccatccagagggctttacagtgtacatatcaacccatatctcattcccttctttatcgggttacagaaccggtttacgcagtttcggcttagtgaaacaaaagaaatcaccaatccgtatgccatgcgtttatacgaatccctgtgtcagtatcgtaagccggatggctcaggcatcgtctctctgaaaatcgactggatcatagagcgttaccagctgcctcaaagttacccccccacgcctgacttccgccgccgttacaaaaagaaggggccatctgctgcactggaagccgaaccattgtccgacacccagtctctagagctttttttaagtctggcatggagtctaaagattcgcatttctaacaagttccctgacgctcttgctgttgctgctggttggaaccacactttgaaaaccactgacctcgggggattcatcagtattgagtctgcaaaaggacttgatgtgtgggacagctggccgctgcaaaacgctgacggaacagtagctgaatacaacggctatcacgttgtgtttgctcttgcgggaagcccgaaagacgctgatgacacatcaatctacatgttttatcaaaaggtcggcgacaactcaatcgacagctggaaaaactcgggccgtgtctttaaagacagcgataagttcgacgccaacgatccgatcctgaaagatcagaggggggattttgccgatttcggaaccaccatcaaacaggattttcgcctgctggggcaaaccagcgtggaccgcttgctgcaactctctcagggccaggcggtgaagggcaatcagctgttgcccgtctcactggtgaaaagaaaaaccaccctggcgcccaatacgcaaaccgcctctccccgcgcgttggccgattcattaatgcagctggcacgacaggtttcccgactggaaagcgggcagtga

SEQ ID NO: 12345 - DNA, 1275 bp, Homo sapiens
  SIMILAR (1221)..(814): 991254mologous to Escherichia coli similar to Wolinella succinogenes polysulfide reductase chain PsrC,accession number U00006,Smith-Waterman Score=675.
atgtatacacatatagggggtcctttagagtcgactgacagggatgcaagtccagaagttggaaagaaaaagaggttaattgaccttacagttccacatggctgcaaggcttcagaatcatggcaggagggcctcttcaaaatttatcccctcccagaagacccagccatccccatgcccccaagacagttccaccagctggccgcccagggaccccaggagtgcttggtccgtatctacattgtccgagcatttggcctgcagcccaaggaccccaatggaaagtggctccaagtagcgaagcgagcaggactgggcggcggccaaagcggtcggacagtgctccgagaacggcacgccatagtgactggcgatgctgtcggaatggacgatatcccgcaagaggcccggcagtaccggcataaccaagcctatgcctacagcatccagggtgacggtgccgaggatgacgatgagcgcattgttagatttcatacacgggtcaccgtcgacagcgacacacttgcatcggatgcagcccggttaacgtgccggcacggcctgggtaaccagggattttgccgatttcggaaccaccatcaaacaggattttcgcctgctggggcaaaccagcgtggaccgcttgctgcaactctctcagggccaggcggtgaagggcaatcagctgttgcccgtctcactggtgaaaagaaaaaccaccctggcgcccaatacgcaaaccgcctctccccgcgcgttggccgattcattaatgcagctggcacgacaggtttcccgactggaaagcgggcacgcacgaactttaccgtcatcgcccagcgccagaccgacaaaaaacgccaccagcaggaagatttcaccccataccacagggatttccatacggtgtacaaactgcgcttccgtggaatgcgggttactgcgttggcgtatcgccatggcgatcagcgccaccgccgcaccggacgagatgccggagaagaggaacagcaccggcaggatcgggttattgaggaacggatacgatttcagcgccgacagcagaaagccggtataagcccccaacaacaccgccagcaccagcatcaatgtttccagtccgcgatgaacgggcgtcagcaggctcagaaccttttgcacgatccccagcttcggcaaccagcgttgttgcagggcaagcaaatcatgttcaaagatttcgccagccacagcaccgggggtcctctagagtcgacagcaagcgatgcaagctag

SEQ ID NO: 12346 - DNA, 582 bp, Homo sapiens
  SIMILAR (1959)..(1762): 311254mologous to Homo sapiens mucin,accession number Z34282,Smith-Waterman Score=74.
atggggggagtgacactggccttttgggctgtgtgggagtgggttgaggcctgtaactgccggctttcccttgcttccctagcaactggcatgacacagcagagggattttgccgatttcggaaccaccatcaaacaggattttcgcctgctggggcaaaccagcgtggaccgcttgctgcaactctctcagggccaggcggtgaagggcaatcagctgttgcccgtctcactggtgaaaagaaaaaccaccctggcgcccaatacgcaaaccgcctctccccgcgcgttggccgattcattaatgcagctggcacgacaggtttcccgactggaaagcgggcaggtacagcccccatggctgctttcatgggctggtgttgagtgcctgcagctttttcaggcacatggtgcaaactcacctccagccgtggctgaaaggggccaacatagagctcaggcaatggcttcagagggtgcaagccccaagtcttggcagcttccacgtagtgttgaacctgtgggtgaacagaagtcaagaatgggtttgggaacctcctcctggatttcagaagatgtatag

SEQ ID NO: 12347 - DNA, 684 bp, Homo sapiens
  SIMILAR (2)..(283): 1001254mologous to Homo sapiens HSPC102,accession number AF161365,Smith-Waterman Score=492.
atggaagccatcacaaacggcatgatgaacctgaatcgccagcggcatcagcaccttgtcgccttgcgtataatatttgcccatgctcgggatttcctgcagggctggccttctcagcaaatgaagatcctccagcggaaggcactactcctgaccaaggttcttgatcctgctgggagggattttgccgatttcggaaccaccatcaaacaggattttcgcctgctggggcaaaccagcgtggaccgcttgctgcaactctctcagggccaggcggtgaagggcaatcagctgttgcccgtctcactggtgaaaagaaaaaccaccctggcgcccaatacgcaaaccgcctctccccgcgcgttggccgattcattaatgcagctggcacgacaggtttcccgactggaaagcgggcagcataggcttggttatgccggtactgccgggctcttgcgggatatcgtccattccgacagcatcgccagtcactatggcgtgctgctagcgctatatgcgttgatgcaatttctatgcgcacccgttctcggagcactgtccgaccgctttggccgccgcccagtcctgctcgcttcgctacttggagccactatcgactacgcgatcatggcgaccacacccgtcctgtggatctacccactagtcaattcaccatcttgttga

SEQ ID NO: 12348 - DNA, 1434 bp, Homo sapiens
  SIMILAR (273)..(16): 611254mologous to Mus musculus zinc finger protein PZF,accession number U05343,Smith-Waterman Score=317.
atggtagaagatgaaaagttgaagacgcagttatctggaaaagacaactgtcgatccctggatgccacatacaataaagggggcaggcaactccaggtggtgatgtgggtgccacttctctgtgagcctgcagctggcccaggcacaccacaagcagcttccatggctggcactggggaacacagtggtgcttggaagcttggagacctcaggaatctcagggccccatgtggtgagcaaggggaatgtttcagccctgtttgtgttacagcagctcttttagccttgccattcagcagatcccaagttcttgtcctgcaaccaggaagaatgaggtgcacagacaagggggtgatgggaccatctagttgcaggaaaacaagggactcttctcagggctatcagagttctgtccataaacccctggttggggatgctgaaattcccacacggaggtcccacctggtgtggaggagtatatcggtgtcctgcttaaatatgcagtctggtcacgaagtgatccagccactgtgctgtgctgtggggaactgctcttggtccagactgccccatctcactggcactgacggcagggcaaaactggccaaccggagccgcaatgatgtcaaaaatagtgagtctgcaaaaggactttatgtttgggacagctggccgctgcaaaacgctgacgtaacagtagctgaatacaacggctatcccgttgtgtttgctcttgcgggaagtccgaaagacgctgatgacacatcaatctacatgttttatcggaaggtcggcgccaactcaatcgacagctgcaaaaacgcggtccgtgtctttagcgacagcgataagttcgacgccatcgatccgatcctgaaagatcacacgcaagaatggtccggttctgcaacctttacatctgacgcaaaaatccgtttattctacgctgactatttcggtaaacattacggcaaacaaagcctgacaacagcgcagacaaaggccataaataccttgtattcgaagaccaacacgggatcagaaaacggataccaaggcgaagaatctttatttaacaaagcgtactacggcggcggcacgaacttcttccgtaaagaaagccagaagcttcagcagagcgctaaaaaacgcgatgctgagttagcgaacggcgccctcgtctttataagggattttgccgatttcggaaccaccatcaaacaggattttcgcctgctggggcaaaccagcgtggaccgcttgctgcaactctctcagggccaggcggtgaagggcaatcagctgttgcccgtctcactggtgaaaagaaaaaccaccctggcgcccaatacgcaaaccgcctctccccgcgcgttggccgattcattaatgcagctggcacgacaggtttcccgactggaaagcgggcagtga

SEQ ID NO: 12349 - DNA, 1224 bp, Homo sapiens
  SIMILAR (647)..(868): 1001254mologous to synthetic construct lac repressor,accession number A14595,Smith-Waterman Score=354.
atgaatatggcagaatgtggacaattagaacagtatcaatcagagactaaagaaagagcaagacagtacccaagatcccctaatcctagcctaatccacaactgctctgccaccctagaggaaatactcctgcagaaaggatttgcagaatgtcttcttcctggtttggaagacatatggtttgtagatgacagtagctgcatgggaagaggccatagaagggcaggatatgtggttatcttcctacaagaagccattaaggccaagagcttctccttaggggcttcagcccaaaaggctgagataatagccttaatagctcttaatagttgcagattatgtatgatctcaggagagtgtgtggttcaggtgtatgggttcaagttgagaaggcgtggacttgtgatggttaataatgagtgtccacttgatgggattgaaagatacagagtattgatcctggaaatcaccaatccgtatgccatgcgtttatacgaatccctgtgtcagtatcgtaagccggatggctcaggcatcgtctctctgaaaatcgactggatcatagagcgttaccagctgcctcaaagttaccagcgtatgcctgacttccgccgccgcttcctgcagggattttgccgatttcggaaccaccatcaaacaggattttcgcctgctggggcaaaccagcgtggaccgcttgctgcaactctctcagggccaggcggtgaagggcaatcagctgttgcccgtctcactggtgaaaagaaaaaccaccctggcgcccaatacgcaaaccgcctctccccgcgcgttggccgattcattaatgcagctggcacgacaggtttcccgactggaaagcgggcagtgagcgcaacgcaattaatctccaaattgaccctttttacttccttactgaaaataagtatcagtcctctaaacatttttcctttaccagcaggcactgaagctttaacagatagggcactggcggcacgaacaggggctggagctgccctgcggcccccctctctctcgcacgttaccccaccctcgcaaccccccccacccagaggggggggcggccacctagagatagacaagcaggcccgcaacagcagaataggggggccagaggctgtcccaacgccacaaggccgctccacatgccacgaaagtgggagcccaagcaggggaagtgccgagagcaagcgagggctctga

SEQ ID NO: 12350 - DNA, 980 bp, Homo sapiens
  SIMILAR (474)..(190): 661254mologous to Bos taurus vacuolar system associated protein-60,accession number U49178,Smith-Waterman Score=358.
  misc_feature (1)...(980): n = a,t,c or g
atgtgtcaaatatctaatgccacactcaaaatcaccggagtggaagatcacaaaacgatttttgacggagacggaaaaacatatcagaacgttcagcagtttatcgatgaaggcaattatacatccggcgacaaccatacgntgagagaccctcactacgttgaagacaaaggccataaataccttgtattcgaagccaacacgggaacagaaaacggataccaaggcgaagaatctttatttaacaaagcgtactacggcggcggcacgaacttcttccgtaaagaaagccagaagcttcagcagagcgctaaaaaacgcgatgctgagttagcgaacggcgccctcggtatcatagagttaaataatgattacacattgaaaaaagtaatgaagccgctgatcacttcaaacacggtaactgatgaaatcgagcgcgcgaatgttttcaaaatgaacggcaaatggtacttgttcactgattcacgcggttcaaaaatgacgatcgatggtattaactcaaacgatatttacatgcttggttatgtatcaaactctttaaccggcccttacaagccgctgaacaaaacagggcttgtgctgcaaatgggtcttgatccaaacgatgtgacattcacttactctcacttcgcagtgccgcaagccaaaggcaacaatgtggttatcacaagctacatgacaaacagaggcttcttcgaggataaaaaggcaacattgggggattttgccgatttcggaaccaccatcaaacaggattttcgcctgctggggcaaaccagcgtggaccgcttgctgcaactctctcagggccaggcggtgaagggcaatcagctgttgcccgtctcactggtgaaaagaaaaaccaccctggcgcccaatacgcaaaccgcctctccccgcgcgttggccgattcattaatgcagctggcacgacaggtttcccgactggaaagcgggca

SEQ ID NO: 12351 - DNA, 702 bp, Homo sapiens
  SIMILAR (2)..(430): 951254mologous to Cloning vector pZC320 SopA,accession number U26464,Smith-Waterman Score=722.
gggctacgtgttcttgctcgaggaaggcaacgacccccagggaacagcctcaatgtatcacggatgggtaccagatcatcatattcatgcagaagacactctcctgcctttctatcatggggaaaaggacgatgtcacttatgcaataaagcccacttgctggccggggctggacattattccttcctgtctggctctgcaccgtattgaaactgagttaatgggcaaatttgatgaaggtaaactgcccaccgatccacacctgatgctccgactggccattgaaactgttgctcatgactatgatgtcatagttatcgacagcgcgcctaacctgggtatcggcacgattaatgtcgtatgtgctgctgatgtgctgattgttcccacgcctgctgagttgtatgactacacctccgcactgcagttttcgatatgcttcgtgatctgctcaagaacgagggattttgccgatttcggaaccaccatcaaacaggattttcgcctgctggggcaaaccagcgtggaccgcttgctgcaactctctcagggccaggcggtgaagggcaatcagctgttgcccgtctcactggtgaaaagaaaaaccaccctggcgcccaatacgcaaaccgcctctccccgcgcgttggccgattcattaatgcagctggcacgacaggtttcccgactggaaagcgggca

SEQ ID NO: 12352 - DNA, 1236 bp, Homo sapiens
  SIMILAR (783)..(676): 1001254mologous to Homo sapiens tetraspanin TM4-B,accession number AF133424,Smith-Waterman Score=197.
atgctgcagatccctaaacagcagcaaaacgaaaaataccaagtgcctcaattcgatcaatcaacgattaaaaatattgagtctgcaaaaggacttgatgtgtgggacagctggccgctgcaaaacgctgacggaacagtagctgaatacaacggctatcacgttgtgtttgctcttgcgggaagcccgaaagacgctgatgacacatcaatctacatgttttatcaaaaggtcggcgacaactcaatcgacagctggaaaaacgcgggccgtgtctttaaagacagcgataagttcgacgccaacgatccgatcctgaaagatcagacgcaagaatggtccggttctgcaacctttacatctgacggaaaaatccgtttattctacactgactattccggtaaacattacggcaaacaaagcctgacaacagcgcagatccactttccactcatttccatcctgtcttacgccacttggggcttgtcccttctagaatgcatccctggctcccctgtgtgcacacttctagttaggtttagcaatgtgggcacccgatggagcctggaagtgagaggaagggattttgccgatttcggaaccaccatcaaacaggattttcgcctgctggggcaaaccagcgtggaccgcttgctgcaactctctcagggccaggcggtgaagggcaatcagctgttgcccgtctcactggtgaaaagaaaaaccaccctggcgcccaatacgcaaaccgcctctccccgcgcgttggccgattcattaatgcagctggcacgacaggtttcccgactggaaagcgggcattgtcttgaacagcctgactcctgccagccctacggaagttccttttatgcattggaggaaaaacatgttggcttttctcttgacgtgggagggaaaaccttcctcaacatcacgccagctgaggttggtgtcctggttggcaaagactggtcaagctttgtcatgaatgggctgacactggggggccagaaatatactgtggtcctggactcactgctgcaggatggggaattgaccacggatctttgtatgaagagcatcggtggagcccccaccttcaacgtcattgtcaccatgactgccaagacgctaggcctgctgatgggcaaagaaggtatttgttttcagtccatcttcacctcccaccacagtgaatttactgtccgtgaaagggactgggtagctctcccctga

SEQ ID NO: 12353 - DNA, 586 bp, Homo sapiens
  SIMILAR (422)..(580): 841254mologous to synthetic construct lac repressor,accession number AJ223813,Smith-Waterman Score=212.
caaaaataatctgagcatttgttctctgctgcaaaggcattattttctgaagagctggaagaccattttcttttttctacatcctcttacctgtagtactttcccttttataactattcagaaaagataactccctaacaaagaaactttgacaatggcttatttcacccttagatgtgtcttctaacaaatgacacatgacagcaagggacagattcaggaagccttggtacagtacacgctgctgggaatgactattttctatgcattgtactcacagcatgggggcagtgaggaattggtgaaggtcccacctaataaaacaaatccagaagagtatagcacctaccccaaactggaaatactaagtaaatcaaatttcatctttaagtcttatgattataagggatttggccatttcgcaaccaccatcttccaggattttcgcatgctggggcaaaccagcgtggtcagcttggtgcaactctctcaggagcagacggtgaagggcaatcagctgttgcccgtgtcactggtgaaaagaaaaaccaccctggcgcccaatacgcaaaccgcctctatctga

SEQ ID NO: 12354 - DNA, 1197 bp, Homo sapiens
  SIMILAR (280)..(822): 931254mologous to Escherichia coli glycerol-3-phosphate dehydrogenase subunit B,accession number M20938,Smith-Waterman Score=883.
acaaaggccataaataccttgtattcgaagaccaacacgggatcagaaaacggataccaaggcgaagaatctttatttaacaaagcgtactacggcggcggcacgaacttcttccgtaaagaaagccagaagcttcagcagagcgctaaaaaacgcgatgctgagttagcgaacggcgccctcgtctttataagggattttgccgatttcggaaccaccatcaaacaggattttcgcctgctggggcaaaccagcgtggaccgcttgctgcaactctctcagggccaggcggtgaagggcaatcagctgttgcccgtctcactggtggaaggagccctgtggacagctgtgaggtctccccagcccctgagaggtggggttggctacggggaagtggtgctgcctgtcccgtgcttgggcacacgtgggctgcagccagatcatttagagaaggaaggtggaggctgcttggaggagggcacatgggcaggcaggggctggagagccccaggagggagctggggcagtgcccaggtaagaggcctgagcagatatgctgtggctgtgacctggacccataacaggaacccaaaatgcagggattttgccgatttcggaaccaccatcaaacaggattttcgcctgctggggcaaaccagcgtggaccgcttgctgcaactctctcagggccaggcggtgaagggcaatcagctgttgcccgtctcactggtgaaaagaaaaaccaccctggcgcccaatacgcaaaccgcctctccccgcgcgttggccgattcattaatgcagctggcacgacaggtttcccgactggaaacgcgggcagtgagcgcaacgcaattaattcaggcaccgtgtatgaaatctaacaatgcgctcatcgtcatcctcggcaccgtcaccctggatgctgtaggcataggcttggttatgccggtactgccgggcctcttgcgggatatcgtccattccgacagcatcgccagtcactatggcgtgctgctagcgctatatgcgttgatgcaatttctatgcgcacccgttctcggagcactgtccgaccgctttggccgccgcccagtcctgctcgcttcgctacttggagccactatcgactacgcgatcatggcgaccacacccgtcctgtggatctacccactagtcaattcaccatcttgttga

SEQ ID NO: 12355 - DNA, 1855 bp, Homo sapiens
  SIMILAR (75)..(1040): 681254mologous to Homo sapiens nuclear distribution protein C homolog,accession number AF130736,Smith-Waterman Score=977.
atggctgggtactcctctgagacaaaacttccacaggaacggtcaggcagcaacatttacagttcaccaatatccgctgttctgcagcctctgctgctgatacccaggcaaacagggtctggagtggacctccagcaaactccagcagacctgcagctgagggtcctgactgttagaaggaaaactaacaaacagaaaggacatcccacaccaaaaccccatctgtacatcaccatcatcaaagaccaaagggattttgccgatttcggaaccaccatcaaacaggattttcgcctgctggggcaaaccagcgtggaccgcttgctgcaactctctcagggccaggcggtgaagggcaatcagctgttgcccgtctcactggtgaaaagaaaaaccaccctggcgcccaatacgcaaaccgcctctccccgcgcgttggccgattcattaatgcagctggcacgacaggtttcccgactggaaagcgggcaaataaaccatactcccaacagttttcacattggggcaggggggtcttggtgcttatcagagtctccatgtgtggtgcttaattataaataccccctagtatgtggttatactgatggaaatgccgaagtttccaagtttggaaatttcttcttagatttgtctaggacaagatgcctggctgaaggcaattatacatccggcgacaaccatacgctgagagaccctcactacgttgaagacaaaggccataaataccttgtattcgaagccaacacgggaacagaaaacggataccaaggcgaagaatctttatttaacaaagcgtactacggcggcggcacgaacttcttccgtaaagaaagccagaagcttcagcagagcgctaaaaaacgcgatgctgagttagcgaacggcgccctcggtatcatagagttaaataatgattacacattgaaaaaagtaatgaagccgctgatcacttcaaacacggtaactgatgaaatcgagcgcgcgaatgttttcaaaatgaacggcaaatggtacttgttcactgattcacgcggttcaaaaatgacgatcgatggtattaactcaaacgatatttacatgcttggttatgtatcaaactctttaaccggcccttacaagccgctgaacaaaacagggcttgtgctgcaaatgggtcttgatccaaacgatgtgacattcacttactctcacttcgcagtgccgcaagccaaaggcaacaatgtggttatcacaagctacatgacaaacagaggcttcttcgaggataaaaaggcaacatttgcgccaagcttcttaatgaacatcaaaggcaataaaacatccgttgtcaaaaacagcatccggagggagggattttgccgatttcggaaccaccatcaaacaggattttcgcctgctggggcaaaccagcgtggaccgcttgctgcaactctctcagggccaggcggtgaagggcaatcagctgttgcccgtctcactggtgaaaagaaaaaccaccctggcgcccaatacgcaaaccgcctctccccgcgcgttggccgattcattaatgcagctggcacgacaggtttcccgactggaaagcgggcaggattttgccgatttcggaaccaccatcaaacaggattttcgcctgctggggcaaaccagcgtggaccgcttgctgcaactctctcagggccaggcggtgaagggcaatcagctgttgcccgtctcactggtgaaaagaaaaaccaccctggcgcccaatacgcaaaccgcctctccccgcgcgttggccgattcattaatgcagctggcacgacaggtttcccgactggaaagcgggcagtga

SEQ ID NO: 12356 - DNA, 2239 bp, Homo sapiens
  SIMILAR (73)..(897): 541254mologous to Rattus norvegicus CCAAT binding transcription factor-B subunit (CBF-B),accession number M34238,Smith-Waterman Score=529.
atgggcaaggacttcatgtctaaaacaccaaaagcaatggcaacaaaagccaaaattgacaaatggaatctaatcaaactaaagagcttctgcaaagcaaaagaaactaccatcagggtgaacaggcgacctgcaaaatgggagaaaattttcgcaacctactcatctgacaaagggctaatatccagaatctacaatgaactcaaacaaattcacaagaaaaaaacaaacaaccccatcaaaaagtgggtgaaggatatgaacagacacttctcaaaagaagacatttatgcagccaaaaaacatatgaaaaaatgctcatcatcactgggggggtcctctagagtcgaccacaggggtaaggtggccccacaacaacgccccaccacaggaggggaacttggccttagtggtccagaaggtaaagattgttaccggaaggaacgtccctttggtaaaaaaccaacaagtttattattcccaggcccacaccaatgttttaccgaatggaaagcccacagacccaatctcagcagcggggaggggcaagtacccctcaaccccttctccttcacccttagcagcaagtcccgcttttctaggggggcaagaaccctctatcccttatctccacaccccgacctcttatctctgtgccccaatcccttatttccacacgggggtcctttagagtcgaccacagggatttcaagtcctgaggttcccagagacatccccaatttgtcggttttgaaggaggttccagaacccaagtgggcctcacagaaggccaaagcacccccagttagtgattcagaaaattatagaagtaagaccatgttgcttttaaataatagtctcaaattcaaagaaccagaggggttggggggaaaagcccatccccatccagagagaaccagcatgtccaaaggccccagggaagaaaaaatattttccggaatttcaagtaacaaggaggaagaggagtataagcaaggagaaagcagacacaggaaaagagaagagcctggcaagggattttgccgatttcggaaccaccatcaaacaggattttcgcctgctggggcaaaccagcgtggaccgcttgctgcaactctctcagggccaggcggtgaagggcaatcagctgttgcccgtctcactggtgaaaagaaaaaccaccctggcgcccaatacgcaaaccgcctctccccgcgcgttggccgattcattaatgcagctggcacgacaggtttcccgactggaaagcgggcatcaaacgacttcactgaggcggcatatagtctctcccggggatcaaaaacgtatgctgtatctgttcgttgaccagatcagaaaatctgatggcaccctacaggaacatgacggtatctgcgagatccatgttgctaaatatgctgaaatattcggattgacctctgcggaagccagtaaggatatacggcaggcattgaagagtttcgcggggaaggaagtggttttttatcgccctgaagaggatgccggcgatgaaaaaggctatgaatcttttccttggtttatcaaacgttgggcggcgttgcttggtcgggtttcaacccccctgggttacaggaagaacctctctatccagggcctccgctggtggctacagtggctgggcatcaacttcgccctcttcctggggctatttttcctgaccacaccctccatcatcctgtccaccatggacaagtttaatgtcaccccccccatccatgcgctgaatcagcctgtccttcatccgtgtgtagtaagagatggcgtcttcctgccacaagacacatcccattgggatgacgtggccccatgctggtatctggggcaccccgatgccaatgcctctgctcccagccggggggaaggcttccagatcgtggagcacattgttgaggaaaagccacttggggagaagggggaggtgcagagtgtggttaatggtgggaaggaactccgggattttgccgatttcggaaccaccatcaaacaggattttcgcctgctggggcaaaccagcgtggaccgcttgctgcaactctctcagggccaggcggtgaagggcaatcagctgttgcccgtctcactggtgaaaagaaaaaccaccctggcgcccaatacgcaaaccgcctctccccgcgcgttggccgattcattaatgcagctggcacgacaggtttcccgactggaaagcgggcagtga

SEQ ID NO: 12357 - DNA, 4247 bp, Homo sapiens
  SIMILAR (1285)..(2451): 991254mologous to Homo sapiens zinc finger protein from gene of uncertain exon structure; similar to Q99676 (PID:g3025333),accession number AC004908,Smith-Waterman Score=2212.
gcggggcttcctttggaggaagaagaagcggaaatgtcatgctctggacccacctggtaaagagaggttgaccgtggcagtgagtactcggggcacctggggccagctgacccttgtgcttcagacacaggtgttgggctcggtgggaagggattttgccgatttcggaaccaccatcaaacaggattttcgcctgctggggcaaaccagcgtggaccgcttgctgcaactctctcagggccaggcggtgaagggcaatcagctgttgcccgtctcactggtgaaaagaaaaaccaccctggcgcccaatacgcaaaccgcctctccccgcgcgttggccgattcattaatgcagctggcacgacaggtttcccgactggaaagcgggcaactctttggtgggaagcctaccaagcaagtgcccatcgccacagctgaaaacatgaaaaattcggtggtcatctccaatcctcatgccaccatgactcagcaaggtaacctagactccccgtcaggcagtggcgtcctgagcagtgggagcagcagtcctctctacagcaagaatgtggacctcaaccagtctccgctagcctccagccccagctcagcccactcggccccttccaacagcctcacctggggcaccaacgccagcagctcctccgcagttagcaaggatggcctgggctttcagtctgtcagcagcctccacaccagctgtgagtccatcgacatctccctcagcagtggaggggtccccagccacaattcttccactggcctcatcgcctcctccaaggacgactccttgactccctttgtcagaactaacagtgtgaagaccacactgtcagaaaggcaaaccatcggcgggactctgtacgccgggcaccacgcggtggacggtgtccacagtgagtggaaacacactgtgtctgagtcgttcccgcggtgtacatcgtgcggcacacgcacacatggttgggcgaccaacacatccagactggctccgcttgtatataagcgcgtggacttataccgcacagagcgcggcaagatgtttgttcccactactccactgagaccactttctcttttccctgagaacatcaatggcttcctccttgccaaagccaatggtcaactctctgtccttaccctacttgagttttcagcagcagctgccccgatggtggattcgttaattgcgcgcgtaggagtaatggctcgcggtaatgccattactttgcctgtatgtggtcgggatgtgaagtttactcttgaagtgctccggggtgatagtgttgagaagacctctcgggtatggtcaggtaatgaacgtgaccaggagctgcttactgaggacgcactggatgatctcatcccttcttttctactgactggtcaacagacaccggcgttcggtcgaagagtatctggtgtcatagaaattgccgatgggagtcgccgtcgtaaagctgctgcacttaccgaaagtgattatcgtgttctggttggcgagctggatgatgagcagatggctgcattatccagattgggtaacgattatcgcccaacaagtgcttatgaacgtggtcagcgttatgcaagccgattgcagaatgaatttgctggaaatatttctgcgctggctgatgcggaaaatatttcacgtaagattattacccgctgtatcaacaccgccaaattgcctaaatcagttgttgctcttttttctcaccccggtgaactatctgcccggtcaggtgatgcacttcaaaaagcctttacagataaagaggaattacttaagcagcaggcatctaaccttcatgagcagaaaaaagctggggtgatatttgaagctggggattttctagagtcgcaccgcagggattttgccgatttcggaaccaccatcaaacaggattttcgcctgctggggcaaaccagcgtggaccgcttgctgcaactctctcagggccaggcggtgaagggcaatcagctgttgcccgtctcactggtgaaaagaaaaaccaccctggcgcccaatacgcaaaccgcctctccccgcgcgttggccgattcattaatgcagctggcacgacaggtttcccgactggaaagcgggcaattcctctccgaagttacaccatcaagctgtccctctgaagtcaagccgctgctttctgatgtccagctgtggtctccaacattcagctgcttctcctctctgccaggcgggatttggggtctttataggcacagggtggggcagggattttcgcctgctggggcaaaccagtcgtggaccgcttgctgcaactctctcagggccaggcggtgaagggcaatcagctgttgcccgtctcactggtgaaaagaaaaaccaccctggcgcccaatacgcaaaccgcctctccccgcgcgttggccgattcattaatgcagctggcacgacaggtttcccgactggaaagcgggcacaatggttgctttgacggtgccctaagtcaaggacttaaaattggcataggcttggttatgccggtactgccgggccttcttgcgggatatcgtccattccgacagcatcgccagtcactatggcgtgctgctagcgctatatgcgttgatgcaatttctatgcgcacccgttctcggagcactgtccgaccgctttggccgccgcccagtcctgctcgcttcgctacttggagccacgcctggccctgagagagttgcagcaagcggtccacgctggtttgccccagcaggcgaaaatcctgtttgatggtggttccgaaatcggcaaaatcctgcccgctttccagtcgggaaacctgtcgtgccagctgcattaatgaatcggccaacgcgcggggagaggcggtttgcgtattgggcgccagggtggtttttcttttcaccagtgagacgggcaacagctgattgcccttcaccgcctggccctgagagagttgcagcaagcggtccacgctggtttgccccagcaggcgaaaatcctgtttgatggtggttccgaaatcggcaaaatccctggctttccatttgccttggggacagtgaggaggtggagcccaagaatgggagggcccttgctgccttgccgggggggaaaagctgtgtccactgggaagaggcagacctacagaaaggtcggccgtgtctaccttttcaaagaccctcatctctactgtcccatatccatccctgctgaccaaagcaaaactaggtttttcttgcttttcctgggctgagcctcttattgttcctagacacagccagccgggaggaaaaggtgctcccagattggggttgtggagctgtttatcaggttgggtcagatgaaaaacagagactggatgtaacattaattgcgttgcgctcactgcccgctttccagtcgggaaacctgtcgtgccagctgcattaatgaatcggccaacgcgcggggagaggcggtttgcgtattgggcgccagggtggtttttcttttcaccagtgagacgggcaacagctgattgcccttcaccgcctggccctgagagagttgcagcaagcggtccacgctggtttgccccagcaggcgaaaatcctgtttgatgggggttccgaaatcggcaaaatccctgcgctgttgtcaggctttgtttgccgtagtgtttaccgggatagtcagtgtagaataaacggatttttccgtcagatgtaaaggttgcagaaccggaccattcttgcgtctgatctttcaggatcggatcgttggcgtcgaacttatcgctgtctttaaagacacggcccgcgtttttccagctgtcgattgagttgtcgccgaccttttgataaaacatgtagattgatgtgtcatcagcgtctttcgggcttcccgcaagagcaaacacaacgtgatagccgttgtattcagctactgttccgtcagcgttttgcagcggccagctgtcccacacatcaagtccttttgcagactcaatatttttaatcgttgattgatcgaattgaggcacttggtatttttcgttttgctgctgtttagggatctgcagcatatcatggcgtgtaatatgagagacgccgtacgtttctttgtatgctttttggttattttctttcgcgaaggcttgagtcgctcctcctgccagaagtgcagtcgtaaaagtcagaactgtggcttgttttacaatttttttgatgttcatgttcat

SEQ ID NO: 12358 - DNA, 880 bp, Homo sapiens
  SIMILAR (59)..(181): 651254mologous to Homo sapiens Human secreted protein, SEQ ID NO: 5327,accession number G01246,Smith-Waterman Score=123.
atgtctctgaccagacacccatccaacagtattattttctcccatgaagacggtacgcgactgggcgtggagcatctggtcgcattgggtcacccagcaaatcggcgctgttagcgggcccattaagttctgtctcggcgcgtctgcgtctggctggcttggcataaatatctcactcgcaatcaaattcagccgatagcgggaacggggaaggcgactggagtgccatgtccggttttcaacaaacccctgcaaatgctgaatgagggcatcgttccccactggcgattgctggttgcccaacgatccagaatggcgctgggccgcaatgcgccgccattacccgagtccgggctgcgcgttggtgccggatatcctccgggtagtgggataccgacgataccgaagacagcttcatgttatatccccgccgttaaccaccatcaaacaggattttcgcctgctggggcaaacccagcgtggaccgcttgcttgcaactctctcagggccaggcggtgaagggcaatcagcttgttgcccgtctcacttggtgaaaagaaaaaccacccttggcgcccaatacgcaaaccgcctctccccgcgcgttggccgattcattaatgcagctggcacgacaggtttcccgactggaaagcgggcagtgagcgcaacgcaattaatgtgagttagctcactcattaggcaccccaggctttacactttatgcttccggctcagtatgttgtgtggaattgtgagcggataacaatttcacacaggaaacagctatgaccatgattacgccaagctcttaatacgactcactatagggaaagcgtggtacgcctgcaggtaccggtccggaattcccgggtcgac

SEQ ID NO: 12359 - DNA, 4267 bp, Homo sapiens
  SIMILAR (1)..(1698): 891254mologous to Homo sapiens breast cancer associated protein BRAP1,accession number AB032698,Smith-Waterman Score=2468.
tcactgcccgctttccagtcgggaaacctgtcgtgccagctgcattaatgaatcggccaacgcgcggggagaggcggtttgcgtattgggcgccagggtggtttttcttttcaccagtgagacgggcaacagctgattgcccttcaccgcctggccctgagagagttgcagcaagcggtccacgctggtttgccccagcaggcgaaaatcctgtttgatggtggttccgaaatcggcaaaatcctgcccgctttccagtcgggaaacctgtcgtgccagctgcattaatgaatcggccaacgcgcggggagaggcggtttgcgtattgggcgccagggtggtttttcttttcaccagtgagacgggcaacagctgattgcccttcaccgcctggccctgagagaattgcagcaagcggtccacgctggtttgccccagcaggcgaaaatcctgtttgatggtggttcccaaatcggccaaattcattaattgcgttgcgctcactgcccgctttccagtcgggaaacctgtcgtgccagctgcattaatgaatcggccaacgcgcggggagaggcggtttgcgtattgggcgccagggtggtttttcttttcaccagtgagacgggcaacagctgattgcccttcaccgcctggccctgagagaattgcagcaagcggtccacgctgggttgccccaacaggcgaaaatccttgttggatggtggttccgaaatcggcaaaatcctgcccgctttccagtcgggaaacctgtcgtgccagctgcattaatgaatcggccaacgcgcggggagaggcggtttgcgtattgggcgccagggtggtttttcttttctgcaggtccggtcggtagtacctgattgcccttcaccgcctggccctgcgcacatggccagcaagcggtccacgctggtttgccccagcaggcgaaaatcctgtttgatggtggttccgaaatcggcaaaatcctgcccgctttccagtcgggaaacctgtcgtgccagctgcattaatgaatcggccaacgcgcggggagaggcggtttgcgtattgggcgccagggtggtttttcttttcaccagtgagacgggcaacagctgattgcccttcaccgcctggccctgagagagttgcagcaagcggtccacgctggtttgccccagcaggcgaaaatcctgtttgatggtggttccgaaatcggcaaaatccctgtccaggttaagcaccattttatcgcccttatacaatactgtcgctccaggagcaaactgatggggtgagcttaaactagttcttgatgcagatgacgttttaagcacagaagttaaaagagtgataacttcttcagcttcaaatatcaccccagcttttttctgctcatgaaggttagatgcctgctgcttaagtaattcctctttatctgtaaaggctttttgaagtgcatcacctgaccgggcagatagttcaccggggtgagaaaaaagagcaacaactgatttaggcaatttggcggtgttgatacagcgggtaataatcttacgtgaaatattttccgcatcagccagcgcagaaatatttccagcaaattcattctgcaatcggcttgcataacgctgaccacgttcataagcacttgttgggcgataatcgttacccaatctggataatgcagccatctgctcatcatccagctcgccaaccagaacacgataatcactttcggtaagtgcagcagctttacgacggcgactcccatcggcaatttctatgacaccagatactcttcgaccgaacgccggtgtctttccagtgggtgattcatcatctggttccttcaggggaagagagggagtgactagagaggattgatgtccagcctggggcctgctttgctcaacagggacctcatgaaggcaggcttcttcctcctgacatttccagcactcctcacgggcactctggagagggatctctgaatcatcgctgtgttgcccgctttccagtcgggaaacctgtcgtgccagctgcattaatgaaatcggccaacgcgcggggagaggcggtttgcgtattgggcgccagggtggtttttcttttcaccagtgagacgggcaacagctgattgcccttcaccgcctggccctgagagagttgcagcaagcggtccacgctggtttgccccagcaggcgaaaatcctgtttgatggtggttccgaaatcggcaaaatcccagcatgtaaatatcgtttgagttaataccatcgatcgtcatttttgaaccgcgtgaatcagtgaacaagtaccatttgccgttcattttgaaaacattcgcgcgctcgatttcatcagttaccgtgtttgaagtgatcagcggcttgatgtgacttttttcaatgtgtaatcattatttaactctatgataccgagggcgccgctcgctaactcatcatcgcgttttttagcgctctgctgaagcttctggctttctttacggaagaagttcgtgccgccgccgtagtacgctttgttaaataaagattcttcgccttggtatccgttttctgttcccgtgttggcttcgaatacaaggtatttatggcctttgtcttcaacgtattgagggtctctcatcgtatgggtgtcgccggatgtataattgccttcatcgataaactgctgaacgttctgatatgtttttccgtctccggcaaaaatcggtttgtgatcttccactccgccgattttgagtgtgtcatcagattttgacacatttacccccaactgctcctgcaacctcagctctttgctggcttttctcacactctgtgcctcacccacactgaacttcttgataatccttgaagccatacctcctgtcatgttctcccacagtagctggaatacttttcctactgtttcccactgtcttgacttttcctgagactgtatctccggaagggcattgttattataaatccagcttttaacatgaattcccagcatataacaaatttgcccgctttccagtcgggaaacctgtcgtgccagctgcattaatgaatcggccaacgcgcggggagaggcggtttgcgtattgggcgccagggtggtttttcttttcaccagtgagaacggcaacagctgattgcccttcaccgcctggccctgagagagttggagcaagcggtccacgctgggtttgccccagcaggcgaaaatcctgtttgatggtggtttccgaaatcggcaaaatcctgcccgctttccagtcgggaaacctgtcgtgccagctgcattaatgaatcggccaacgcgcggggagaggcggtttgcgtattgggcgccagggtggtttttcttttcaccagtgagacgggcaacagctgattgcccttcaccgcctggccctgagagagttgcagcaagcggtccacgctggtttgccccagcaggcgaaaatcctgtttgatggtggttccgaaatcggcaaaatcccagtgcataaacgctggtcatgaaatgacgaaggctatcgccattgcacagtttaatgatgacagcccggaagcgaggaaaataacccggcgcctcttgaacataaccaagcatgtaaatatcgtttgagttaataccatcgatcgtcatttttgaaccgcgtgaatcagtgaacaagtaccatttgccgttcattttgaaaacattcgcgcgctcgatttcatcagttaccgtgtttgaagtgatcagcggcttcattacttttttcaatgtgtaatcattatttaactctatgataccgagggcgccgttcgctaactcagcatcgcgttttttagcgctctgctgaagcttctggctttctttacggaagaagttcgtgccgccgccgtagtacgctttgttaaataaagattcttcgccttggtatccgttttctgttcccgtgttggcttcgaatacaaggtatttatggcctttgtcttcaacgtagtgagggtctctcagcgtatggttgtcgccggatgtataattgccttcatcgataaactgctgaacgttctgatatgtttttccgtctccgtcaaaaatcgttttgtgatcttccactccgttgattttgagtgtgtcatcagattttgacacatttacctgcgctgttgtcaggctttgtttgccgtaatgtttaccggaatagtcagtgtagaataaacggatttttccgtcagatgtaaaggttgcagaaccggaccat

SEQ ID NO: 12360 - DNA, 963 bp, Homo sapiens
  SIMILAR (123)..(1): 801254mologous to Homo sapiens Human secreted protein, SEQ ID NO: 7217,accession number G03136,Smith-Waterman Score=154.
cctttcttatagagtggttaataggatttaattatacattgtgtgggacagtgtattaaaaatatagaaagtgaaatgaaatatgaaataagtaagacccagattctgttcacaacaagatcctgtgtagtgttagtaacaagttctgtgttgaatatcctgtggggtagggagaggggtttcttttggaggagaggtggcatgggatagaggatggaaggcaccaggtagttttgatggtttctttctggccgttttagaaggtctcagctcagggagcgacaagaccctggtcatgtttctattgtgggtgaatatcagggtcaagctacttgctgtggacagtgcaggcagctctggggcaatatagccttgaggccttggatgagtgcactggggagtcccatgcctcattatcacgttgtggtggtggtgactgctacgagacgttcttgcacactatcgaaagctgctttgcgtcgcagttggagcagcaccccccaccgcaggtggcattgaagggagcgtgaagctgcacgaggggtctcaggtcctgctcacgagctccaatgagatgggtactgttaggtatgtgggccccactgactttgcttcaggtatctggcttggacttgagctccgaagcgccaagggaaaaaatgatgggtcagtgggtgacaagcgctatttcacctgtaagccgaaccatggagtcttagttcgaccgagcagagtgacctatcggggaattaatgggtcaaaacttgtggatgagaattgttaagcttctaaaatattaaataagctcaaatatatatatttggtgtaaataaagagtccatggtacatggtgtagtatagttacccatattaaggttttgcgaagattgttttattcttaataacctggagcacaatgcacagagagttcgtcccagagccgtgaatatgtattatggtctc

SEQ ID NO: 12361 - DNA, 696 bp, Homo sapiens
  SIMILAR (6)..(251): 401254mologous to Homo sapiens Human gene 91-encoded protein fragment, SEQ ID NO:490,accession number Y86573,Smith-Waterman Score=113.
atgtcgctagtgatccctgaaaagttccagcatattttgcgagtactcaacaccaacatcgatgggcagcggaaaatagcctttgccatcactgccattaagggtgtgggccgaagatatgctcatgtggtgttgaggaaagcagacactgacctcaccaagagggcgggagaactcactgatgatgaggtggaacgtgtgatcaccgttatgcagaatccacgccagtacaagatcccagactggttcttgaacagacagaaggatgtaaaggatggaaaatatagccaggtcctagccaatggtctggacaacaagctccgtgaagacctggagcgactgaagaagattcgggcccatagagggctgcgtcacttctggggccttcgtgtccgaggccagcacaccaagaccactggccgccgtggccgcaccgtggggcctccgctggggccaggaggtgacgaacagtggccggctctccccaggcaaggaggcgatgtaggcccggagcccagagggccgcatcgggcgtgcccgaggcaggtctgggcccaacacctggccggccacgccaaggacgtcacgaccccgcccaacaaccatcgagtttttggggccagccggcgtggtggcagcctagagcggtcccgaggaatgaaaagaggccgccttcggaagcggaagtggatgtga

SEQ ID NO: 12362 - DNA, 675 bp, Homo sapiens
  SIMILAR (865)..(641): 331254mologous to Homo sapiens Human secreted protein sequence SEQ ID NO:103,accession number Y87064,Smith-Waterman Score =82.
agtattatcttttcatttcattttccagttgagtatattattggctacatttgcataccgcacaattgttcattttttaaaaaccaatattttgttttgttctgttgtctacaataaggagaattcagatgataaacttacaaccaatcatggccaagtccacttgaggaattgtctctgtagatttatctgtagactctctaataaggagttttatggccgtatgtttcgtgtttcccctgatgtgccctgttactgttcctcttgccatggtgtttcttcctgtggcaaacatttcctttaccatttttcttggcagcttgcactttcatccactgcttaacagtatggttgtgcgggctgaacacagattccttcctgcgcttgaacatgaaggatgacagcagcccaagtcacaatccccatcagctctctggatgcgacacatattcactctttcccaggagccttctggaaatatgatgtgaaacctccgtgcaacagctggaggcaatgggaagtatggctgggcgacgtccagccgcccttcccgcctctgcgcgtacgcaacctgcttggcgccactgacctggtgaggaggcttctttaaggccgtggacggttcctacccgcgcgcggagaggaccgacgtgaagacgaaatggtcgatccgga

SEQ ID NO: 12363 - DNA, 1026 bp, Homo sapiens
  SIMILAR (89)..(24): 591254mologous to Homo sapiens prion protein,accession number X82545,Smith-Waterman Score=55.
gtgactgatgagaatgggtggggccagggtatagactggcctgagcagtgggaattttctgtggtgggcagtggagatacatggggagcctttaagcagggcaagttagatctgaaaagcaaatcagccatctgtgcccagaaacagataggcggggggctgggcactgccgtccttgggcttgccctcctggacctctcgctgtccttggaggaggggaagtgcagggctgctcttggaggcatcggtacctgtgcagcaatgacccaagctgctggaccgtctgtccagacgctggccaggagaagggcatccccggccagctcgtgtgcgatcctgcatggccctaggcccaagacgcctcggagttctgtgccaggaaccgagctgaggaactcagctgaggaaaccacgggaatctcatttgaagaggaatttggcccctggagccccctccccactcactggtgggagggtgccaagacttcagtcgccgccgccacaccagcaaaccccaaaccacaggaatgcaatggggtcacctggggacagagggagatggatggacagcgagtaggcagaggagctcacagtctagtggagaaggcagacctgcagtttaacgatggctatttcatgatgtccttgctctgccgaggaggagacccgcagcagaactgcacagagaggaagaaagagcagttactcttccggaaggttggagaagattttgtgaaggtggggatgtttgatttgaaccttgaagaacaagcagagacccaagaagtacagaagaggggaggtggaaatagcatgaacgaggtggggcatgacttctttcttatgtgttctgatgaagcagctgccatgttggaggctgccccatggaacggccaacgtgctgaggaacagagggcacaggcagtgaagggcatcggggccttgaatccagtggtccacgaggaactgaatcctgccagcaaccactcgagtaagcttggtattgggtccccaattgagccttga

SEQ ID NO: 12364 - DNA, 1710 bp, Homo sapiens
  SIMILAR (97)..(183): 821254mologous to Homo sapiens Human secreted protein encoded by gene 75,accession number Y76198,Smith-Waterman Score=125.
atgaggaggaaggacgcaggcacaggagacccaatccttaaaacgtggtacggcatccctaaggaatttgaactttatcctgaaaacaatggggacccatcaaagatttttatttttcaagtaggtgaattaaaggatgagatttgtgttttggaaggagttctgtggcagcaaagaggcagcaaagcccgtgtcagaacagaggagacactcaggcttggcttcatgcacgtgtggctgcgcactcacctggatgccaggaaaatgctcctgggccagtggctaccagcaccaaagcagggctggaaacgtgtgcacctaccccacgacctcatagctttgccgcctcatcccacatcaggacctgggagtggaggaggacaagaaggaggtgaggacagtgatgccgggcagcaggccaggtgttcaaaggcacaatctggttctgatgttctctttcagcaaacacagtgcctggagcttgggaggaaagttcccaacagcgtctccccctccactgctttctttaataacaaagacttgtccctgccaagcaataactttctcgccttgtctcctacagggaaaccaatgaaaagcgtgctggtggtggctctccttgtcattttccaggtatgcctgtgtcaagatgaggtcacggacgattacatcggagacaacaccacagtggactacactttgttcgagtctttgtgctccaagaaggacgtgcggaactttaaagcctggttcctccctatcatgtactccatcatttgtttcgtgggcctactgggcaatgggctggtcgtgttgacctatatctatttcaagaggctcaagaccatgaccgatacctacctgctcaacctggcggtggcagacatcctcttcctcctgacccttcccttctgggcctacagcgcggccaagtcctgggtcttcggtgtccacttttgcaagctcatctttgccatctacaagatgagcttcttcagtggcatgctcctacttctttgcatcagcattgaccgctacgtggccatcgtccaggctgtctcagctcaccgccaccgtgcccgcgtccttctcatcagcaagctgtcctgtgtgggcatctggatactagccacagtgctctccatcccagagctcctgtacagtgacctccagaggagcagcagtgagcaagcgatgcgatgctctctcatcacagagcatgtggaggcctttatcaccatccaggtggcccagatggtgatcggctttctggtccccctgctggccatgagcttctgttaccttgtcatcatccgcaccctgctccaggcacgcaactttgagcgcaacaaggccatcaaggtgatcatcgctgtggtcgtggtcttcatagtcttccagctgccctacaatggggtggtcctggcccagacggtggccaacttcaacatcaccagtagcacctgtgagctcagtaagcaactcaacatcgcctacgacgtcacctacagcctggcctgcgtccgctgctgcgtcaaccctttcttgtacgccttcatcggcgtcaagttccgcaacgatctcttcaagctcttcaaggacctgggctgcctcagccaggagcagctccggcagtggtcttcctgtcggcacatccggcgctcctccatgagtgtggaggccgagaccaccaccaccttctccccatag

SEQ ID NO: 12365 - DNA, 900 bp, Homo sapiens
  SIMILAR (3)..(884): 901254mologous to Homo sapiens putative p150,accession number U93572,Smith-Waterman Score=1345.
atggtgtttgctgcatctatgaacctgtcacgctgccacaccctgtacctgagctcagtgagcgtggagaccctgactggagccctggccgtgcagaaagccatctcccccccctttgagagggacatcctccccacgcccaccgtggtccacttcaaagtcacagagcagggcatcactctgactgatgtccagagggagagctcccaggatctgaaagagtccaagagtgggaacggagtaatttctggaagattaaccaaaggaaaggggacggcaagccagcctgtgtcgcagcggctggtgacctggattcctgcccctcttctggaccgagtggctgtgccagacctgggagtggaggaggacaagaaggagcaaacacagtgcctggagcttgggaggaaagttcccaacagcgtctccccctccactgctttctttaataacaaagacttgtccctgccaagcaataactttctcgccttgtctcctacagggaaaccaatgaaaagcgtgctggtggtggctctccttgtcattttccagacgcctaggaattctgtgccaggaaccaagctgagaaactccgctgaggaaaccacgggaatctcatttgaagaggaatttggcccctggagccccctccccactcactggtgggagggtgccaagacttcagtcgccgccgccacaccagcaaaccccaaaccacaggaatgcaatggggtcacctggggacagagggagatggatggacagcgagtaggcagcccccatgactcccaggagccctgcagatgggctgaacctacgctggaccacaccgtggctgatgcagagggaactccccagctgcaggagaaggccagcttcacatccagccagacttcttcctga

SEQ ID NO: 12366 - DNA, 420 bp, Homo sapiens
  SIMILAR (113)..(718): 911254mologous to Homo sapiens putative p150,accession number U93563,Smith-Waterman Score=931.
gccaaccaattaatccaagcatggagtcgccatagttaacaaggccttttcccactggaacacctgcaccactgcctccaaaaaatgtaccagctaccccaccccgaacaggatcccccttaacaattggaccaggtgcatcatcccctgctcgaccagccactcctttggttccttgcagaagtaccactccacctccacctcctccccggcctccatcccggccaaagctacctccaggaaaacctggagttggagatgtgtccagaccttttagccctcccattcattcttccagccctcctccaatagcacccttagcgcgggctgaaagcacttcttcaatatcgtcaaccaattccttgagcgcagccaccactcccacagttgtgtcagaagacgatgttttttatgacaaaa

SEQ ID NO: 12367 - DNA, 645 bp, Homo sapiens
  SIMILAR (1)..(459): 961254mologous to Homo sapiens putative p150,accession number U93572,Smith-Waterman Score=762.
ttatactgtgataacagcgctttggccccctgtgtttccagccattttaatgctagtttgtttttcaggtgcatcatcccctgctcgaccagccactcctttggttccttgcagaagtaccactccacctccacctcctccccggcctccatcccggccaaagctacctccaggaaaaccgaggtttgcttccttttccagcagggcactagcatgaacgtgtttagcatgttgcactgcttctgtcttctgttcatcaaaagctgattctagtggtgggccaaagagaggagcaagggccgtagtgtcatctggaggctttttgtttgaatgattgaattcactcttttcataatctgtgatgtcacttaacagctgggttggaatcatccgtagattagcagtctctgcagataccatctttgaatggcattagctatgtagtttagcagagaaccaccaactggtcacctggggcagggtatttgcatcaaataataattgactaattggattggcacaggcctagggatatttcagagagtgttgtcttcagttccatttcctctcttaagggactgaccaggtaaatggggatcatttcaaacctaacaaagacccttctttttgttgctttaaattcat

SEQ ID NO: 12368 - DNA, 906 bp, Homo sapiens
  SIMILAR (4)..(189): 351254mologous to Mus musculus Gag polyprotein,accession number Y12713,Smith-Waterman Score=114.
atgactatgagaaatgagtttgtgaagggtatcctggcatccttggagagctctgtgattgctcttccctgtgggccagactttacagtggcacctgcagtcactgaattgggaaacttaaatgcaatgggagtaattgggtcccagggtggcaggaaccaagtgaagatactcaactaccaaaggcaagaacttgaggcccttctgtccttttccatccctgctgcctatgatctaagtttagtagtaaggataatcaagagagcacttatctctagatttgtggctcttggcttttttcctagctctagccttcgatggcccaaggtggctagaaaagttattacaccacagacagtagaatatccagcattcttatccccagacctgaatgttactgttgggactccagctgtgcaatcctccaaccagccatctgtagtgcgacttgaaaaacttcagcaacaaccccgggaaagccctccagcacccagcctccggctccgacgtccgcgcgtgacctccgggtaccggaggaccttgggacgaggaggtccctccgctttccggggaagttgtcaagggcaagttcgggttctgcgcggacagcttactcactggagtggttcggcatcctctgtcgtccgcccgcgcttcctcaggaagcccctaatgcagcggcagcctgaaagcagcagccgaagctgctgccgctgctcccactgccagcaaccgcccgggcgtggcagggacaggcgggcgacttcacaacatcatcactcggcgacctcggttctgcggcgacaccgggtcaatggcagcccccacacaattggggaagccaaaggagagccactctcccagcggcctccacggccccagcgcaagacctgctgggaattgtag

SEQ ID NO: 12369 - DNA, 1626 bp, Homo sapiens
  SIMILAR (223)..(131): 541254mologous to Leishmania major probable (hhv-6) u1102, variant a DNA, complete virion genome,accession number AL160493,Smith-Waterman Score=109.
atgcaggattccccgctaggccctgttctgacaggctggggaggaagggtggggctcccaagagttgacagagctgcagtcccagatctccgacacatctgtgggtgctgtccatggaacaacagtccgctcccctggaccctggacgggaatcatcggttgaggtccaagccgcagtatgaaggaggatggccaaatggccgcccgggctggaggctgaagcccggttaccagaacaaggtggagatccatgttctccaatcccacatctcagacacctctgtggttgtcaagctggacaacagccaggacctgaacatggactgcatcattgccgagatcaaggcacagtatgacgacattgtcacctgcagctgggccaaggctgagtcttggtaccatggctgcctgccagattgtgaggagatgaaggccacggtgatctggcacggggagaccctgcgccgcaccaaggaggagatcaacgagctgaaccgcatgatccagaggctgacagccgaggtggagaacgccaagtgccaggaacagctgggacttaaagaactggataactgtcctgacaaggcggccaaagtcagtgtgggctttcagaaggtagcctgcatgtgtgctccagggccgaaaggaggagctccaggccaggactctgagtgggcaggtgactccgagagggacagacagacaaactccaagctggaggccgcggtggcccagtctgagcagcagggtgaggcggccctcagtgatgcccgctgcaagctggccgagctggagggtgccctgcagaaggccaagcaggacatggcctgcctgatcagggagtaccaggagatgaggaaactgaggcccagccaggactccagcacaggccaggacaggcatgacgccaatgaagctgggacttttggtctggccctccagtcacccacctacagggcaggccctttcactctgtcctcctggctgcagtgcctgaaactggaggagaacatcaagacagctgaggagcagggtgagctggccttccaggatgccaagaccaagctggcccagctggaggccgccctgcagcaggccaagcaggacatggcgcggcagctgcgcaagtaccaggagctgatgaacgtcaagctggccctggacatcgagatcgccacctacaggaagctggtggagggcgaggagggcaggtggagattgggattcacgggaatggaggaattcagggtgggggctcagctgcttggcacgggcatgaaaaaggtcttcctcacttgtccggtagtgcgccaagaatgcagttggcacttactaaatgctggctacatgaacagaggcctaagtggccgggggctgcagctgcagagggatgagagagttggagatgggactggaggatgcaagaaaaagcagaggcgggtaacaagtgctgggagcggcactgagctgcccctcactgagacctccatgtacctccagctggaggagcaggccgcccgctcggccgagtatgggagcagcctccagagcagccgcagcgagatcgcggatctcaatgtgcgcatccagaagctgcggtcccagatcctctctgtcaagagccat

SEQ ID NO: 12370 - DNA, 987 bp, Homo sapiens
  SIMILAR (200)..(733): 931254mologous to Rattus norvegicus Munc13-3,accession number U75361,Smith-Waterman Score=882.
  misc_feature (1)...(987): n = a,t,c or g
ttttttggtttcggtggtggagccggcattggctttggtctgggtggtggagccggccttgctggtggctttgggggccctggcttccctgtgtgcccccctggaggcatccaagaggtcaccgtcaaccagagcctgctggccccgctgcggctggacgccgacccctccctccaggcgggtgcgccaggaggagagtcgagcagatcaagaccctcaaacaacaaatttgcctcctttcatcgaacaaggtgcggtttctggagcagcagaacaagctgctggaagacccaagtggaacgctgcctgccaggagccagaagtcggcccaagaagcagccgccctccccagacatctttgaaggcccagattgctggnccttcggggtcagctttgaggcactgccaggtggatggggggccgcctggatgcggagactggcggagcatgccaggatgttggttggaggactttcaagaataagtaccgaagattgaaatttaaccgccgcacagctgcctgaagaatgagtttgtggtgctgaaagaaaggatgtggatgctgacctacatgaagcaaggtggaagctggaggccaaggtggatgcccctgaatgatgagaacaactttcctcaggaccctcaatgagacggagttgaccagagctgcagtcccagatctccgacatcatctgtggtgcctgtccatggacaacaagtccgctcccatggaccatggacggcatcatcgcatgaggtcaaggcgcagtactgaggagattggccaaatgcaagccgggctgaggctgaagcctgggtaccagaccaagttttgagacccctccagggcccaggctggggaagatgggggacgacctccggaatacccggaaattgagattttcagagattgaaccgggccatccagaggctgcaggctgagattcgacaacatcaaggaaccagcgtgccaagttggaggccgcc

SEQ ID NO: 12371 - DNA, 1657 bp, Homo sapiens
  SIMILAR (298)..(1164): 991254mologous to Homo sapiens Tumour rejection antigen precursor DAGE,accession number R94918,Smith-Waterman Score=1477.
atgggtacagtccccaggtctgcaggacaggaaacgtgggtcctgtgtgaacacataatcgggggagagcgctcattcactgagtactcgctatgccatcggattgaatcctccactagctcgataaagctggagttagggggtaacaacgtggagcctctggagagctcaagggtttttgattcaacagtccaaaatgaggaggcagatgcagttagcactggagaggagggagttacccatgagggaacccagggaggaaaagttattcctcaaatgcacatgggctccgggctgcagcccaagagcttcagccaaaacaggagccaagttaataacgacatgatagtcactgacaacaacggtgcagtcaagtttccacaactgtgtaaattttgtgatgtgagattttccacctgtgacaaccagaaatcctgcatgagcaactgcagcatcacctccatctgtgagaagccacaggaagtctgtgtggctgtatgctggatgagtgaggagatttgtaccaacgtcatgtattctcctcttccctgcaaattcctccacctgagtcctattgaggtgctccccattataaggagtcctgtgaatcaaagtggtagatgtaaaatcagacatataggttcaaacaatcgattgcaaaggagcacttgtcaaaacactggctgggaatctgctcatgtgatgaagaccccagggtttagagaatataacaccagcaatcctgacttgttgctagtcatatttcaagtgacaggcatcagcctcctgccaccactgggagttgccatatctgtcatcatcatcttctactgctaccgcgttaaccggcagcagaagctgagttcaacctgggaaaccggcaagacgcggaagctcatggagttcagcgagcactgtgccatcatcctggaagatgaccgctctgacatcagctccacgtgtgccaacaacatcaaccacaacacagagctgctgcccattgagctggacaccctggtggggaaaggtcgctttgctgaggtctataaggccaagctgaagcagaacacttcagagcagttttgagacagtgggcagttcaagattcttttccctattgagggagtatgcctcttggaagacagagaaggacatcttctcagacatcaatctgaagcatgagaacatactccagttcctgacggctgaggagcggaagacggagttggggaaacaatactggctgatcaccgccttccacgccaagggcaacctacaggagtacctgacgcggcatgtcatcagctgggaggacctgcgcaagctgggcagctccctcgcccgggggattgctcacctccacagtgatcacactccatgtgggaggcccaagatgcccatcgtgcacagggacctcaagagctccaatatcctcgtgaagaacgacctaacctgctgcctgtgtgactttgggctttccctgcgtctggaccctactctgtctgtggatgacctggctaacagtgggcagtgctatgaagtatgctccagtggacgttttcttgtaacgatatttaaggggaacaggttaagagaaaggacagagaaaaacactcgcataactcctcgagactgggtttatgagtggttatggtga

SEQ ID NO: 12372 - DNA, 5760 bp, Homo sapiens
  SIMILAR (855)..(361): 461254mologous to Mus musculus odorant receptor S6,accession number AF121974,Smith-Waterman Score=325.
ataccctgtggtgctagtgtaaaatcaaatataatctacctctttagcttttctgttatgtaattggaatgaaaaaatagtgcttttttttttttttcatttttgagattgagttaccatggagggaaagaacatgtgttttaccagtggaacgcattctttgtgttatctcttcgatttttaacattttatgtttccagtttataaactttgcctccagtttgatgaagaaaatttagctattagaaagtatttaaaatctcaaaagtatgacattttaaaatgttagcaggtttaaagataacttagtttttcaactcttaacccaaaattatacttgtatactataatttgtgttgaattacttggtattatttatcatcctagtaagatctattttatataatttgattcactttttatattgaattatgttaattgtttttgtaatacacctttcatatttcttcaaagaaaactagtgttgggttattgctaattttgcttcgtggtttggttatttacatataaaaattatattgttttaaaaattgcaaagtgatcatttattgacacatcagcaagaattaatgttgaaatgcaagttttttcccctatccttaactaagtgtgtagatatctttgttttgtttctttaatagatagcaaacaataaagatgcattgaggaagacatggaaccctaagtttacattgagaagtcactttgatggcatccgagcccttgctttccatcccattgagcctgttttgataacagcatcagaggatcacacattaaaaatgtggaatttacagaaaacagccccagccaaaaagtgagaatattctactttaacattatttgaatattttaagtaacattttcagcagaaaactacatattttatgatttctgttaaatttcccaaacatttcttctagttctttcttccatgtcatgtaatttattgtgtttttccatttatacaacctaatgctaggttagaaaactgatgcttaggaagatatggtattatcttttggtttcaccagggtttgtgaatactgattacagtctttatacataacagtatttttaaatggctgctatatttggggagccccttgtctatactgaaggtttggactgttcttgtaaacaggtatatgcatctttaaaataatcaaatgtccacctccaccttgccccattgtttactagatttagacttatgagatggagcagagaaaagcctcactgggatgggtggagggtcttggtcttgtcttttggccttgagactttaggtactttccatacccaccaatatgtctagactcagaggctaacatgactgctagtgctcaccttggccctttagttcctgtctaagcatggatagacatgagttagtataaaccctttaaaagtcacaaagctaaatctggttctacttgcttgggtccttatcggagctccactcctttgggtcacatgtcaaaaaaaaaaaaaaaaaggcgccgtccgctgcgctgggggctcggtctatgacgagcagcggggtctgccatgggtcgggggctgctcaggggcctgtggccgctgcacatcgtcctgtggacgcgtatcgccagcacgatcccaccgcacgttcagaagtcggttaataacgacatgatagtcactgacaacaacggtgcagtcaagtttccacaactgtgtaaattttgtgatgtgagattttccacctgtgacaaccagaaatcctgcatgagcaactgcagcatcacctccatctgtgagaagccacaggaagtctgtgtggctgtatggagaaagaatgacgagaacataacactagagacagtttgccatgaccccaagctcccctaccatgactttattctggaagatgctgcttctccaaagtgcattatgaaggaaaaaaaaaagcctggtgagactttcttcatgtgttcctgtagctctgatgagtgcaatgacaacatcatcttctcagaagaatataacaccagcaatcctgacttgttgctagtcatatttcaagtgacaggcatcagcctcctgccaccactgggagttgccatatctgtcatcatcatcttctactgctaccgcgttaaccggcagcagaagctgagttcaacctgggaaaccggcaagacgcggaagctcatggagttcagcgagcactgtgccatcatcctggaagatgaccgctctgacatcagctccacgtgtgccaacaacatcaaccacaacacagagctgctgcccattgagctggacaccctggtggggaaaggtcgctttgctgaggtctataaggccaagctgaagcagaacacttcagagcagtttgagacagtggcagtcaagatctttccctatgaggagtatgcctcttggaagacagagaaggacatcttctcagacatcaatctgaagcatgagaacatactccagttcctgacggctgaggagcggaagacggagttggggaaacaatactggctgatcaccgccttccacgccaagggcaacctacaggagtacctgacgcggcatgtcatcagctgggaggacctgcgcaagctgggcagctccctcgcccgggggattgctcacctccacagtgatcacactccatgtgggaggcccaagatgcccatcgtgcacagggacctcaacagctccaatatcctcgtgaagaacgacctaacctgctgcctgtgtgactttgggctttccctgcgtctggaccctactctgtctgtggatgacctggctaacagtgggcaggtgggaactgcaagatacatggctccagaagtcctagaatccaggatgaatttggagaatgctgagtcctttcaagcacaccgatgtctactccatggctttggtgctatgggaaatgacatctcgctgtaatgcactgggagaagtaaaagattatgagcctccatttggttccaaggtgcgggagcacccctgtgtcgaaagcatgaaggacaacgtgttgagagatcgagggcgaccagaaattcccagcttctggctcaaccaccagggcatccagatggtgtgtgagacgttgactgagtgctgcgaccacgacccatatgcccgtctcacagcccagtgtgtggcagaacgcttcagtgagctggagcatctggacaggctctcggggaggagctgctcggaggagaagattcctgaagacggctccctaaacactaccaaatagctcttctggggcaggctgggccatgtccaaagaggctgcccctctcaccaaagaacagaggcagcaggaagctgcccctgaactgatgcttcctggaaaaccaagggggtcactcccctccctgtaagctgtggggataagcagaaacaacagcagcagggagtgggtgacatagagcattctatgccttttacattgtcataggataagctgtgttagcacttcctcaggaaatgagattgattttacaatagccaataacatttgcactttattaatgcctgtatataaatatgaatagctatgttttatatatatatatatatatctatatatgtctatagctctatatatatagccataccttgaaaagagacaaggaaaaacatcaaatattcccaggaaattggttttattggagaactccagaaccaagcagagaaggaagggacccatgacagcattagcatttgacaatcacacatgcagtggttctctgactgtaaaacagtgaactttgcatgaggaaagaggctccatgtctcacagccagctatgaccacattgcacttgcttttgcaaaataatcattccctgcctagcacttctcttctggccatggaactaagtacagtggcactgtttgaggaccagtgttcccggggttcctgtgtgcccttatttctcctggacttttcatttaagctccaagccccaaatctggggggctagtttagaaactctccctcaacctagtttagaaactctaccccatctttaataccttgaatgttttgaaccccactttttaccttcatgggttgcagaaaaatcagaacagatgtccccatccatgcgattgccccaccatctactaatgaaaaattgttctttttttcatctttcccctgcacttatgttactattctctgctcccagccttcatccttttctaaaaaggagcaaattctcactctaggctttatcgtgtttactttttcattacacttgacttgattttctagttttctatacaaacaccaatgggttccatctttctgggctcctgattgctcaagcacagtttggcctgatgaagaggatttcaactacacaatactatcattgtcaggactatgacctcaggcactctaaacatatgttttgtttggtcagcacagcgtttcaaaaagtgaagccactttataaatatttggagattttgcaggaaaatctggatccccaggtaaggatagcagatggttttcagttatctccagtccacgttcacaaaatgtgaaggtgtggagacacttacaaagctgcctcacttctcactgtaaacattagctctttccactgcctacctggaccccagtctaggaattaaatctgcacctaaccaaggtcccttgtaagaaatgtccattcaagcagtcattctctgggtatataatatgattttgactaccttatctggtgttaagatttgaagttggccttttattggactaaaggggaactcctttaagggtctcagttagcccaagtttcttttgcttatatgttaatagttttaccctctgcattggagagaggagtgctttactccaagaagctttcctcatggttaccgttctctccatcatgccagccttctcaacctttgcagaaattactagagaggatttgaatgtgggacacaaaggtcccatttgcagttagaaaatttgtgtccacaaggacaagaacaaagtatgagctttaaaactccataggaaacttgttaatcaacaaagaagtgttaatgctgcaagtaatctcttttttaaaactttttgaagctacttattttcagccaaataggaatattagagagggactggtagtgagaatatcagctctgtttggatggtggaaggtctcattttattgagatttttaagatacatgcaaaggtttggaaatagaacctctaggcaccctcctcagtgtgggtgggctgagagttaaagacagtgtggctgcagtagcatagaggcgcctagaaattccacttgcaccgtagggcatgctgataccatcccaatagctgttgcccattgacctctagtggtgagtttctagaatactggtccattcatgagatattcaagattcaagagtattctcacttctgggttatcagcataaactggaatgtagtgtcagaggatactgtggcttgttttgtttatgtttttttttcttattcaagaaaaaagaccaaggaataacattctgtagttcctaaaaatactgacttttttcactactatacataaagggaaagttttattcttttatggaacacttcagctgtactcatgtattaaaataggaatgtgaatgctatatactctttttatatcaaaagtctcaagcacttatttttattctatgcattgtttgtcttttacataaataaaatgtttattagattg

SEQ ID NO: 12373 - DNA, 1355 bp, Homo sapiens
  SIMILAR (1)..(132): 841254mologous to Homo sapiens reverse transcriptase,accession number L27428,Smith-Waterman Score=188.
aatataacaccagcaatcctgacttgttgctagtcatatttcaagtgacaggcatcagcctcctgccaccactgggagttgccatatctgtcatcatcatcttctactgctaccgcgttaaccggcagcagaagctgagttcaacctgggaaaccggcaagacgcggaagctcatggagttcagcgagcactgtgccatcatcctggaagatgaccgctctgacatcagctccacgtgtgccaacaacatcaaccacaacacagagctgctgcccattgagctggacaccctggtggggaaaggtcgctttgctgaggtctataaggccaagctgaagcagaacacttcagagcagtttgagacagtggcagtcaagatctttccctatgaggagtatgcctcttggaagacagagaaggacatcttctcagacatcaatctgaagcatgagaacatactccagttcctgacggctgaggagcggaagacggagttggggaaacaatactggctgatcaccgccttccacgccaagggcaacctacaggagtacctgacgcggcatgtcatcagctgggaggacctgcgcaagctgggcagctccctcgcccgggggattgctcacctccacagtgatcacactccatgtgggaggcccaagatgcccatcgtgcacagggacctcaagagctccaatatcctcgtgaagaacgacctaacctgctgcctgtgtgactttgggctttccctgcgtctggaccctactctgtctgtggatgacctggctaacagtgggcaggtgggaactgcaagatacatggctccagaagtcctagaatccaggatgaatttggagaatgttgagtccttcaagcagaccgatgtctactccatggctctggtgctctgggaaatgacatctcgctgtaatgcagtgggaggatcatttttccctgaacacactgtcatagcctcccaggtgccctctgctatgtcttctctgcagttgtatgctgagtccttttcactgttagaggctgttactactattgaccatgagactgtagatagaatgggcaacaaacatctggggagaaagaatgacgagaacataacactagagacagtttgccatgaccccaagctcccctaccatgactttattctggaagatgctgcttctccaaagtgcattatgaaggaaaaaaaaaagcctggtgagactttcttcatgtgttcctgtagctctgatgagtgcaatgacaacatcatcttctcagaagaggcagaggaacacggtaacatcttgacatcagacactggtgtcatagatgccctttcctcagaggactga

SEQ ID NO: 12374 - DNA, 420 bp, Homo sapiens
  SIMILAR (13)..(168): 1001254mologous to Homo sapiens Ig J-chain,accession number M12759,Smith-Waterman Score=287.
  misc_feature (1)...(420): n = a,t,c or g
cccacgcgtccggctacccagagcaatatctgtgatgaagacagtgctacagagacctgctacacttatgacagaaacaagtgctacacagctgtggtcccactcgtatatggtggtgagaccaaaatggtggaaacagccttaaccccagatgcctgctatcctgactaatttaagtcattgctgactgcatagctctttttcttgagaggctctccattttgattcagaaagttagcatatttattaccaatgaatttgaaaccagggcnnnnnnnnnnnnnggggggaggaaaacccacctccttgcccnnnnnnnnnnnnnnnnnnnnccatggttttttttatagggaaaccccttttaaataatgggcccaacctcaaggaaaaaaaatttcccatttatagggctcccgggag

SEQ ID NO: 12375 - DNA, 473 bp, Homo sapiens
  SIMILAR (300)..(1): 951254mologous to Homo sapiens disrupter of silencing SAS10,accession number AF271212,Smith-Waterman Score=511.
ctcccccgcattccctccattttggtcgtcctcatcgtccatatctagggctagcacctcctcctcctcctcctcgccatcctcctggtctccactctgtacttcattccagccattagataaggcggcccgggatcgtgcctcatgaaagtcatctacctgatcttggtagtagctggtgtcccctggtgagggtggcaatcctaaatcatctccattttcgtcggtgagcgtgggacctgccttggctcgcacagctgcccacttagctgctccgcgccgccgggatctccccaccatggctcacaatctcaggttttacagcgactccggactttcggccaccactgacttcggcgcaggaatcaggcgctccggtaactcgtggctctaaacagcagcgcgctcccctaccaccggagtttgcagactcctgatcggctactggaatttcctcttccttccggacgaaa

SEQ ID NO: 12376 - DNA, 829 bp, Homo sapiens
  SIMILAR (33)..(458): 631254mologous to Homo sapiens IgM antibody J-chain protein sequence,accession number Y39468,Smith-Waterman Score=387.
  misc_feature (1)...(829): n = a,t,c or g
tgctccagtttttcagaagaagtgaagtcaagatgaagaaccatttgcttttctggggagtcctggcggtttttattaaggctgttcatgtgaaagcccaagaagatgaaaggattgttcttgttgacaacaaatgtaagtgtgcccggattacttccaggatcatccgttcttccgaagatcctaatgaggacattgtggagagaaacatccgaatttattgttcctctgaacaacagggagaatatctctgatcccacctcaccatttgagaaccagatttgtgtacccatttgtctgacctctgtaaaaaaatgtgatcctacagaagtggagctgggataatcagatagttactgctaccccagagcaatatctgtggatggatgacagtgccacagagcacctgctacactttatngacaggaaacaagtgctacacagctgtggtcccacttcgtatatggtggtgagaccaaaatggtggaaacagccttaaccccagatgcctgctatcctgactaatttaagtcattgctgactgcatagctcttttttcttgagaggctctccattttgattcagaaagttagcatatttattaccaatgaattttgaaaccagggctttttttttttttttgggtgatgtaaaaccaactccctgccaccaaaataattaaaatagtcacattgttatctttattaggtaatcacttcttaattatatgttcatactctaagtatcaaaatcttccaattatcatgctcacctgaaagagggtatgctcttcttaggaatacagtttctagcattaaacaaataaaca

SEQ ID NO: 12377 - DNA, 2045 bp, Homo sapiens
  SIMILAR (3284)..(3430): 971254mologous to Homo sapiens Human secreted protein, SEQ ID NO: 6995,accession number G02914,Smith-Waterman Score=237.
  misc_feature (1)...(2045): n = a,t,c or g
atgaagacagtgctacagagacctgctacacttatgacagaaacaagtgctacacagctgtggtcccactcgtatatggtgcactttggccccggcgatggaggcgccggcttcggagtgtgccggccgccgcagcagcagggctcttggaggaccccgcggtccccgggctcacggctgcccttcctgctgttgagctacccgagcggcggcggcggcagcagcggcagcggcaagcaccgggacaccagctactaccaagatcaggtagatgactttcatgaggcacgatcccgggccgccttagctaagggctggaatgaagtacagagtggagacgaggaggatggcgaggaggaggaggaggaggtgctagccctagatatggacgatgaggacgacgaagatggagggaatgcgggggaggaggaggaggaggagaatgccgatgatgatgganaaaaactttactatgacacggactatggttccaagtcccgaggccggcagagtcaacaggaggcagaggaggaggaaagagaggaggaggaggaggcacagatcattcagcggcgcctagccccaagcgctgcaagaggatgattttggtgtcgcctgggttgaggcctttgcaaaaccagtgcctcaggtagatgaggctgagacaccgggtcgtgaaggatttggctaaagttttccagtgaaagagaagctgaaaatgttgccgaaagggaatcacccagaactcattggagctgattagaagacctttaaagtcaagttagacagacgttaaggatgtacctggagcccattttaagagtttggtggaacaagggatcattccacccggaaaaaggaagccaaatacattgaggaccaagtacaaacctcatacattgaattattgctcagaacatcaagtttttatttttgatcctgaaagctaggagagtcccaagcacattggacatcctgtcatagaaaggcttgttacctacccgaaatttgatcaacaagctgtccgttgtggatcagaagctgtcctcagaaaattcgtcatctgttgacacttaaggatgatgctgtaaagaaagaactgattccaaaagcaaaatccaccaagcccaaaccaaagtctgtttcaaagacttctgctgctgcctgtgctgttacagatctttctgatgattgtgcctcctgatgaaaaaagcaaaactgaagtactataaagaaatagaatacaggcaaaagctaaagagaaagaaagaagaaaatagcactgaagaacaggctcttgaagatcaaaatgcaaagagagctattacctatcaaattgctaaaaataggggaccttactcctaggaagaaagaagattgatcgcaatcccagagtgaaacacagagagaagttcagaagagccaaaattagaaagaagaggccaggttcgtgaagtatcgtaaagaagagcaacgttataagtggtgacttatctggcattcggtgcaggagttaaaaagagcattaagccttaaatgaagtttttgcttagccataaggtttttggcagttttggatcaataaatttttacttttaactaaagtcattgtattaatatataatactttaaattttaaaaattcttgtccacaaggaaatttgtctgggttattggacaatttataagaactatggggagcaatatgaaggtgcttgagaaaagagatgatgttgaagttttccaatattctgttgaagttttccaatattaagtatttaggcctaggggaaattttcacagttcattgtggagtgttaaacttagaacatgtgtaacttttcacataaagagaatgcatctttggacagttatcttatttgtaaggcagcctataaaatagttctgaagtattttatttacctaactataattattgggccagatacttgttaataaatgggcttaatgttaacatggatttcatatgttctgtgtggtttaaaagcataggaatgaaactttggttaaaagcagaaaaagga

SEQ ID NO: 12378 - DNA, 525 bp, Homo sapiens
  SIMILAR (415)..(1608): 911254mologous to Homo sapiens putative p150,accession number U93574,Smith-Waterman Score=1925.
  misc_feature (1)...(525): n = a,t,c or g
ggcacgagcaatggcgggcgccctcccccagcctcgctgccgccttgcagtttgatctcagactgctgtgctagtaatcaacgagattccgtgggtgtaggaccctccgagccagtgagatgaacccggtacctcagatggaaatgcagaaatcacccgtcttctgcgtcgctcacgctgggagctgtagaccggagtgtntcctatttggccaactttggctcctcctttctgccctgaattttctacagtcaaaaattcatagacgtgactttctcctccttgccttccaccgtgattgtgaggcttccccagccatgtgaaactcttgcaccatgtgtctggaaaagctgcagacactcaacgccagcccaatgaaagcagccaggagggagactgtaccctgcaaagccacaggggcagagctggccaagaccacaggaacccacctcttgcatcagcgtgacccagacatgagacatggagtaaaggagnttattttggagctttagatttgactgccna

SEQ ID NO: 12379 - DNA, 461 bp, Homo sapiens
  SIMILAR (174)..(422): 791254mologous to Homo sapiens Human secreted protein sequence encoded by gene 2 SEQ ID NO:250,accession number Y91577,Smith-Waterman Score=334.
  misc_feature (1)...(461): n = a,t,c or g
cccgttgttaaagttgtcnaatgtgnccccgtggcttggggggttgccctccccaaattaagnctgactcggggggtccaagggtcnagggaaccccaattgnaaggaagcaatctgncccgttcctcaagatctccaagctgccgtgctgggaagaaccactgctctcttcaaaagctgtcaagacagggacacttnaagtctgcaagaggttactgctgtctttttgtttgtctgtgcctgcccccagaggcaggcaggcctccttgagctgtggtgggctccacccagttcgagcttcctggctgctttgtttacctaagcaagcctgggcaatggcgggcgcccctcccccagcatggttgccgccttgcagtttgatctcagactgctgtgctagcaatcagcgagattccgtgggcgtacgaccctctgagccaggtgtgggatatagtctcgtg

SEQ ID NO: 12380 - DNA, 370 bp, Homo sapiens
  SIMILAR (146)..(370): 921254mologous to Homo sapiens line-1 reverse transcriptase,accession number U83303,Smith-Waterman Score=366.
tttgatctcagactcctgtgctagcaatcagcgagattccgtgggcgtaggaccctccgagccaggtgcgggatataatctcgtggtgcgcagttttttaagccggtccgaaaagcgcaatattcgggtgggagtgacccgattttccagacaaacagagagccaaatcatgagtgaactcccattcacaattgcttcaaagagaataaaatacttaggaatccaacttagaagggatgtgaaggacctcttcaaggagaactataagccactgctcaatgaaataaaagaggatacaaacaaatggaagaacattccatgctcatgggtaggaagaatcaatatcgtgaaaatggccatactgcccaag

SEQ ID NO: 12381 - DNA, 3138 bp, Homo sapiens; identical to SEQ ID NO: 7580
  SIMILAR (1902)..(322): 901254mologous to Homo sapiens putative p150,accession number U93564,Smith-Waterman Score=2575.

SEQ ID NO: 12382 - DNA, 945 bp, Homo sapiens; identical to SEQ ID NO: 11844
  SIMILAR (442)..(660): 571254mologous to Mus musculus reverse transcriptase,accession number U15647,Smith-Waterman Score=210.

SEQ ID NO: 12383 - DNA, 465 bp, Homo sapiens; identical to SEQ ID NO: 11845
  SIMILAR (106)..(462): 751254mologous to Homo sapiens ORF1; putative,accession number M19503,Smith-Waterman Score=460.

SEQ ID NO: 12384 - DNA, 300 bp, Homo sapiens
  SIMILAR (1)..(87): 961254mologous to Homo sapiens Human secreted protein sequence encoded by gene 2 SEQ ID NO:250,accession number Y91577,Smith-Waterman Score=155.
atggcgggcgcccctcccccagcctcgttgccgccttgcagtttgatctcagactgctgtgctagcaatcagcgagattccgtgggcgtaggaccctctgagccaggtgtgggatatagtctcgtggtgcgccgtttcttaagccggtctgaaaagcgcaatattcgggtgggagtgacccgattttccaggtaccactcagttggaaatgcagaaatcacctgcattctgcgttggtctcaatgggagctgcagaccaaagctgttcctatttggtcatcttgccagcagctcccttga

SEQ ID NO: 12385 - DNA, 1898 bp, Homo sapiens
  SIMILAR (894)..(25): 961254mologous to Homo sapiens p40,accession number U93570,Smith-Waterman Score=1435.
ttagctatgccacactaagaaataagatatgaagcttagtttggctggatatgaaattctgggttgaaatttcttgtctttaagaatgttgaatattggcccccactctcttctggcttgtagggtttctgctgagagatccgctgttagtctgatgggcttccctttgagggtaacccgacctttctctctggctgcccttaacattttttccttcatttcaactttggtgaatctgaccattatgtgtcttggagttgctcttctcgagaagtatctttgtggcattctctgtgtttcctgaatctgaacgttggcctgccttgctagattggggaagttctcctggataatatcctgcagagtgttttccaacttggttccattctccccatcactttcaggtacaccaatcagacgtagatttggtcttttcacatagtcccatatttcttggaggctttgctcatttctttttattcttttttctctaaacttcccttctcgcttcatttcattcatttcatcttccatcgctgataccctctcttccagttgatcgcatcggctcctgaggcttctgcattcttcacgtagttctcgagccttggttttcagctccatcagctcctttaagcacttctctgtattggttattctagttatacattcttctaaatttttttcaaagttttcaacttctttgcctttggtttgaatgtcctcctgtagctgagagtaatttgatcgtctgaagccttcttctctcagctcgtcaaagtcattctccatccagctttgttccgttgttggtgaggaactgcgttcctttggaggaggagaggcgctctgcgttttagagtttccagtttttctgttctgttttttccccatctttgtggttttatgtacttttggtctttgatgatggtgatgtacagatgggtttttggtgtggatgtcctttctgtttgttagttttcctttgccgccttgcagtttgatctcagactgcagtgctagcaatgagcgagactccgtgggtgtaggaccctccgagccaggtgcgggatataatcttgtggtgcgccgttttttaagcccgtcggaaaagcgcagtattcgggtatgagtgacccgattttccaggtgccgtccgtcacccctttctttgactcggaaagggaactccctgaccccttgcgcttcccaagtgaggcaatgcctcgccctgtttcggctggcgcacggtgtgcgcacccactctcctgcacccactgtctggcactccctgcccaaggtaggaccatttcttgaaaattctgtccccggtttgtaaccccggtttgcggttacccaaccattctccggggtgcaaattttttcgataccgtcggggtctctgaaccctttcaatttggatactggccctggggcatcggtctggcaggttgggccccgctttttggcgttatttaggcttctggaaaatcgggtcactgccacccgaatattgcgcttttcagaccggcttaaaaagcggcgcaccacaagattatatcccacacctggctcagagggtcctacgcccacggaatctcgctgactgctagcacagcagtctgagatcaaactgcacacagaacactgccgctgaggctgaagagcagtgaacataacaatcatggaatagtttcgaggtggtgcctttataaattttcggaatttatcaccattcattcggaagattgagcgtctggaactccattccatcagctgctctactttttcagctaaaagattatgaacatccgttctgtcagcaatccactttgctagttgctcagctgcaaatccaattctttggaggtcaaaagtatcagctctcttaggtctgc

SEQ ID NO: 12386 - DNA, 268 bp, Homo sapiens
  SIMILAR (4172)..(1539): 801254mologous to Homo sapiens putative p150,accession number U93569,Smith-Waterman Score=3466.
atggtgggcgcccctcccccagccttgctgccgccttgcagtttgatctcagactgctgtgctagcaatcagcgagactccctgggcgtaggaccctccgagccaggtgcgggatataatctcgtggtgcgccgttttttaagccggtcggaaaagcgcagtattcgggtgggagtgacccgattttccagcctgaaggttggaacagctatgttgcacaaacagcaaagatggcagcccacccctccctctgggagctccatcccag

SEQ ID NO: 12387 - DNA, 479 bp, Homo sapiens; identical to SEQ ID NO: 7590
  SIMILAR (446)..(297): 561254mologous to Homo sapiens Human secreted protein, SEQ ID NO: 7217,accession number G03136,Smith-Waterman Score=139.

SEQ ID NO: 12388 - DNA, 262 bp, Homo sapiens
  SIMILAR (1)..(66): 901254mologous to Homo sapiens Human secreted protein sequence encoded by gene 2 SEQ ID NO:250,accession number Y91577,Smith-Waterman Score=112.
atggcggatgcccctcccccagcctcgctgccaccttgcagtttgatctcagactgctgtgctagcagactggctttgttggaagaaaagctcagatatagcaatgagaaataccaaaagtttaaggcagtggaagaaagcctgcgtaaagagctggtggatatgctaggtgatgatggtgtgttcttatatccctcacatcccacagtggcacctaagcatcatgtccctctaacacggcctttcaactttgcttacacag

SEQ ID NO: 12389 - DNA, 834 bp, Homo sapiens; identical to SEQ ID NO: 7585
  SIMILAR (317)..(460): 831254mologous to Homo sapiens spermidine aminopropyltransferase,accession number AD001528,Smith-Waterman Score=200.

SEQ ID NO: 12390 - DNA, 512 bp, Homo sapiens
  SIMILAR (367)..(65): 251254mologous to Streptomyces noursei NysA,accession number AF263912,Smith-Waterman Score=111.
aatcttttagctgaaaaagtagagcagctgatggaatggagttccagacgctcaatcttccgaatgaatggtgataaattccgaaaatttataaaggcaccacctcgaaactattccatgattgttatgttcactgctcttcagcctcagcggcagtgttctgtgtgcagtttgatctcagactgctgtgctagcagtcagcgagattccgtgggcgtaggaccctctgagccaggtgtgggatataatcttgtggtgcgccgctttttaagccggtctgaaaagcgcaatattcgggtggcagtgacccgattttccagaagcctaaataacgccaaaaagcggggcccaacctgccagaccgatgccccagggccagtatccaaattgaaagggttcagagaccccgacggtatcgaaaaaatttgcaccccggagaatggttgggtaaccgcaaaccggggttacaaaccggggacagaattttcaagaaatggtcctaccttgggcag

SEQ ID NO: 12391 - DNA, 1257 bp, Homo sapiens
  SIMILAR (2)..(124): 1001254mologous to Gallus gallus alpha tubulin,accession number X08064,Smith-Waterman Score=207.
atgtcacacctgccgatgaaactcctgcgtaagaagatcgagaagcggaacctcaaattgcggcagcggaacctaaagtttcagggggcctcaaatctgaccctatcggaaactcaaaatggagatgtatctgaagaaacaatgggaagtagaaaggttaaaaaatcaaaacaaaagcccatgaatgtgggcttatcagaaactcaaaatggaggcatgtctcaagaagcagtgggaaatataaaagttacaaagtctccccagaaatccactgtattaaccaatggagaagcagcaatgcagtcttccaattcagaatcaaaaaagaaaaagaagaaaaagagaaaaatggtgaatgatgctgagcctgtgtctccactccagactgtaagctctgtgatagtagggcacccatctatcgtgtttactattgcatctcttgcctccgaaagtgcctggcccacagtcagctcggagttgtttgatcatttgaagtcttcttctctcaactcatcaaagtcattctccatccagctttgttctgttgctggtgaggaactgcgttcctttggaggaggagagacaagaccctcagctgcaggtctgttggagtttgctagaggtccactctacaccctgtttgcctgggtatcagcagcagtgtctgcagaacagcggtttttcgtgaaccacgaattctctggaagttttgtctcagaggagtacccggccattttgatctcagactgctgtgctagcaatcagcgagactccgtgggcgtacgaccctctgagccaggtgcgggatataatctcgtgttgcgccgctttttaagcccgtcggaaaagcgcagtatttgggtgggagtgacccgattttccagtgagatgaacctggtacctcagatggaaatgcagaaatcacccgtcttctgcgctctcacgctgggagctgtagacaggagctgttcatattcggccatcttggctcctcctcccaaacgcaaatacttaataaatgaatatattctggtacacttgatctcaacatgcccttctctcctggggagactgtgtcaatttgatcagcaggccaaagaagaggctgatagtttctatcacttggtgtgccagcagctgccaacagcagagtccccagagtaccttctctgccatgctttgaggcagcacaaaagcccttaccaaaacctgagcagacaccagtccatacttcttgtacagactgctgaaccatga

SEQ ID NO: 12392 - DNA, 708 bp, Homo sapiens; identical to SEQ ID NO: 11848
  SIMILAR (254)..(123): 351254mologous to Homo sapiens bB329D4.1.3 (novel protein),accession number AL391119,Smith-Waterman Score=72.

SEQ ID NO: 12393 - DNA, 3042 bp, Homo sapiens
  SIMILAR (4)..(288): 541254mologous to Homo sapiens nucleophosmin,accession number M23613,Smith-Waterman Score=254.
atgggggtaggaccctctgatccaggtgtgggatatagtctcgtggtgcgccgttttttaagccggtctgaaaagcgcaatattcgcgtgggagtgacccgattttccagggattttgccgatttcggaaccaccatcaaacaggattttcgcctgctggggcaaaccagcgtggaccgcttgctgcaactctctcagggccaggcggtgaagggcaatcagctgttgcccgtctcactggtgaaaagaaaaaccaccctggcgcccaatacgcaaaccgcctctccccgcgcgttggccgattcattaatgcagctggcacgacaggtttcccgactggaaagcgggcaccggtctgaaaagcgcaatattcgcgtgggagtgacccgattttccagctgggtgaggcagcctttgagagagatggtagtgctcttggagagggtgtctacaatcaccttgggggcaacgacagatgagaacatgacatccaaaagggacaagaagggattttgccgatttcggacccaccatcaaacaggattttcgcctgctggggcaaaccagcgtggaccgcttgctgcaactctctcagggccaggcggtgaagggcaatcagctgttgcccgtctcactggtgaaaagaaaaaccaccttggcgcccaatacgcaaaccgcctctccccgcgcgttggccgattcattaatgcagctggcacgacaggtttcccgactggaaagcgggcagaagaattgcatgatgcatcctgtgaaggagatggttctgtcttccacaaccaagttctccagcagtttgggtgtaactgtggtggaataacagaaatcaacaaaggacaagtggctgaggaaaaagtacatgcgggtgtggagtttggggttgatcctgatgatcatgatcatgcccaggtttcccaatacagtgattgtgtagatgggccaggcggtgaagggcaatcagctgttgcccgtctcactggtgaaaagaaaaaccaccctggcgcccaatacgcaaaccgcctctccccgcgcgttggccgattcattaatgcagctggcacgacaggtttcccgactggaaagcgggcagtgagcgcaacgcaattaatggattttgccgatttcggaaccaccatcaaacaggattttcgcctgctggggcaaaccagcgtggaccgcttgctgcaactctctcagggccaggcggtgaagggcaatcagctgttgcccgtctcactggtgaaaagaaaaaccaccctggcgcccaatacgcaaaccgcctctccccgcgcgttggccgattcattaatgcagctggcacgacaggtttcccgactggaaagcgggcaccacttgtcctctgtagatttctgctactcctcaataattgtgccaaaaatgttggctaatatctttaacaaggacaaagccatctccttcctagggtgcatggtgcaattctacttgttttgcacttgtgtggtcactgaggtcttcctgctggccgtgatggcctatgaccgctttgtggccatctgtaaccctttgctatacacagtcaccatgtcttggaaggtgcgtgtggagctggcttcttgctgctacttctgtgggacggtgtgttctctgattcatttgtgcttagctcttaggatccccttctatagatctaatgtgattaaccactttttctgtgatctacctcctgtcttaagtcttgcttgctctgatatcactgtgaatgagacactgctgttcctggtggccactttgaatgagagtgttaccatcatgatcatcctcacctcctacctgctaattctcaccaccatcctgaagatgggctctgcagagggcaggcacaaagccttctccacctgtgcttcccacctcacagctatcacaccaaaagtagataaaaccacaaagatggggaaaaaacagaacagaaaaactggaaactctaaaaagcagagcgcctctccacctccaaaggaacgcagttcctcaccagcaacagaaaaaaggtggatggagaatgattttgacgagctgagagaagaaggcttcagacgatcaaattactctgagctacgggaggacattcaaaccaaaggcaaagaagttgaaaactttgaaaaaaatttagaagaatgtataactagaataacaaatacagagaagtgcttaaaggagctgatggagctgaaaaccaaggctcgagaactatgtgaagaatgcagaagcctcaggagccgatgcgatcaactggaagaaaggggattttgccgatttcggaaccaccatcaaacaggattttcgcctgctggggcaaaccagcgtggaccgcttgctgcaactctctcagggccaggcggtgaagggcaatcagctgttgcccgtctcactggtgaaaagaaaaaccaccctggcgcccaatacgcaaaccgcctctccccgcgcgttggccgattcattaatgcagctggcacgacaggtttcccgactggaaagcgggcagtgagcgcaacgcaattaatggattttgccgatttcggaaccaccatcaaacaggattttcgcctgctggggcaaaccagcgtggaccgcttgctgcaactctctcagggccaggcggtgaagggcaatcagctgttgcccgtctcactggtgaaaagaaaaaccaccctggcgcccaatacgcaaaccgcctctccccgcgcgttggccgattcattaatgcagctggcacgacaggtttcccgactggaaagcgggcaggattttgccgatttcggaaccaccatcaaacaggattttcgcctgctggggcaaaccagcgtggaccgcttgctgcaactctctcagggccaggcggtgaagggcaatcagctgttgcccgtctcactggtgaaaagaaaaaccaccctggcgcccaatacgcaaaccgcctctccccgcgcgttggccgattcattaatgcagctggcacgacaggtttcccgactggaaagcgggcagtga

SEQ ID NO: 12394 - DNA, 669 bp, Homo sapiens
  SIMILAR (2)..(217): 981254mologous to Homo sapiens 04-OCT-1995 Human protein ubiquitin ligase pub3 cDNA,accession number T47042_cd1,Smith- Waterman Score=379.
gctgtggtgggctccccccagttcgagcttccaggctgctttgtttacctaagcaagcctgggcaatggcgggcgcccctcccccagcctcgttgccgccttgcagtttgatctcagactgctgtgctagcaatcagcgagattccgtgggcgtaggaccctctgagccagttgtgggatatagtctcgtggtgcgccgttttttaagcccgtctgaaaagcgcaatattcgggtgggaagtggccccgattttccgggggcggtccgtcaccccttttctttgaactcggaaaagggacttccctggaccccttgcgcctacccagctcccccgatggtggattcgttaattgcgcgcgtaggagtaatggctcgcggtaatgccattactttgcctgtatgtggtcgggatgtgaactttactcttgaactgctccggcgtgatagcgttgataatacccctccggtatggtcaattaatgggcgggaccaagaactagttactgaagacgccctggatgatctactcccttctcttctcctgccctgtcatcataacaccacactcaagtcaaacagtatcctctgtcctaacaaattcgccataggaacccccccgtccgaacacccctgcacctacccccacgcattcaaccggattctacctg

SEQ ID NO: 12395 - DNA, 747 bp, Homo sapiens
  SIMILAR (106)..(219): 841254mologous to Homo sapiens Human secreted protein, SEQ ID NO: 5576,accession number G01495,Smith-Waterman Score=161.
cggcacacgaaacggagggaggaagtaaagacgtgacacaggttcgaaagcgccaggataaaaaaagtgggtatctgtgggctgaaacaaagcatatgccatgaggtctccccttgtgttagggcgcctgccggcccaaccgaactggagcagatgccgcagtcaatatgctgggcagtctgtgactgtggtttcccagtaatgctggccacaggaaggcagctcctcacccagcgactgacgggatttccgtcagccgtctcctctcaccaaagctgatcactgtcccacttgaggaaatgtgtagagcaggatgagctgtttctctcaacaagagaaatctggttcctctggtggagatgagagcagcttcactctgttcacttgtaacaaatgcatatgatggccctcacatagaaaaagtagttatcattgggttggaggttaactttcagctggagtcctttgattccagagaaagatctgaggccctctccctcaggagagtgctgtctgcagtactccagagtgtaggtctccgtggcctctggggtggtgggccgccatcggatagtggctgtgttccaacacacagtacagtcctcagcgcggatcacaggggtggagggtgctgtcctaaagatggccctttcactgggcaggctacatccagtgaagttcacagccatcacccacacttgatagcatcggtcaggttccagatcttcaaaaatgcagaaaatatac

SEQ ID NO: 12396 - DNA, 4823 bp, Homo sapiens
  SIMILAR (445)..(678): 751254mologous to Homo sapiens Npw38-binding protein NpwBP,accession number AB029309,Smith-Waterman Score=308.
  misc_feature (1)...(4823): n = a,t,c or g
cgttatttctgagggctctgttctgttccattgatctatatctctgttttggtaccagtaccatgctgttttggttactgtagccttgtagtatagtttgaagtcaggtagtgtgatgcctccagctttgttcttttggcttaggattgacttggcaatgcgggctcttttttggttccatatgaactttaaagtagttttttccaattctgtgaagaaagtcattggtagcttgatggggatggcattgaatctgtaaattaccttgggcagtatggccattttcacgatattgattcttcctacccatgagcatggantgttcttccatttttttgtatcctcttttatttccttgagcagtggtttgtagttctccttgaagaggtccttcacatcccttgtaagttggattcctaggtattttattctctttgaagcaattgtgaatgggagttcactcatgatttggctctctgtttgtctgttgttggtgtataggaatgcttgtgatttttgtacattgattttgtatcctgagantttgctgaagttgcttatcagcttaaggagattttgggctgagacgatggggttttctagatcaacaatcatgtcatctgcaaacagggacaatttgacttcctcttttcctaattgaataccctttatttccttctcctgcctgattgccctggccagaaattccaacactatgttgaataggagcggtgagagagggcatccctgtcttgtgccggttttcaaagggaatgcttccagtttttgcccattcagtatgatattggctgtggttttgtcatagatagctcttattattttgaaatacatcccatcaatacctattttattgatagtttttagcatgaagggttgttgaattttgtcaaaggctttttctgcatctattgagacaatcatgtggtttttgtctttggctctgtttatatgctggattacatttattgatttgcgtatattgaaccagccttgcatcccagggatgaagcccacttgatcatggtggataagctttttgatgtgctgctggatttggtttgccagtattttattgaggatttttgcatcaatgttcatcaaggatattggtctaaaattctcttttttggttgtgtctctgcccggctttggtatcagaatgatgctggcctcataaaatgagttagggaggattccctctttttctattgattggaatagtttcagaaagaatggtaccagttcctccttgtacctctggtagaattcggctgtgaatccatctggtcctggactctttttggttgataaactattgattattgccacaatttcagctcctgttattggtctattcagagattcaacttcttcctggtttagtcttgggagagtgtatgtgtcaaggaatgtatccatttcttctagattttctagtttatttgcgtagaggtgtttgtagtattctctgatggtagtttgtatttctgtgggatcggtggtgatatcccctttatcattttttattgtgtctatttgattcttctctctttttttctttattagtcttgctagcggtctatcaattttgttgatcctttcaaaaaaccagctcctggattcattgattttttgaagggttttttgtgtctctatttccttcagttctgctctgattttagttatttcttgccttctgctagcttttgaatgtgtttgctcttgcttttctagttcttttaattgtgatgttagggtgtcaattttggatctttcctgctttctcttgtgggcatttagtgctataaatttccctctacacactgctttgaatgcgtcctagagattctggtatgttgtgtctttgttctcgttggtttcaaagaacatctttatttctgccttcatttcgttatgtacccagtagtcattcaggagcaggttgttcagtttccatgtagttgagcggctttgagtgagattcttaatcctgagttctagtttgattgcactgtggtctgagagatagtttgttataatttctgttcttttacatttgctgaggagagcttcacttccaagtatgtggtcaattttggaatagctgtggtgtggtgctgaaaaaaatgtatattctgttgatttggggtggagagttctgtagatgtctattaggtctgcttggtgcagagctgagttcaattcctgggtatccttgttgactttctgtctcgttgatctgtctaatgttgacagtggggtgttaaagtctcccattattaatgtgtgggagtctaagtctctttgtaggtcactcaggacttgctttatgaatctgggtgctcctgtattgggtgcatacatatttaggatagttagctcctcttgttgaattgatccctttaccatcatgtaatggccttctttgtctcttttgatctttgttggtttaaagtctgttttatcagagactaggattgcaacccctgcctttttttgttttccatttgcttggtagatcttcctccatccttttattttgagcctatgtgtgtctctgcacatgagatgggtttcctgaatacagcacactgatgggtcttgactctttatccaacttgccagtctgtgtcttttaattggagaatttagtccatttacatttaaagttaatattgttatgtgtgaatttgatcctgtcattatgatgttagctggtgattttgctcgttagttgatgcagtttcttcctagtctcgatggtctttacattttggcatgattttgcagtggctggtaccggttgttcctttccatgtttagcgcttccttcaggagctcttttagggcaggcctgctggtgacaaaatcggtcagcatttgcttgtctgtaaagtattttatttctccttcacttatgaagcttagtttggctggatatgaaattctgggttgaaaattcttttctttaagaatgttcaatattggcccccactctcttctggcttgtagggtttctgccgagagatccgctgttagtctgatgggcttccctttgagggtaactcgacctttctctctggctgcccttaacattttttccttcatttcaactttggtgaatctgacaattatgtgtcttggagttgctcttctcgaggagtatctttgtggcgttctctgtatttcctgaatctgaacgttggcctgccttgctagattggggaaagtctcctggataatatcctgcagagtgttttccaacttggttccattctccgcatcactttcaggtacaccaatcagacgtagatttggtcttttcacatagtcccatatttcttggaggctttgctcgtttctttttattcttttttctctaaacttcccttcttgcttcatttcattcatttcatcttccattgctgataccctttcttccagttgatcgcattggctcctgaggcttctgcattcttcacgtagttctcgagccttggttttcagctccatcagctcctttaagcacttctctgtattggttattctagttatacattcttctaaatttttttcaaagttttcaacttctttgcctttggtttgaatgtcctcccgtagctcagagtaatttgagcgtctgaagccttcttctctcagctcgtcaaaatcattctccatccagctttggtccgttgctggtgaggaactgcgttcctttggaggaggagaggtgctctgcgttttagagtttccagtttttctgttctgttttttccccatctttgtggttttatctacttttggtctttgatgatggtgatgtacagatgcgttttcggtgtggatgtcctttctgtttgttagttttccttctaacagacaggaccctcagctgcaggtctgttggaataccctgccgtgtgaggtgtcagtgtgcccctgctggggggtgcctcccagttaggctgctcgggggtcaaggggtcaagggacccacttgaggaggcagtctgcccgttctcaagatcttccagctgcgtgctgggggaaacactgctctcttcaaagctgtcagacagggacacttaagtctgcagaggttactgctgtctttttgtttgtctgtgccctgcccccagaggtggagcctacagaggcgggcaggcctccttgagctgtggtgggctccacccagtttgagcttccccggctgctttgtttacctaagcaagcctgggcaatggcgggcgcccctcccccagcctcgctgcttgccttgcatttttgatctcagactgctgtgctagcaatcagcgagactccgtgggcgtaggaccctccgaaggccaggtgtgggatatagtctcgtggtgcgccgttttttaagccggtctgaaaagcgcaatattcggggtgggagtgacccgattttccaggtgccgtccgtcacccctttctttgactaggaaagggaactccctgaccccttgcgcttcccagagtgagggcaatgccatcggccctgctttcggcttcgcgcacggtgcgcgcacccactgggccttgcggcccactgtctggcactccctatgtgagatgaacccggtacctcagatggaaatgcagaaatcacccgtcttctgcgtcgctcacgctgggggctgtagaccggagctgtagaccagagctgttcctattcggccatcttggctcctcccaaatctccttttttcttatcttaatggggaaaattgcattttatatattaaacaataacatgtgtcttagataaaaaaaaa

SEQ ID NO: 12397 - DNA, 1467 bp, Homo sapiens
  SIMILAR (1452)..(751): 851254mologous to Mus musculus protocadherin,accession number AF281899,Smith-Waterman Score=1033.
atggcgggagcccctcccccagcctcgctgccgccttgcagtttgatctcagactgctgtgctagcaatcagcgagattccgtgggcgtaggaccctctgagccaggtgtgggatatagtctcgtggtgcgccgtttcttaagccggtctgaaaagcgcaatattcgggtgggagtgacccgattttccagatctttctctggaatcaaaggactccagctgaaagttaacctccaacccaatgataactactttttctatgtgagggccatcaatgcatttgggacaagtgaacagagtgaagctgctctcatctccaccagagtagctcccgcaaaaggaagcatcaaagaaaagaagaggcaaaggcggaggatagggtggaggaaactgccctgcaatttgcctgcaagctctgggggttattttgcagaacaaaatggcaaaatgggagaagtggtgtcagaacttgggtgggaccacctgcaggacacagtgaagaggggcagccaggaagaatgtggccagtctggggcaaggagtcctgaggggagttaccaccagagtccaaaggggtctgggctgagtgtgggccagagatacacatttttctacagtggtattgtgagtgatgttcatgtgactgagcgtccagccagagtgggcatcctgctggactacaacaaccagagacttatcttcatcaacgcagagagcgagcagttgctcttcatcatcaggcacaggtttaatgagggtgtccaccctgcctttgccctggagaaacctggaaaatgtactttgcacctggggatagagcccccggattctgtgaaggcacaagtgatccttggctttcagaatttgcaagaacagcgatttgaattttgggggggtctgctgttcattcctttaggtgctatacattattcaaaaagtctcccgcgcatttgcactaatgatggctgcatgcatagcaatcagcattgtgagcaaaatcgacaagaaagccttggctttacagagccagtgtgtgagtaaaccagaatgaaaacaaccaaccctccactcttttagtttatataaggtttggagttctttcctaaattaaaagatctacacttgaggttgggaaccgaaagagaaaaatggacttccatctgttttactggtaaaggaaatcctctgatggacaggtcagagtgaaggaaggttgtgctggtaagacatctctgaccgaagagccatggatgctttccacaaaatgtcacctcgctgcacctaaaggatgatgaatcctaatcattaaaggaattgtttcagctgatttaaatttataatgaactcttttgtaataatgtatactgtagaacatgagtctctcctccctaaaattttaaatgtagaaaagtgctatatattacaaatttccattttgttaaataaatggttagagtctataaaaaa

SEQ ID NO: 12398 - DNA, 471 bp, Homo sapiens
  SIMILAR (95)..(217): 701254mologous to Homo sapiens Human secreted protein, SEQ ID NO: 5576,accession number G01495,Smith-Waterman Score=141.
  misc_feature (1)...(471): n = a,t,c or g
agtgggggaagnnnaattgatanccncttgcggatcgatccgcaattcccgggttcgcgatcttcgccgttaccttcttgctggcgttggtgggagccgtgctctacctctatccgtggacccttttgaaaccatgctgaagtcattattaaggtatcaatctggtggtggcagtgtgagtgaaaaccacatgaggaaaaaattgtatgaaaatggtgtgactgattctctgaagagtaactttgccctcctcctaaaggtttggtctgagattggaaaaggctttctagatgggtcacttgataaaaacatgactcggaaaaaacaatatgaagatgccctcatgcaactggagtctgttttaaggaacatcataaaagaacgaaaaggaaggaacttcagtcaacatattttcattgactccttagtacaagggaaccttaatgaccaacagatcctagaagacagttn

SEQ ID NO: 12399 - DNA, 362 bp, Homo sapiens
  SIMILAR (281)..(361): 1001254mologous to Homo sapiens cytochrome P450 monooxygenase,accession number AF183412,Smith-Waterman Score=147.
ggtaaaatcaagtggctccaggtacttaccagacttaagaaagaaggcctccagattgcactatgtctgttggagggcattctgtaaatattgatgggccatataaaataaaccctgtgaagaattttactttttagcagcacttatatatcttctatatcatgggagaaaaaaagcggatacaaaaatcccaccctaaataagtaggttttttcttattctatacccaagccatgagttaactattttcattgtcattcatataatgtgtgacctagggtgtacctgggcaatctgttttttaaccacctctgaagaagttcaaaaaaaattatatgaagagataaaccaagtttttggac

SEQ ID NO: 12400 - DNA, 977 bp, Homo sapiens
  SIMILAR (800)..(3): 991254mologous to Homo sapiens Human stomach carcinoma clone HP10415-encoded protein,accession number W88501,Smith-Waterman Score=1364.
ttctctctaggaataataaatcggtcaatttttccttcaatatcttgaagctgggcagaaactggagtcagtttggcagttcgaacagtttcacaaagcacatgctgacaatatctgagctgctcaattttctctggagtaacaggaccatttccaaaaacttggtttatctcttcatataattttttttgaacttcttcagaggtggttaaaaaacagattgcccaggtacacaattttgcagttattatgcaactggccagagaaaatatcatactgtcttctaggatctgttggtcattaaggttcccttgtactaaggagtcaatgaaaatatgttgactgaagttccttccttttcgttcttttatgatgttccttaaaacagactccagttgcatgagggcatcttcatattgttttttccgagtcatgtttttatcaagtgacccatctagaaagccttttccaatctcagaccaaactgtgccatgattcttctggaagcgaatgacttcctgatcatcttcaaatgtactacccattaccatctgtgtaacagacttcatagcaaaaccaagcatatgctggctgaggggcacgtgctgggtctctgggtaggagagccatttatctaataattcttctgaaagctttaggaggagggcaaagttactcttcagagaatcagtcacaccattttcatacaattttttcctcatgtggttttcactcacactgccaccaccagattgataccttaataatgacttcagcatggtttcaaaagggtccacggatagaggtagagcacggctcccaccaacgccagcaagaaggtaacggcgaagatcgcgaagtccaacatggttctgccgcccagggacccacgtctcggatcggccgctccagcagcagcgcctcagcctggcccaatttaaggcatagcgtgtgggcgggggcaccccgcctcgtcc

SEQ ID NO: 12401 - DNA, 2743 bp, Homo sapiens
  SIMILAR (1415)..(1957): 291254mologous to Baboon endogenous virus strain M7 gag-pol precursor polyprotein,accession number D10032,Smith-Waterman Score= 213.
atgctaaaagacaataaaataattcccgttttcctaggaaaggtttgtgcaatggcatcagctaagctaaatacccttcttcagaccaaagtgattgaaaatcaggatgaagcatgttacattttagggaagctggaacatgttctaagtcaatcaatcaaggaacagactgaaatctactcatttctgattccccttgttcgtaccctggtttccaaaatttatgagcttctcttcatgaacttgcacctaccttctttaccttttaccaatggtagctcctcattttttgaagattttcaagaatattgtaattcaaatgaatggcaagtttacattgaaaaatatattgtaccttatatgaagcagtatgaagctcatacattttacgatggtcatgagaacatggcactttattggaaggattgttatgaagctttaatggtaaatatgcataaacgagaccgggaaggaggggaaagcaagctcaaatttcaggagctgtttgtggagccatttaatcgaaaagcacgccaagagaacctgaggtataataatatgcttaaacaacttagcagtcaacagttagccactcttagacgctggaaagcaatacagctctatcttacatgtgaaaggggaccttgggctaaaaggaaacagaatccaattcactggaagctagctaatgtagagaattattcccgcatgagacttaagctggtaccgaattataatttcaaaacccatgaggaagctagtgccttgagagataatctggtgtgtacctgggcaatctgttttttaaccacctctgaagaagttcaaaaaaaattatatgaagagataaaccaagtttttggaaatggtcctgttactccagagaaaattgagcagctcagatattgtcagcatgtgctttgtgaaactgttcgaactgccaaactgactccagtttctgcccagcttcaagatattgaaggaaaaattgaccgatttattattcctagagagggtatctttttgagtgattattttgatacagaaatatttaatttgtctgtttcagcggacccttttgaaaccatgctgaagtcattattaaggtatcaatctggtggtggcagtgtgagtgaaaaccacatgaggaaaaaattgtatgaaaatggtgtgactgattctctgaagagtaactttgccctcctcctaaaggttttgcaaattttgcagttccagccagatgcagcacatcaaatatcacagcaagtgggttggcaagacaccttagttaggctttttttaaaagcaaaatttgaaaacggaaatactcttcataagcacagtagagctgttttaatgaaagacaatgataaaaatatgtcaactgaagataccaagaagaactctgatgaaaaaacagatgaggaaaaaatcacctcttttgcctcagctaatgtgtcttcggatcagtggagtttggaggatagacactctttagactcaaacacaccattatttccagaagatagctctgtgggagaattgtctttcaaatcagagaatcaagaggaattctggcatagtaacccttcacatttgagtttagacctcagtggaattgactcatgtgaaatgagtgatagtggaagtcaagtgccagacagtctgcctagcacaccatccccagtagagtctactaaatcgttttctgtgcactctgacagagaaagcagcatcacaaatgatatgggctttagtgatgacttctctttacttgaaagccaagagagatgtgaggaggagcttcttcaattactgacacatattttgaattatgtaatgtgtaagggactagaaaagtctgatgatgatacttggattgaacgaggacaagtgttttcagcactaagtaaaccagggattatccagtgaactacttcgaccatcagatggaataaaactaactttgctacaaaagatgttagaatgggcaatctcagaaaacagagaagcaaaaactaatccagtaactgctgaaaacgccttccgactagtgctgatcatacaggactttcttcagtcagagggactagttaattcaaacatgtggaccgagaagcttttagaggatatgatgctgctctttgactgtctgtcagtctgctattctgaaagtccagtatgggtaaaactctctcaaattcagatccagttgcttctaggattcattggaaggggtaatttgcaggatatcataaactgcataggtgggttaaatgtactctttcctttattggaacaaatcagccactttagtgaaggacagattcctgaagaaaagaatgaaagcacagttcctgaatcagtaacacctgttgaaggagattggctcgtatggacttccacaaaggcctcagagtcaagactagagagaaacctagttgcaacatttatcttaattgtgaaacattttattcagagacatcctatcaaccagggcaatcttattcactcccatggagttgcaactcttggtgctttacttcagaaggtgccaagcaccttgatggatgttaatgtgttgatggcagttcagttactaattgaacaagtatcattagagaaaaatatgcagctcctgcaacaaatgtatcaatatttactctttgactttcgtatttggaaccgtggagattttccctttcgaatcggaatggttgtaaatataatgaactatctctag

SEQ ID NO: 12402 - DNA, 1298 bp, Homo sapiens
  SIMILAR (52)..(324): 341254mologous to Homo sapiens pancreatic ribonuclease,accession number X62946,Smith-Waterman Score=159.
gaacacttgcatgtggactaccctcagaatgacgttcccgttcctgcaaggtactgcaaccacatgatcatacaaagagttatcagggaacctgaccacacttgtaaaaaggagcatgtcttcatccatgagaggcctcgaaaaatcaatggtatttgcatttctcccaagaaggttgcttgccaaaacctttcggccattttctgctttcagagtgagacaaagttcaaaatgacagtctgtcagctcattgaaggcacaagataccctgcctgcaggtaccactattcccccacagaggggtttgttcttgtcacttgtgatgacttgaggccagatagtttccttggctatgttaaataactcaagatcagctcccgagtctgagatctcttctctcaatggcattggagctggctgtgcctgaagcagacctgaaccgtggacatgtggcaactgctcttgagcggaaggggaagccactgaagagattacactacatctgagatggagacctttcctctgctgctgttcaccctgggcctggatcttgcagaagcatcagaaagcacaatgaagataattatagaagaatttacagactaagagatgccctatgacatggcataaagtggccaagaaaaacagaccattgagatattaatgaacccgatcctgttagttaaaaataccagcctcagcatgtccaaggatgatatgtcttccacattactgaccttcagaagtttacattataatgaccccacgggaaacagtttgggtaatgacaaagagtgttgcaatgacatgacagtctggagaaaagtttcctaatcaaacggatcgcgcaagtggagcaataacttcattcgcagcttcaccaaagtgatgcgcaggggccacagggcccccagctgcgagttttgacagaaaccctggcataagctgctggggggagccctacaaatggaaaaataccgtggggccctttcaataaaaggcaaacaattccccaggtgccaataccatagtgttacctcattagagaagatattgacagtgctgacaggtcattctctgatgagctggttagtttgtggctctaagttgtaaatcccacagagctttaggactagggtcttactaaagaaggacctcttcttgttcattcttgtttaaacctttccttaatatctactctttagcactatagtgaactcctgattatttattctaactggaggagtgaaaaatccaaaattgtggataattcaattaaaagttatgactgataaaaa

SEQ ID NO: 12403 - DNA, 397 bp, Homo sapiens
  SIMILAR (351)..(259): 481254mologous to Chlamydophila pneumoniae AR39 hypothetical protein,accession number AE002191,Smith-Waterman Score=70.
acaggttggttccctaggaaagactctaagacaacgtttagcatgccaggatattaaggtgtgtcgttacaatcaacatctgaagaagggaggggaatgaggcaagaatgaacagagagagaaattaaggtgacatgcaggtcccattacagacttgcataacccctggggagctcagaacccaaaatggcccttcagagttgttccaagttgggtctagatggcttggcctttaatctaccacactgttctttgagtatgggcaccaaagtggctgaggcaatctctgatgggactgacagctgaaggatgtctgctgagagcactcccaagggctgaggcagttaagtcctttattgaaggtgcaactgagtagtgcatcacagtgtaaaccaca

SEQ ID NO: 12404 - DNA, 410 bp, Homo sapiens
  SIMILAR (3)..(404): 971254mologous to Homo sapiens Human secreted protein (clone CC332-33),accession number Y21591,Smith-Waterman Score=691.
ctcagcctcctgctgagaatgtgtttttcgttgctcacagctatggaggacttgcttttgttgaactgatgattcaacgagaagccgatgtaaaaaataaggtaactgctgtggcattgacagactctgttcacaatgtgtggcatcaagaagctggcaaaacgattcgagaatggatgagagagaactgttgtaattgggtctctagctcagaaccattagacacatcagtggagtccatgctacctgattgcccccgggtctcagcaggcaccgaccgtcacgagctaacttcctggaagagctttccgtctattttcaaattctttaccgaagcctcagaggccaagaccagctccctgaagccggctgtggcgcgccgctcccaccgcatcaagcacgaaggcgaa

SEQ ID NO: 12405 - DNA, 810 bp, Homo sapiens
  SIMILAR (373)..(489): 1001254mologous to Homo sapiens Human secreted protein (clone CC332-33),accession number Y21591,Smith-Waterman Score=205.
ttacaacttctggaaatcaaggacacacttagagaagtgcaaaatgcactggaaagtctcagcaatggaatcaaacaagcagaagaaagaacttcagagcttgaagacaaggctttcgaattaactcagtgtgtcaaagacagatttgaaagtaggatgttgattgtaacgacacaccttaatatcctgcatgctaaacgttgtcttagagtctttcctagggaaccaacctgtgataaaagactgccaaacccagagttgactgataagtcatctacagggcacacttgtaaccaggtgggcttggatagcacaggacagagtaccatgaaatggagaatatgcaggcagaagtgtaaagtgataggagagatgattcaacgagaagccgatgtaaaaaataaggtaactgctgtggcattgacagactctgttcacaatgtgtggcatcaagaagctggcaaaacgattcgagaatggatgagagagcttgctcactgtgatggaaaccagctgccaggttgtaagctgccctgtggagaggcccacatggcaaggaactggtatatcaggccaaaagccagggaggacctgaggtccaccaacagccatacagaacttgctactgagtgtaacttttcattccctgtgggattttgttctaacaaatttggcctaaatcagaaggaaattgtacatacattccccagcacatatccatttatcactaaagtatttattgacatttactgtgttccaggcactgttctggaagctggagacatagcagtgaacaagagctcatcatga

SEQ ID NO: 12406 - DNA, 375 bp, Homo sapiens
  SIMILAR (153)..(257): 521254mologous to Homo sapiens Human secreted protein, SEQ ID NO: 6536,accession number G02455,Smith-Waterman Score=91.
ttaaccatgtttataaatactttttcctaccttgcctaggtgagcttgttcaaattatcccatccaaattattcccagaagcgcacatcacatcctcaagggttaaaatgacaagaccaagaaggtatggcttccccttaattcaattaatagagagaaagaaagaggcccaaaaaaaaaggaaggaagggagaaaaagagggatggaggagggaggaagggagggaaggaggtggggaagggagggaaagaggaaggtgttgttgctccttcctggaactctcttcctgggcttacttcacccctcaggtctcaactgaaacagtacctcctccagaaaaccaattagttcttcttactgttcccatgactctt

SEQ ID NO: 12407 - DNA, 514 bp, Homo sapiens
  SIMILAR (14)..(226): 301254mologous to Petunia x hybrida ribosomal protein S19,accession number X57283,Smith-Waterman Score=81.
tcacaggttctcaagcttctggaagagttccatggctagaagtgatgctatccaacttaacactccaaaacgtgaagatattctactgaacatgaagatgtggtctgaatatccccctactccccagttctttgacagcctcatccaagaagaaggagagaatctgtctacaaagtgtgaagacagtgcttgggcttttggatgccttcgacttgagtttgaatctgagcactgtgtgatattctcctgtaaaagatgtcatgtctcaactgaaacagtacctcctccagaaaaccaattagttcttcttactgttcccatgactctttgcttctcctatgataactcttaccatgctttattggaattatttgttgcctttctttctttccaggctcccctgaagaacagaggagcactgaaggattggcagtatacttggaagagatttggagacttaaggagttatgaagactgtggtctggatatcgtgctactgataatttcagagtaa

SEQ ID NO: 12408 - DNA, 455 bp, Homo sapiens
  SIMILAR (1)..(5229): 1001254mologous to Homo sapiens AF-6,accession number AB011399,Smith-Waterman Score=9057.
ataattcggcacgagagcaaaaccagaaatgcacttgagcaggctttctatgtccttccttgcctcacccccattgggggcctgcatgatggtgagtggccacataaacagtccctacgtctccaagaattcccttggccatggctgctggaatgactcatccttctccatctgtagcctaggctttccccttctccttaatttccatgagggagcagtcttagatcagagcctccccaaggggacaggaccacagccctccctaaaaggtcctggatctggtataaatcttaccatgggagaaaacagaattcagttacagacaacatcaagggcaaacttgaaggggagcaaaaatcacaatatgggtgtgggaactggaccacagagttacagtggtcatttcctccccaccacatcttgtgaactttaccttgcccactgccccaaggggc

SEQ ID NO: 12409 - DNA, 546 bp, Homo sapiens
  SIMILAR (226)..(110): 381254mologous to Ovis sp. put. Z protein (aa 1-78),accession number X01610,Smith-Waterman Score=65.
atgactcttgatggaactctacagttgttgacacctggtgggccacctacagctgaagtaaaccttcagaggacaaaggggaaattttcacttggacctcacaaggacgaggttcaaccagggggagcaatgatgggtgctggaaggggaagtgatgggggtgggaggctattcccaagtaccacaggcccctctgggaaattaatgatggttggagaggaagccagctccacagtcaagctgggggcatttgaagagcccaagcagccctcattggagtttgggaatccatttggctctatggaatctgattctacctggggctccaggggtggaacatgtgacccagaccagcacatttggctccccagccatgtggttggccatggggcgctcctccccacaggacttgccaagtcctcatgcacgttgagtcaacattttggatatgagctcattacatgggaaaaagagtttaaacaccagctcaacatgcaagtgtactatgggctctttcctgtcaatgtttcagttcaaatttcctga

SEQ ID NO: 12410 - DNA, 1546 bp, Homo sapiens
  SIMILAR (94)..(1455): 1001254mologous to Homo sapiens A protein which binds to NE- dIg, designated nedasin,accession number Y30134,Smith-Waterman Score=2360.
cggcagccgcccgcagctgcagagagtcccgctgcgtctccgccgcgtgcgccctcctcgaccagcagacccgcgctgcgctccgccgctgacatgtgtgccgctcagatgccgcccctggcgcacatcttccgagggacgttcgtccactccacctggacctgccccatggaggtgctgcgggatcacctcctcggcgtgagcgacagcggcaaaatagtgtttttagaagaagcatctcaacaggaaaaactggccaaagaatggtgcttcaagccgtgtgaaataagagaactgagccaccatgagttcttcatgcctgggctggttgatacacacatccatgcctctcagtattcctttgctggaagtagcatagacctgccactcttggagtggctgaccaagtacacatttcctgcagaacacagattccagaacatcgactttgcagaagaagtatataccagagttgtcaggagaacactaaagaatggaacaaccacagcttgttactttgcaacaattcacactgactcatctctgctccttgccgacattacagataaatttggacagcgggcatttgtgggcaaagtttgcatggatttgaatgacacttttccagaatacaaggagaccactgaggaatcgatcaaggaaactgagagatttgtgtcagaaatgctccaaaagaactattctagagtgaagcccatagtgacaccacgtttttccctctcctgctctgagactttgatgggtgaactgggcaacattgctaaaacccgtgatttgcacattcagagccatataagtgaaaatcgtgatgaagttgaagctgtgaaaaacttataccccagttataaaaactacacatctgtgtatgataaaaacaatcttttgacaaataagacagtgatggcacacggctgctacctctctgcagaagaactgaacgtattccatgaacgaggagcatccatcgcacactgtcccaattctaatttatcgctcagcagtggatttctaaatgtgctagaagtcctgaaacatgaagtcaagatagggctgggtacagacgtggctggtggctattcatattccatgcttgatgcaatcagaagagcagtgatggtttccaatatccttttaattaataaggtaaatgagaaaagcctcaccctcaaagaagtcttcagactagctactcttggaggaagccaagccctggggctggatggtgagattggaaactttgaagtgggcaaggaatttgatgccatcctgatcaaccccaaagcatccgactctcccattgacctgttttatggggacttttttggtgatatttctgaggctgttatccagaagttcctctatctaggagatgatcgaaatattgaagaggtttatgtgggcggaaagcaggtggttccgttttccagctcagtgcattatctatacctggggccagattttctgcactttgaaatgttgcctttgcctaatgaaagaaacaattcacttaccagcctcctcaccc

SEQ ID NO: 12411 - DNA, 932 bp, Homo sapiens
  SIMILAR (516)..(809): 581254mologous to Homo sapiens guanine deaminase GDA,accession number AF095286,Smith-Waterman Score=240.
tgagcaaatcaaaatcagagagcgctgtctttctacgatgtggctcccaacccactgatggcctgtcctggatgccaggcacttgtttgggttggaagcggactgctccacagctgcaggcttttttgtggttagttgtggcccacaggatactggcagctggaggcagagcagtggtgccttttgaagccatggaagacctgctgattgccagcaaaatgtcttcccagccagttgttcctggagccgctgtgcagggctctggagatggacatgagagagctaaggttcgttcagaccccatgctcctttggcatgacactagctccaagaggattattaatgaactagacactggcatttggattcaggacccaaataagctgagagagtttgctggagtcactggacacatacgacatttgaattcaggggccaaggttcccatttgcctgtggctgtttggagccaccaatgggccagatgagaaatcagattcaaactccaggatgtttggtttgcaaaggggattaaaaagaaatcatgctggaaaaatgaaggaacgagggcacagagagattcgagttgtcacccaagctcacatagcaccagtgacagagatgaagaaactgacatctggagaagttgaagtaatttgcacaaagattcacttggctaccctggggctggatggtgagattggaaactttgaagtgggcaaggaatttgatgccatcctgatcaaccccaaagcatccgactctcccattgacctgttttatggggacttttttggtgatatttctgagatcagccctgaaagacaggaacctcccatatcatcattttatagatgtggaactgaagctcagccacaattaagtgacttgcccaaagccacacagccagtaaaggacaaggccaggacttaa

SEQ ID NO: 12412 - DNA, 366 bp, Homo sapiens
  SIMILAR (37)..(243): 451254mologous to Homo sapiens similar to calmodulin; similar to P24044 (PID:g115520),accession number AC004882,Smith-Waterman Score=147.
atgattgtgagccctccccagccatgtggaacgtttgacatgcaaaggataactctggaagagttgaagcacattctctatcatgccttccgagaccacctaacgatgaaggacattgagaacatcattatcaatgaggaagagagcctgaatgagacctcggggaactgccaaacagagtttgaaggaggctctctgaggtctgcgtgtgattggatgtgtggttttgtgctgtttgccttctcttggttgtggctgcatggggcggtgcaaagagcctattttggctgtccggcaaacttgggtcgagtccgttgtgtgaccttgggcaaaggatggaccttctctgtgtttcctcatctataa

SEQ ID NO: 12413 - DNA, 354 bp, Homo sapiens
  SIMILAR (37)..(351): 581254mologous to Homo sapiens similar to calmodulin; similar to P24044 (PID:g115520),accession number AC004882,Smith-Waterman Score=272.
atgattgtgagccctccccagccatgtggaacgtttgacatgcaaaggataactctggaagagttgaagcacattctctatcatgccttccgagaccacctaacgatgaaggacattgagaacatcattatcaatgaggaagagagcctgaatgagacctcggggaactgccaaacagagtttgaaggaggaatttctttcctgctgctctcattagagcaaacagtgcattcccagaagcagaacagacagacctgcgtccggaagagcctcatatgcgcctttgctatggccttcatcatcagtgtcatgctgattgcagccaaccagatactccggagcggcatggagtag

SEQ ID NO: 12414 - DNA, 416 bp, Homo sapiens
  SIMILAR (128)..(328): 401254mologous to Mus musculus histone stem-loop binding protein,accession number U75680,Smith-Waterman Score=83.
gtgtggggagcagcccactcacagagtgctgcctcccagcttctctcccagtgtgcagcaggaccaccctccctcccccaggcaggagcagaacactcctcttgggggaaaacccggaaggagatggcccagtagaccacccacaggaggccaccgtcgctgagcctgatgggcacccagaagcccccacgcagctcgaggctctctgggccgtgtcaccagacatcaaggatcagcagacaatgcagaagagcctgacgtgggtgggcaagagacccagaccaaggagcagagacaggtgatgtggagggggcagaggccacgcaacgagaagacttccagagctgtcactaacatcctcaccgcatagacggcctggcggaaacaagaaccgcatgcgcctttaaaagacgaaa

SEQ ID NO: 12415 - DNA, 1881 bp, Homo sapiens
  SIMILAR (870)..(1106): 361254mologous to Muntiacus muntjak prion protein,accession number AF113944,Smith-Waterman Score=81.
atgacctacaagtaccaggcaggacatatgttcctagagaggagacctaaacatgtttgcaggctggggaagcatgtgaggtacacagagctacaggtggaccacatggtgttggggccgcagagaaatgcagcatccaatggatgggacgttggtgccaggcagcctggagtggaggaaggcaggagcagaacactcctcttgggggaaaacccggaaggagatggcccagtagaccacccacaggaggccaccgtcgctgagcctgatgggcacccagaagcccccacgcagctcgaggctctctgggccgtgtcaccagacatcaaggatcagcagacaatgcagaagagcctgacgtggagatggccatccatccacatgaccatgtggctttcaaagaacctggaaaaacacacctgttccaagtggaacaagcactatctgcctgttcatgtgggcataaccaccccacctgtggggactgcttggttctccagccttccacacatccagtgcccacgatatgcccatataccatatactgttaagtgcttggggattaccttattcttgggcccctggaggcttgcaggtgtccagctgtcctttcgcagtagacacatggtggtctcaggagctaacatcggcccttctacaagccagggggacaccaaacacttgcctgtcaatcgagctccactcagctgggttcagacaagctcaggggctaccccaggctcagcagtgccgactatagccttgtgcagttactgctgcacacaccccgaggccgagaatccagcggccgccgccaagcagggctgggaaatgcctgcaggcaagaagccaggacagggtcctcagcccctctcagcaagtggggagagagtcaaacagctggtagtggccagccaggacggtccccacatcactggcagggaggagggggcacatcaagcctgtataaaaatgtggctcctgaagcccccaaacatcgacccctcggtgctggctgggctggctgggcgcctcgtgcaggcgcagctgggcagccgtggggaacagttggaagccagctaccatgtcttgagcatgctcaatggcccatggagacctctagtcaacagccacctgggtaatgctggaagcagacctccagccccagtcaagccttcagatgcctgcagccctggccagaaactcacctctagtgaggaagatgtgcagaaaacagcagcaggagacagtgcagcccctgtgggcttaggaaagcctcttccagaaatggcctatgtgccacacccagagtctcagctagtcggggctctttacatgatgggatcattgaggctttatttgtgcctttggttgttgctgcacttcctcactgacctttatgaccggacagcaggtacttgtaggaaccccagagactccccctggcttctggaccttccttctgccttggtgtatagcagcacccagcttccccttggtaatcagggtggaccaccccggatgagagggcactcaaggcagcaggaacagcacgtttcagggtatggagcagtaaaaggcatgcacctttgggtcgtgggacactgctatattgccgaagggatctcagggtacactgggacctgctccgagcagctccctcaggcgtcagagcagaactgggcagctgaaggcccctgtggagacagcggcagtccgtccacccagataagggtagcgtttgagtccagctgctgcacctgtggccctaatctcaacacatgccgccagttgcagacctggggaacaatgccagtgcagcaggagaatgtcaccaaatgcctgcttcatgacagaggaggtcctgaggagctgagttag

SEQ ID NO: 12416 - DNA, 816 bp, Homo sapiens
  SIMILAR (48)..(191): 461254mologous to Homo sapiens Polyproline-rich domain from dynamin,accession number Y56033,Smith-Waterman Score=89.
tcacatggggatggtggtgctgactgtgggcattcgtcctgtcttcggggcatgctggcgctgctcctctggtgccccctgccctgcctgccgcaggggcacaggcagctgtaagtagaggtggaggtgccccaagacaaaagggagccccccacagggtgccttctggttacagaaggggtccgccaggatctctgcctgcagctgtgcgacacctggactggccattttctcccccttagcttttgtgggcagagattccaggtgcaacacaggccgcagttgaccctctgcagaaaagccttcctttgagcccctcggtgtcttcagttgtgagcaggcatgtccgtagagcctctcagtacctggcccttcaccccagccagatctaggccgcaaggctgctggaccttctaggtggacaggcactagccccttcaggggtattcccaccgtgcactggagccctgggcagcccaaggagtccattccagccctgctgcctagatccttcctagaaatagcagaggcagcaatagcttttttcccattctgctgcccaatggagtatctgccattggacagacccaaagagagccagggtccaggtgacgcttccaactgctctccactgtccgcaatagcctcgagctgcgtgggggcttctgggtgcccatcaggctcagcgacggtggcctcctgtgggtggtctactgggccatctccttccgggttttcccccaagaggagtgttctgctcctgcctgcaggtgttaattccaattcaatgcaaatatccttttcaatccggtccat

SEQ ID NO: 12417 - DNA, 3561 bp, Homo sapiens
  SIMILAR (3220)..(5475): 841254mologous to Homo sapiens dJ470B24.1.5 (myeloid/lymphoid or mixed-lineage leukemia (trithorax (Drosophila) homolog); translocated to, 4 (AF-6) (isoform 5)),accession number AL049698,Smith-Waterman Score=3204.
atgcctctggtgctgttgatggagtggcctgaagccaccaactttgcctgcctgatcgcggggtactgccgcctcttgctggattccaggaagatggtcttctccaggcctgccagccagccacttccacctccaatgatcaaggcagattacatgcacagcgcccaccgccctgtcactgggggccacctggggaaaaaggagagtagttatgtgggcagcgtgggcaccagccccaggaaatcgagccgctgcacgcccccacctgccgactctgagcttgtcagcttctgctacctccatatgcgggaacaaaggaaggagcaggaaagccggacagatgtcaacgagaacctaatcttctttgaggagaccaggccccgaaccaagtctgaccccacatccaaaagctctggccaaggttatgaggtagtccctgatgactttgatgcagctagcctagaccacgagccttgtgccagcagggcccggtcctacaccttggacaattcccttggggctgaagccctgaatttctactgtgactcttgcaaagccaaacttcaggagcagctgggccctcgcaaaggtgggaagcctggctcctctcgtgacaatatagtagatttgatgtccctcccaccacctgggagtgaggaggaggaggaggaggaagatgagacaacttctctgttgccagccattgctgccccaccccctggtttccgagacaacagctctgatgaggatgaccccaagcgccgggctgtccagagccaggaacaaggacgccacctgcgtgggcttctgtacgatgagattccagtgacattgattgacagtgtgcagacccggacagttcgagatcatgcccaggagctagatgatgccctggtgtccactctgcaggctctagaagccctggctgcatccgaggatggaccacacccaccacccccacagactgcaggtctgattgtgctggccacaatcactcctgaatcatcgctggactcaggtcatgaaaccaactcttcagagctcacagacatgtcagagatgatgtcggccatgaagcagcaccagaacaccacctacttcctggcccagcacctcaacaaggacagcctccttgcccgcaaggacctgcccttccggatccagagctgtgcagcccaggccgttcttacggccccttactctcttgggcgcccggatcccaacccatctctccaacccattgccacaggccagagtcctggcccccctggcgctcggaggaagctgccccagtcagagggccaggtacagggagaacgaacatactccttggcagtgcacccagcactgtccccacagcttagtgaacagaagaatctgagtctgctgtccccagttcctgaggacaaagggcctggccacactagggcaggcctagaaatgtcactgagggcagccacatcatccctcagtgaagagcaggtctctgagctgagggacaacctgcccaaggaggtcaggttgagccccaagcttatcctcgacccaaagagcagtgtgacccctgccatcatctcggccgccctacagcaagtggttcacaataagagtctagtcactgctggtggggctttggggaacccccccagcaggggtgagagaaggctggaggccagcatggggaggccagaggttagcatgatgagcagcagtgccagtaagaatctgaagttcaaaattagccccagtgctccagagacctcatggaattctcaacatcagctgggtgcagaggtctcttccagccccagagcacccacaggcagccgggctgacagcctgcacctctcccaacaagaggacagtctgcctgttcaaaatttccctcccaaaagctatcttttgcgaacaagccgagagtcagtgggcaagcaagctacaggggaggtggcaggcaaaggcgggccagtgggtggtaagcccaccctgcagaagcagggcaccatctccagccaaggggagaaggcgcagctggagagcacacccaaaagaagcaagctcgaagagaccagcctggttccccgagctacctaccccatggctctgcagagccccagctgccagtcaagaagccacagccccagctgccagcctcatggccacagccccagcagccagtctcgaggtcagagccccagctgccaacctcgaggccagagcccactgaggtctcaggctgccagccggcaggtgagcaccatgccctctaggaagcttgaaacaactctcaatggagcccactcgacctctgaaggccctgccaaacccaagtcatcccgaggtcctttccggctacgcaatttattctctgccaccttcccaacccgccagaagaaggagacagatgagcggcaggcccaactgcagaaggtaaagcagtatgaactggagttccttgaggaacttctaaagccaccaagccagggggagctgccaggcaccgagtacctgcaacctccagcacctggccgctgcagctgccagctccgcagcagccctgtgcagcaggggcctggcatgtcccgtgagcagaggcgcagctgtgactgcaagcgcatctgccgggggggccggccacaagccacccagacaccagtgcccagcctccgggggagggaaagggacagagtcctccctagccagaggcagccagaggctggcccaggcgtgagcctcagcagccccatcaatgtccagcgcattcgttctaccagcctggagtcccgagagtgccgatcggaccctgagagtggtgtttcgtgcctgaccacgtgtgcctcggggggcgagtgtctgggagctcccaattacaggaaactgatgcgccgctacagtatcagtgagctggaccagggtgacagggcctcgctgacctcggatgtctacccacatcctcccctgggcatgctgcccagggaggccaaggaggtagaggcaagcctccccatagccttgggtcccaaaagcaggtctctggagtcaccgacgctgggagacccctcctacgtccaggttgccccagagaccaaaggccccagacagatggccgtgttctcactgcccgaggaggtgtaccggaagcctgccgagctagacgaggacagtgagagcagcaagtgctgctccatccgctactgcttctactaccgcaagtgtgacatggcagatgatgccagtgatggcaaggatgagctctcctactctatccaccatgaagatcctgcctggcatgaagctggacgagcaggtacatacctagaagtggaactgctgaatcgtaagggtgacgaggagacctctaacaattgcttcttccgcttcactcactccatcatcacctacctagactttgggttatcagatattgcactacccccaaatctcaatgcccaatatcccactctctacgacaccatccattcttccagtttacctccacaagggctcccactgcaggaagcatctgaacgcgtcatgatcacctattcacttcccacttga

SEQ ID NO: 12418 - DNA, 663 bp, Homo sapiens
  SIMILAR (5)..(400): 241254mologous to Dictyostelium discoideum polyprotein,accession number AF298209,Smith-Waterman Score=104.
ccataattccttgaaatcagatgaaaataaagagaattcattttcagcagaccatgtgactactgcagttgagaaatccaaggaaagtcaagtgactgctgatgaccttgaagaagaaaaggcaaaagcggaactgattatggatgatgacagaacagttgatccactactatctaaatctcagagtatcttaatatctaccagtgcaacagcatcttcaaagaaaacaattgaagatagaaatataaagaataaaaagtcaacaaataatagagcatccagtgcatctgccagattaatgacctctgagtttttgaagaaatctagttctaaaaggagaactccatcgacaactacctcttctcactatttagggactttaaaagtcttggaccaaaaacctttcacagaaacagaggcataggaacctgatagagcagataacataaggggcagctgtttattcaggagtggttaggaaaagaaaaatgtatatttacatgaaatgcacagaataaaaagaattgaaagtgaaaacttaaggatccaaaatgaacagaaaaaagctgctaaaagagaagaagcattagcatcatttgaggcctggaaggctaaaaagccaagcaagcaaagaaaatagctgccaaaaaagaacttgaagaa

SEQ ID NO: 12419 - DNA, 1050 bp, Homo sapiens
  SIMILAR (4)..(765): 231254mologous to Caenorhabditis elegans coded for by C. elegans cDNA yk61e11.3; coded for by C. elegans cDNA yk69a7.5; coded for by C. elegans cDNA yk61e11.5,accession number U41510,Smith-Waterman Score=118.
atggaggagaaggatggactagaagataaagaaactgccctcagtgaagaattggagttacattctgcaccttcttcccttccaacgccgaatggcatacaattagaagctgagaaaaaagcattctctgaaaaccttgatcctgagattaacagctccaaagaatccaatagtgaattgagtgattttaagcccatgttacctcaaaacaaattccaaaaaaatggtcataatgaaaccaacagaattaagacttttcacagtaaagattcaggtttagctgcaaggtggacgttggtagaactgaaagttggtgatcccattccaaaatgtgatccaaatgaagaaatcactgaaaaccataattccttgaaatcagatgaaaataaagagaattcattttcagcagaccatgtgactactgcagttgagaaatccaaggaaagtcaagtgactgctgatgaccttgaagaagaaaaggcaaaagcggaactgattatggatgatgacagaacagttgatccactactatctaaatctcagagtatcttaatatctaccagtgcaacagcatcttcaaagaaaacaattgaagatagaaatataaagaataaaaagtcaacaaataatagagcatccagtgcatctgccagccacgtcaaagaattggtgtggcggctgaccgcggcaagtggtagagacacggaccgagggcaagaaaaagctgtaggctttattgagcagagtgaaagtacaaagattccacagcctggtcccgaacgggtagccagagttagattatacgattgccttttaaactctttaagcaacgtgcctaatattgcaattgaatgtcttattgaagattcaatggctgcattgatcagggcagggtgctcgcctacaagaggcaatgcatgccgtgaaccagttctgctatctatggctgattctcccagaggaggacagggcactagagtggctgcctcctctgttactgataaattaattaacaacctgggagacttcaatgatttggaaggatcctaa

SEQ ID NO: 12420 - DNA, 1982 bp, Homo sapiens
  SIMILAR (1306)..(2307): 1001254mologous to Homo sapiens dJ470B24.1.5 (myeloid/lymphoid or mixed-lineage leukemia (trithorax (Drosophila) homolog); translocated to, 4 (AF-6) (isoform 5)),accession number AL049698,Smith-Waterman Score=1724.
atgtttctttcaaagccttctgtgtacatctgtcttttcacctgtgtcctccaactcagccacagctggtcggtgaacaatttcctgatgactggtccaaaggcttacctgatttactccagcagtgtggcagctggtgcccagagtggtattgaagaatgcaagtatcagtttgcctgggaccgctggaactgccctgagagagccctgcagctgtccagccatggtgggcttcgcagtgccaatcgggagacagcatttgtgcatgccatcagttctgctggagtcatgtacaccctgactagaaactgcagccttggagattttgataactgtggctgtgatgactcccgcaacgggcaactggggggacaaggctggctgtggggaggctgcagtgacaatgtgggcttcggagaggcgatttccaagcagtttgtcgatgccctggaaacaggacaggatgcacgggcagccatgaacctgcacaacaacgaggctggccgcaaggcggtgaagggcaccatgaaacgcacgtgtaagtgccatggcgtgtctggcagctgcaccacgcagacctgttggctgcagctgcccgagttccgcgaggtgggcgcgcacctgaaggagaagtaccacgcagcactcaaggtggacctgctgcagggtgctggcaacagcgcggccgcccgcggcgccatcgccgacacctttcgctccatctctacccgggagctggtgcacctggaggactccccggactactgcctggagaacaaaacgctagggctgctgggcaccgaaggccgagagtgcctaaggcgcgggcgggccctgggtcgctgggaactccgcagctgccgccggctctgcggggactgcgggctggcggtggaggagcgccgggccgagaccgtgtccagctgcaactgcaagttccactggtgctgtgcagtccgctgcgagcagtgccgccggagggtcaccaagtacttctgtagccgcgcagagcggccgcgggggggcgctgcgcacaaacccgggagaaaaccctaagggtttcctctgccccctccttttcccactggttcttggcttcctttagagaccccggtaattgtggaacctagggaatggggaacccgctctcccagacctagggatcctgaaagggaaaaactgcaatttctccaaagcttgccactttccagcctgtttccccaattcctctgtgctctcctaaagctctgtctgaatcctcgcagccacacctaggtctgaaaactcaggctttgagttactgatcttccttggattaggaaaacaggtgttcctcctcccctctcctatcagccctaatctctgacctagcctatcaacccttaggcgctggaaaaaccttctcatacacgcaggacccaggttaactcaaagctttgcccttttgcccactgtctgctaccaggggctcaccctctgctgcacctctcttctgcacagctcctcccctgctactgctgaccaaattcccaggaatcttgaatgctttctctcctcttctccctttcctttcccaaaaaaaactgaggaaactggccccggaaaagcatgtctttggggttggttcctagaggcagaggttgaagatggaagagggagctctggagtgctaacttgaacaccaagggtgctactcatccctatggtatcatatcatgaatggactttactagtggggcaatgactttcctagacaataacccgagggactccagatacataccccgaaggtctaggaaatacgttaagggcagattacagtcatttcctaccctttaaaggtaacttctcccttctcctgacctacttcctcctagcaaccaactttacctcttcttctccaaaggatctttgttcctctgagccaagactgaggtaaataaagccactttcctcttcagatcctggtctgcacctctaga

SEQ ID NO: 12421 - DNA, 613 bp, Homo sapiens
  SIMILAR (3)..(431): 1001254mologous to Homo sapiens dJ71L16.5 (KIAA0267 LIKE putative Na(+)/H(+) exchanger),accession number AL022165,Smith- Waterman Score=744.
ttttttttttttttttaaagatatgtcgttcatttattctgaatcttatattgatagataataccagaagatttcagcatagcagataaaatacagcaaatcctaaccagcacaggttttagtgacaaacgggcccgttccatggacatagatgacttcatcaggtaattacatttttgttttcctaagtgtttacatttctttactgtgacaccttcagaatttttgggggatgattttaaaggcttttaagcggtataaggaatctattcggtggttagaagatgaaaaggccctcttagagatgactgaagaagtagattatgatgtcgattcatatgctacacaacttgaagctattcttgagcaaaaaatagacattttaactgaactgcgggaaaacgagaccctggttccaaagacaacaaagacaaacaaaacacacaaagattgcggggcaagggggggcgcgaaccagaaaacgacagaggggaaagctatccacagcgagaagcgagcaccaaacaagagcgcgacatacacggcgaaagaagaacacaacaagacagggcaggagcgacgcgaaccagagaaataccgcgaaagcgagtaa

SEQ ID NO: 12422 - DNA, 223 bp, Homo sapiens
  SIMILAR (2)..(139): 1001254mologous to Homo sapiens pemphigus vulgaris antigen,accession number M76482,Smith-Waterman Score=231.
atatgtcatgggacgtaacgatggtggatacctaatgattgattcaaaaactgctgaaatcaaatttgtcaaaaatatgaaccgagattctactttcatagttaacaaaacaatcacagctgaggttctggccatagatgcgttattcaggaaagaactgcttattaataagttggtcctacatatgcggatgacttccaaactgactacttacttcaaaagg

SEQ ID NO: 12423 - DNA, 429 bp, Homo sapiens
  SIMILAR (139)..(429): 971254mologous to Homo sapiens pemphigus vulgaris antigen,accession number M76482,Smith-Waterman Score=489.
atcacatgtcgggctctaaatgcccaaggactagatgtagagaaaccacttatactaacggttaaaattttggatattaatgataatcctccagtattttcacaacaaattttcatgggtgaaattgaagaaaatagtgcctcaaaagtttgtacaaatacgtatgccagaggcacagcggtggaaggcacttcaggaatggaaatgaccactaagcttggagcagccactgaatctggaggtgctgcaggctttgcaacagggacagtgtcaggagctgcttcaggattcggagcagccactggagttggcatctgttcctcagggcagtctggaaccatgagaacaaggcattccactggaggaaccaataaggactacgctgatggggcgataagcatgaattttctggactcctacttttctcag

SEQ ID NO: 12424 - DNA, 503 bp, Homo sapiens
  SIMILAR (1)..(456): 891254mologous to Homo sapiens pemphigus vulgaris antigen,accession number M76482,Smith-Waterman Score=705.
aaagcatttgcctgtgcggaggaagacgatggccaggaagcaaatgactgcttgttgatctatgataatgaaggcgcagatgccactggttctcctgtgggctccgtgggttgttgcagttttattgctgatgacctggatgacagcttcttggactcacttggacccaaatttaaaaaacttgcagagataagccttggtgttgatggtgaaggcaaagaagttcagccaccctctaaagacagcggttatgggattgaatcctgtggccatcccatagaagtccagcagacaggatttgttaagtgccagactttgtcaggaagtcaaggagcttctgctttgtccacctctgggtctgtccagccagctgtttccatccctgaccctctgcagcatggctttgatccacttctcacacaaaatgtgatagtgacagaaagggtgatctgtcccatttccagtgttcctggcaacctagctggcccaacgcagctacgagg

SEQ ID NO: 12425 - DNA, 825 bp, Homo sapiens
  SIMILAR (160)..(777): 691254mologous to Bos taurus desmoglein,accession number X58466,Smith-Waterman Score=792.
atggcactacaaaatggcaaacagtcagaagacaaaagcgggagtggatcaagtttgccgcagcctgtcgagaaggagaggacaactcgaagaggaaccccattgccaaataaagtgatctgcagaattccctccttccagctttatattaaaaacataattcgatcagactgcgaatcgaaccagaagataacataccggatttctggagtagggattgatcgaccaccatatggggtattcaccattaatcctcgcactggggaaattaacatcacttcagtggtagacagagaaataactccacttttcttgatctattgccgggctctgaattcacggggtgaagatttagaaaggcctcttgagcttagagtcaaagttatggacataaatgataacgctccagtcttttcgcaaagtgtatacacagccagcattgaagaaaatagtgatgccaatacattggtagtaaagttatgtgccacagatgcagatgaagaaaatcatctgaattctaaaattgcctacaagatcgtctctcaggagccatcaggtgcacccatgttcattctgaataggtacactggagaagtctgcaccatgtccagtttcttggacagagagcaacacagtatgtacaacctggttgtgagaggctcagatcgggatggagctgcagatggactgtcttctgagtgtgactgtagaatcaaggttttagacgtcaacgataatttccccaccttagagaaaacttcaagcaaaatagctctaggttcagtaattcactcctatcctcttttgaccagtggaggaagttga

SEQ ID NO: 12426 - DNA, 4285 bp, Homo sapiens
  SIMILAR (151)..(3429): 911254mologous to Homo sapiens putative p150,accession number U93563,Smith-Waterman Score=5217.
atgctggattatgaacaagcacctaacattcagcttagtatcggagttaaaaaccaagctgattttcactactccgttgcttctcaattccaaatgcacccaacccctgtgagaattcaagttgttgatgtgagagaaggacctgcatttcatccaagtactatggcttttagtgtgcgggaaggaataaaaggaagttccttattgaattatgtgcttggcacatatacagccatagatttggacacaggaaaccctgcaacagatgtcagatatatcatagggcatgatgcaggcagctggttaaaaattgattcaagaactggtgagatacaattttctagagaatttgataagaagtcaaaatatattatcaatgggatatacacagcagagatcctggctatagatgatggctctggaaaaacagctacaggaaccatatgtattgaggttcctgatatcaatgattattgtccaaacatttttcctgaaagaagaaccatctgcattgactctccatcagtccttatctctgttaatgaacattcttatgggtctccgtttactttctgtgttgttgatgagccaccaggaatagctgacatgtgggatgtcagatcaacaaatgctacctcggcaatccttacggctaagcaggttttatctccaggattttatgaaatcccaatcctggtgaaggacagctataacagagcatgtgaattggcacaaatggtgcagttatatgcctgtgattgcgatgacaaccacatgtgcctggactctggtgccgcgggcatctacacagaggacataactggtgacacgtatgggcctgtcactgaagaccaagctggagtttcaaatgttggtcttggaccagcagggattggcatgatggttctgggcatcctgctactgatttcagagacgctgcagagggcttttcttagacatcaactgcagacggctggcaggatagaagcagcggctcacttggactttttcaccagggaaatcagagacaatgatggggctcttccccagaactacaggggctctggccatcttcgtggtggtcatattggttcatggagaattgcgaatagagactaaaggtcaatatgatgaagaagagatgactatgcaacaagctaaaagaaggcaaaaacgtgaatgggtgaaatttgccaaaccctgcagagaaggagaagataactcaaaaagaaacccaattgccaagattacttcagattaccaagcaacccagaaaatcacctaccgaatctctggagtgggaatcgatcagccgccttttggaatctttgttgttgacaaaaacactggagatattaacataacagctatagtcgaccgggaggaaactccaagcttcctgatcacatgtcgggctctaaatgcccaaggactagatgtagagaaaccacttatactaacggttaaaattttggatattaatgataatcctccagtattttcacaacaaattttcatgggtgaaattgaagaaaatagtgcctcaaactcactggtgatgatactaaatgccacagatgcagatgaaccaaaccacttgaattctaaaattgccttcaaaattgtctctcaggaaccagcaggcacacccatgttcctcctaagcagaaacactggggaagtccgtactttgaccaattctcttgaccgagagcaagctagcagctatcgtctggttgtgagtggtgcagacaaagatggagaaggactatcaactcaatgtgaatgtaatattaaagtgaaagatgtcaacgataacttcccaatgtttagagactctcagtattcagcacgtattgaagaaaatattttaagttctgaattacttcgatttcaagtaacagatttggatgaagagtacacagataattggcttgcagtatatttctttacctctgggaatgaaggaaattggtttgaaatacaaacgtgatcctagaactaatgaaggcatcctgaaagtggtgaaggctctagattatgaacaactacaaagcgtgaaacttagtattgctgtcaaaaacaaagctgaatttcaccaatcagttatctctcgataccgagttcagtcaaccccagtcacaattcaggtaataaatgtaagagaaggaattgcattcccgtcctgcttccaagacatttactgtgcaaaaaggcataagtagcaaaaaattggtggattatatcctgggaacatatcaagccatcgatgaggacactaacaaagctgcctcaaatgtcaaatatgtcatgggacgtaacgatggtggatacctaatgattgattcaaaaactgctgaaatcaaatttgtcaaaaatatgaaccgagattctactttcatagttaacaaaacaatcacagctgaggttctggccatagatgaatacacgggtaaaacttctacaggcacggtatatgttagagtacccgatttcaatgacaattgtccaacagctgtcctcgaaaaagatgcagtttgcagttcttcaccttccgtggttgtctccgctagaacactgaataatagatacactggcccctatacatttgcactggaagatcaacctgtaaagttgcctgccgtatggagtatcacaaccctcaatgctacctcggccctcctcagagcccaggaacagatacctcctggagtataccacatctccctggtacttacagacagtcagaacaatcggtgtgagatgccacgcagcttgacactggaagtctgtcagtgtgacaacaggggcatctgtggaacttcttacccaaccacaagccctgggaccaggtatggcaggccgcactcagggaggctggggcctgccgccatcggcctgctgctccttggtctcctgctgctgctgttggccccccttctgctgttgacctgtgactgtggggcaggttctactgggggagtgacaggtggttttatcccagttcctgatggctcagaaggaacaattcatcagtggggaattgaaggagcccatcctgaagacaaggaaatcacaaatatttgtgtgcctcctgtaacagccaatggagccgatttcatggaaagttctgaagtttgtacaaatacgtatgccagaggcacagcggtggaaggcacttcaggaatggaaatgaccactaagcttggagcagccactgaatctggaggtgctgcaggctttgcaacagggacagtgtcaggagctgcttcaggattcggagcagccactggagttggcatctgttcctcagggcagtctggaaccatgagaacaaggcattccactggaggaaccaataaggactacgctgatggggcgataagcatgaattttctggactcctacttttctcagaaagcatttgcctgtgcggaggaagacgatggccaggaagcaaatgactgcttgttgatctatgataatgaaggcgcagatgccactggttctcctgtgggctccgtgggttgttgcagttttattgctgatgacctggatgacagcttcttggactcacttggacccaaatttaaaaaacttgcagagataagccttggtgttgatggtgaaggcaaagaagttcagccaccctctaaagacagcggttatgggattgaatcctgtggccatcccatagaagtccagcagacaggatttgttaagtgccagactttgtcaggaagtcaaggagcttctgctttgtccgcctctgggtctgtccagccagctgtttccatccctgaccctctgcagcatggtaactatttagtaacggagacttactcggcttctggttccctcgtgcaaccttccactgcaggctttgatccacttctcacacaaaatgtgatagtgacagaaagggtgatctgtcccatttccagtgttcctggcaacctagctggcccaacgcagctacgagggtcacatactatgctctgtacagaggatccttgctcccgtctaatatgaccagaatgagctggaataccacactgaccaaatctggatctttggactaaagtattcaaaatagcatagcaaagctcactgtattgggctaataatttggcacttattagcttctctcataaactgatcacgattataaattaaatgtttgggttcataccccaaaagcaatatgttgtcactcctaattctcaagtactattcaaattgtagtaaatcttaaagtttttcaaaaccctaaaatcatattcgc

SEQ ID NO: 12427 - DNA, 3669 bp, Homo sapiens
  SIMILAR (309)..(1): 891254mologous to Homo sapiens Protein cognate of protein kinase C-theta (clone 3-1 product),accession number W15776,Smith- Waterman Score=471.
atgaagcaagttcagggcatgatgctggattatgaacaagcacctaacattcagcttagtatcggagttaaaaaccaagctgattttcactactccgttgcttctcaattccaaatgcacccaacccctgtgagaattcaagttgttgatgtgagagaaggacctgcatttcatccaagtactatggcttttagtgtgcgggaaggaataaaaggaagttccttattgaattatgtgcttggcacatatacagccatagatttggacacaggaaaccctgcaacagatgtcagatatatcatagggcatgatgcaggcagctggttaaaaattgattcaagaactggtgagatacaattttctagagaatttgataagaagtcaaaatatattatcaatgggatatacacagcagagatcctggctatagatgatggctctggaaaaacagctacaggaaccatatgtattgaggttcctgatatcaatgattattgtccaaacatttttcctgaaagaagaaccatctgcattgactctccatcagtccttatctctgttaatgaacattcttatgggtctccgtttactttctgtgttgttgatgagccaccaggaatagctgacatgtgggatgtcagatcaacaaatgattatgaacaactacaaagcgtgaaacttagtattgctgtcaaaaacaaagctgaatttcaccaatcagttatctctcgataccgagttcagtcaaccccagtcacaattcaggtaataaatgtaagagaaggaattgcattccgtcctgcttccaagacatttactgtgcaaaaaggcataagtagcaaaaaattggtggattatatcctgggaacatatcaagccatcgatgaggacactaacaaagctgcctcaaatgtcaaatatgtcatgggacgtaacgatggtggatacctaatgattgattcaaaaactgctgaaatcaaatttgtcaaaaatatgaaccgagattctactttcatagttaacaaaacaatcacagctgaggttctggccatagatgaatacacgggtaaaacttctacaggcacggtatatgttagagtacccgatttcaatgacaattgtccaacagctgtcctcgaaaaagatgcagtttgcagttcttcaccttccgtggttgtctccgctagaacactgaataatagatacactggcccctatacatttgcactggaagatcaacctgtaaagttgcctgccgtatggagtatcacaaccctcaatgctacctcggccctcctcagagcccaggaacagatacctcctggagtataccacatctccctggtacttacagacagtcagaacaatcggtgtgagatgccacgcagcttgacactggaagtctgtcagtgtgacaacaggggcatctgtggaacttcttacccaaccacaagccctgggaccaggtatggcaggccgcactcagggaggctggggcctgccgccatcggcctgctgctccttggtctcctgctgctgctgttggccccccttctgctgttgacctgtgactgtggggcaggttctactgggggagtgacaggtggttttatcccagttcctgatggctcagaaggaacaattcatcagtggggaattgaaggagcccatcctgaagacaaggaaatcacaaatatttgtgtgcctcctgtaacagccaatggagccgatttcatggaaagttctgaagtttgtacaaatacgtatgccagaggcacagcggtggaaggcacttcaggaatggaaatgaccactaagcttggagcagccactgaatctggaggtgctgcaggctttgcaacagggacagtgtcaggagctgcttcaggattcggagcagccactggagttggcatctgttcctcagggcagtctggaaccatgagaacaaggcattccactggaggaaccaataaggactacgctgatggggcgataagcatgaattttctggactcctacttttctcagaaagcatttgcctgtgcggaggaagacgatggccaggaagcaaatgactgcttgttgatctatgataatgaaggcgcagatgccactggttctcctgtgggctccgtgggttgttgcagttttattgctgatgacctggatgacagcttcttggactcacttggacccaaatttaaaaaacttgcagagataagccttggtgttgatggtgaaggcaaagaagttcagccaccctctaaagacagcggttatgggattgaatcctgtggccatcccatagaagtccagcagacaggatttgttaagtgccagactttgtcaggaagtcaaggagcttctgctttgtccacctctgggtctgtccagccagctgtttccatccctgaccctctgcagcatggaagtcaggtgctagagcagctggagaagtgcaggcagcctgtgcttccacagatgggggtgctgctgcaacaaggctttcaatgtgcccatcttaagtgggagaagctagatcctgtgcagcagcctgcttacactaatgagggtgtggcagcctctcagagactcacaggtactttgtgtcagctacatctcaaccgcaaagagcactgtaaacaaagttctgactggctaaccagcaaaaggaaagaactgcttattaataagttggtcctacatatgcggatgacttccaaactgactacttacttcaaaagggtgaaggaatttgacattgaaaatggcactacaaaatggcaaacagtcagaagacaaaagcgggagtggatcaagtttgccgcagcctgtcgagaaggagaggacaactcgaagaggaaccccattgccaaaattcgatcagactgcgaatcgaaccagaagataacataccggatttctggagtagggattgatcgaccaccatatggggtattcaccattaatcctcgcactggggaaattaacatcacttcagtggtagacagagaaataactccacttttcttgatctattgccgggctctgaattcacggggtgaagatttagaaaggcctcttgagcttagagtcaaagttatggacataaatgataacgctccagtcttttcgcaaagtgtatacacagccagcattgaagaaaatagtgatgccaatacattggtagtaaagttatgtgccacagatgcagatgaagaaaatcatctgaattctaaaattgcctacaagatcgtctctcaggagccatcaggtgcacccatgttcattctgaataggtacactggagaagtctgcaccatgtccagtttcttggacagagagcaacacagtatgtacaacctggttgtgagaggctcagatcgggatggagctgcagatggactgtcttctgagtgtgactgtagaatcaaggttttagacgtcaacgataatttccccaccttagagaaaacttcatactcagccagtattgaagagaattgtttaagttcggaactgatacgattacaagcaattgatcttgatgaagaaggcactgataactggttggctcaatatttaattctctctggaaatgatgggaattggttcgatattcaaacagatccacaaaccaatgaagccactttgaaagttgtcaag

SEQ ID NO: 12428 - DNA, 597 bp, Homo sapiens
  SIMILAR (13)..(141): 971254mologous to Homo sapiens unnamed protein product,accession number AK000191,Smith-Waterman Score=203.
atgttctcactcactgataggctggatgtggatagcttgtttagcaacattgagtccgtgcatcagatatcagccaagctgctgtcattgttggaagaggccacaacagacgtggaaccggccatgcaagtaattggtcagtgcggaggtttgggggacacccagatgcaacagttggaagatcagaatgcaaatgttagaagtaataggaaagctgtccgctttggagaaaatgacaatggggaaatggtattttcaggatcaaggatacaccaatcctcacaagaaagaaaaaatcagcaggaagcagagctgtacggcagctctgctccacaaggtgctctgggatgcaacctccttccagctcacagctccactcaccaagaggtggctgttatcttcatggacaagattttctatgcagttcatgcttttcaagcacggagtgaccatgaactcagccttcaggaataccagagagttcatatactcaggttttgtgacctaagtggcaataaagagtggtggttagctgaagctcaagggcagaaaggatacgtgccagctaactaccttggaaagatgacttatgcttaa

SEQ ID NO: 12429 - DNA, 615 bp, Homo sapiens
  SIMILAR (67)..(660): 1001254mologous to Homo sapiens tumor endothelial marker 1 precursor,accession number AF279142,Smith-Waterman Score=1134.
atgaccacaaaagactgttgcaagggctacggaggttgtcagccaggaaccattgtcaaacaccaatataaatacgtctgtcacaaccctacactacctgatctcatcggagtagcaaggacagcacatggccctcatagtccccgcacggtccaggctgaaacactcggagtgcttcgtcactggacatcagcaggcgtggcagtgctgagtgcgtcggtcaggaggaagaagaagaaggaggaggaggagaaggagaaggaaaagaagaagaagaagaagacggaggaggaggaggaagaagaggaggaagaggaagaagagaggaggaagaaggagaagaagaaggagaggaagaaggaggaggaggaggagaaggaagaaagaactgtacatgaggcagcatttgctcacaggctggctgtgaggagcctgtggtcaaaaaaacctgcacgggggcggagcgcagaggctgtgtttgctgtttctgccacactggcatcctggagtatcctctcttatgggctacgtggacttaccattgaggcgttcacttgttcatttgtcaaggaccagagaagtgtgtgcatctcctgtccccgtgatggctcctga

SEQ ID NO: 12430 - DNA, 532 bp, Homo sapiens
  SIMILAR (20)..(238): 1001254mologous to synthetic construct lac repressor,accession number A14595,Smith-Waterman Score=349.
  misc_feature (1)...(532): n = a,t,c or g
ggattttgccgatttcggaaccaccatcaaacaggattttcgcctgctggggcaaaccagcgtggaccgcttgctgcaactctctcagggccaggcggtgaagggcaatcagctgttgcccgtctcactggtgaaaagaaaaaccaccctggcgcccaatacgcaaaccgcctctccccgcgcgttggccgattcattaatgcagctggcacgacaggtttcccgactggaaagcgggcantggtatcacggggccatcagcagaaccgacgccgagaacctgctccggctgtgcaaagaggccagctacctggtgcgcaacagtgagaccagcaagaatgacttctccctctccctcaatgccgcaagccaaaggcaacaatgtggttatcacaagggacatgacaaacacaggcttaaaaaggaaaaaaaggcaacatttgcgccaagcttcttaatgaacatcaaaggcaataaaacatccgttgtcaaaaacagcatcctggagcaaggacagcagacagtcaactaa

SEQ ID NO: 12431 - DNA, 794 bp, Homo sapiens
  SIMILAR (56)..(706): 951254mologous to Homo sapiens carbonic anhydrase V,accession number L19297,Smith-Waterman Score=1150.
  misc_feature (1)...(794): n = a,t,c or g
ctggtatcacggggccatcagccgaaccgacgccgagaacctgctccggctgtgcaaagaggccagctacctggtgcgcaacagtgagaccagcaagaatgacttctccctctccctcaaacacttggaggccgccctggccgtggggagggcgcaatacggacggtttgtcacgtattggcgccccatgcccgcaaggctacatgttcttttcgacgtggtgagcggtggaaacccccggttgccccgccgagttccttcacaatccgcatcccacctggagaccttgtgtttgaactcaaccaacgccggggacgtggtgctggccctttcaaaggagccgttgggacccccagaaccggacggagtcccaacaacccccgggacactggtaacgtcattccagcccttgctgttcactgaggcgcaccgagagaagttccaacgcagctgtctccaccagacggtgcaacagttcaagcgcttcattgagaactaccggcgccacatcggctgcgtggccgtgttctacgccatcgctggggggcttttcctggagagggcctactactacgcctttgccgcacatcacacgggcatcacggacaccacccgcgtgggaatcatcctgtcgcggggcacagcaagccagcatctctttcatgttctcctacatcttgctcaccatgtgccgcaacctcatcaccttcctgcgagaaaccttcctcaaccgnnctacgtctgagttcccccagaagtattactggtggttcttccacgaccgtaccaggtga

SEQ ID NO: 12432 - DNA, 543 bp, Homo sapiens
  SIMILAR (29)..(241): 361254mologous to Canis familiaris dopamine receptor D4,accession number AB044885,Smith-Waterman Score=81.
ttagcattgccttaagtccacactggcatctcccagaccttctccagggacagaagcaggagtaagtttctcatcccatgggcgaccagggccatctcctcccaccagtggcccccactcacagggagctggcaatgccctacctgcctgttctccagatggagaaacaggctctggttcttcagagacggctccctgccaagcccagtcacagccagagctccaagaaaggagttctggagcagtgagaactggctgcccaggcatccacgtcagggtggccatagctctaaggaccattgccctcagttgggtctgccctgggccagcctgcaactgccctacaaatgggaaaattatagatgagccaggagactggagcagcaggtcaaggagataagggctctgaatgaaatattccttgccgagggccaagacttttccatgattcaagatatctccacccgagctcttttgcaacccagaatgagggggatcagagtgttcccaaccccacagattgttgtccttggcaggagccat

SEQ ID NO: 12433 - DNA, 5619 bp, Homo sapiens
  SIMILAR (910)..(1233): 891254mologous to Homo sapiens carbonic anhydrase V,accession number L19297,Smith-Waterman Score=515.
  misc_feature (1)...(5619): n = a,t,c or g
gggccaggccgccagccccgccagccccgccagccccgccagccccgcgatggcttgggccgcgctcctcggcctcctggtcgcactgttgctgctgctgctactgagccgccgccgcacgcggcgacctggtgagcctcccctggacctgggcagcatcccctggttggggtatgccttggactttggaaaagatgctgccagcttcctcacgaggatgaaggagaagcacggtgacatctttactatactggttgggggcaggtatgtcaccgttctcctggacccacactcctacgacgcggtggtgtgggagcctcgcaccaggctcgacttccatgcctatgccatcttcctcatggagaggatttttgatgtgcagcttccacattacagccccagtgatgaaaaggccaggatgaaactgactcttctccacagagagctccaggcactcacagaagccatgtataccaacctccatgcagtgctgttgggcgatgctacagaagcaggcagtggctggcacgagatgggtctcctcgacttctcctacagcttcctgctcagagccggctacctgactctttacggaattgaggcgctgccacgcacccatgaaagccaggcccaggaccgcgtccactcagctgatgtcttccacacctttcgccagctcgaccggctgctccccaaactggcccgtggctccctgtcagtgggggacaaggaccacatgtgcagtgtcaaaagtcgcctgtggaagctgctatccccagccaggctggccaggcgggcccaccggagcaaatggctggagagttacctgctgcacctggaggagatgggtgtgtcagaggagatgcaggcacgggccctggtgctgcagctgtgggccacacaggggaatatgggtcccgctgccttctggctcctgctcttccttctcaagaatcctgaagccctggctgctgtccgcggagagctcgagagtatcctttggcaagcggagcagcctgtctcgcagacgaccactctcccacagaaggttctagacagcacacctgtgcttgatagcgtgctgagtgagagcctcaggcttacagctgcccccttcatcacccgcgaggttgtggtggacctggccatgcccatggcagacgggagagaattcaacctgcgacgtggtgaccgcctcctcctcttccccttcctgagcccccagagagacccagaaatctacacagacccagaggtatttaaatacaaccgattcctgaaccctgacggatcagagaagaaagacttttacaaggatgggaaacggctgaagaattacaacatgccctggggggcggggcacaatcactgcctggggaggagttatgcggtcaacagcatcaaacaatttgtgttccttgtgctggtgcacttggacttggagctgatcaacgcagatgtggagatccctgagtttgacctcagcaggtacggcttcggtctgatgcagccggaacacgacgtgcccgtccgctaccgcatccgcccatgacacagggagcagatggatccacgtgctcgcctctgcccagcctgccccagcctgccccagcctcccagctttctgtgtgcacagttggcccgggtgcaggtgctagcattaccacttccctgcttttctcccagaaggctgggtccaggggagggaaaagctaagagggtgaacaaagaaaagacattgaaagctctatggattatccactgcaaagttttctttccaaaatcaggctttgtctgctcccaattcacctcgttactctcacctcgtgatatccacaaatgctattcagataaggcagaactaggagtcttcactgctctgcccccaactcccggaggtgtcaccttcctagttcttatgagctagcatggcccgggscttatccagttcaaagcggatgctggccacagaaaggccactcaggatgtcctttgtgtccattgatgtcattcagcagtcagtcccccaataatccttaaactagctaaaaccaaaggagtcccttagaagatctgcttccctggggccccatttgccagattgccccattgctcacactacttgagaaaatgcaggagagcttcccccaaggctgatgcattcccggtgcagaacaggggcaccctccaaacactgggctctgaggagtggagttctctgttctagagtnacaggcaccagatgggatgggctttctcagtgtcagcactcaggtagggagctaaggaagacacagcccagacaagatggctggaaggagccagccaggactccttagactgatcaagccaaaaaagaaggtgccgatttcatgcattctagtgcagaagccccaactgtgatcacgatccagtctgcagacgtgttttgtttggacttcacttaaaaaaatgccttagttgttatcatctttgggagagttcattcaaaatgtccagcttctcttgaaaacttggtatatctggccacactgggctcacattcccaagggtaactcttggccagagctgagtggcagccgcctcccttatgcaggacatgtgctctcggcttcaccagggttctgaccgggtctgcttctgcattcacagcgsctcctggycctgaaggcatctgagtgtgagaccctgttctaactcttagaagtgacattgtaagaggtggtggggaccagctaattggtccaacccagcctgagtgcaccaccctttgaacaaatgtatcagtgatgaaaatttgcctttgccccggcttgcctgtaatcccagcactttgggaggccgaggtgggcggatcacttgaggtcgggagttcaagaccagcctggccaacatggcgaaaccccgtctctactaaacataaaaaaattagtcaggtgtggcggtgccgtgcctgtaatcccagctattcaggaggctgaggcaccagaattgcttgaacccaggaggtggaggttgcagtgaactgaagactgcgccacggcactccagcctgggcgacagagcaagactctgtctcaataaataaataattaattaaaataaaaaacagcttaaagagaaaaatggcctgcaaaccttttttatgatgctatttttattaatataaagtcctgtttattgagaccctttaaatgcctgcgagagaccctacagacagtatgtctactcctcacagcatctctatgaagagaaggagggttgtgcccacttcatagatgagaaaactgagaggtgaggtgacttgcctggggccacatagctcataayctgtagaactctgcaggcagatttactgtcccaggagcaaatgctggatgagcaactcctgttctttgggctcaaggggactggtgatgggacaattcttctcgacttcaggagctgacagagccagaggcacctaaacttgggtacatcttgtaagacacataatgaggtccctctagctttagctggagggagataaaagaaccccagacctctgaatgtcccagaggctagtctcttctcagagcagcactggggtttgggggcttccctgggcctcagcctccaggcacccccaggattcccagagagacgctgtgattggcaggaggcaggatatccccagggaaacccatcttcacgcctgggtgacccccactgccgcctccttcttaactctgcaggaaatcagagctggcagcctccagtgggaggacagagccggtttccgtggcaaccctcagctgcctcatcgtggctgggaagggaaggaagcaagccggcagaaatagctatggaaggtcttgcgcaggctgcaaccctggtgtgctgggcgaaaacccttatgactccccccttccaaatcaggctgggttgtcactgagactagattctcacctgccttcaaagaagggccaattccctttaaaggtcgcacctccttggaaccacagtcattagtgaattacactcaaggaaaagatgtgctcccaccaggcagctccagctgttacctgagatactgaagtgcagctcaggagacgattatttaaacctgcccttgttttaatcgttatttttctctttaaaaaaaatagaagctataaagaaaagagggagagatgagtgggttagctacctgctatgcgctagttaggaagttacctggatgccattgtatttcttcatcccttgcttaagaatcaaaattactggacatatgttaggaatactctttctttctttctttctttttaagctcagtggcaagaatgaaatactctttttttttttttttttttgagatggagtctcgctctgctgcccaggctagagtgcagtggcgtgatctcggctcactgcaagctctgcctcccgtgttcacaccattctcctgcctcagcctcctgagtagctgggactacaggcacccgccaccacacccggctaatttttggatttttagtagagatgggatttcaccgtattagccaggatggtcttgatctcctgagctcgtgatctgcccgcctcggcctcccaaagtgctgggattacaggtgtgagccaccgcgcccagccaagaataaaatactcttaagttgatctaatgaagtgtttccttaccattgtgattattgttactattatttgctatattttaatattgttgtttaccaaatattctcctttaaacagactcgctttttaaacttttttttttttttttgagacggagtttcacgcttattgcccaggctggagtgcaatggcacgatctcagctcaccacaacctccacctcctgggtttaagcaatgcttctgcctcagcttcccaagtagctgagattacaggcgcacaccaccacggccaactggtttttgtatttttagtagagacggggttcccccatgttggtcaggctggtctcgaaactcctgaccctcgtgatttgcctgcctggggcctcccaaagtgctaggattacaggcatgagccaccatgcccgggcctaaactttgtttttaaaatgaactttttttccccccaattgctgccaatagtggataacatgtatcactcactgccaaaaatagaaagtgacccatggaaaataaattcgctggggaagggggctcccatgctggtgtggccaaggggctgagagctctctcttcttctgttacaaaacgagataagcaagtgttagaattgccttaaggccacactggcatctccctgacctttttcagggacagaagcatgagtaaaattctcattccatgggcgaccagggccatctcctcccaacagcggtccccactcacagggagctggcaatgccctacctgcctgtgctgcagatggagaaacaggctctgagatttcacaggtcttgcccaacgtcattgattttgatgattaaaaagaataaacacagcgttgcctgagcaacataagattgtgatgccttgctattttaataaagattctattttcgtataacattgtcaagtggaaacatgctgaaatctattaaaccatctttgtttgtggaaaaaaaaaa

SEQ ID NO: 12434 - DNA, 944 bp, Homo sapiens
  SIMILAR (1398)..(172): 961254mologous to Homo sapiens putative p150,accession number U93563,Smith-Waterman Score=2102.
ctcccacccgcttccatcgggtgcacggtgccaacatccgcgtggacccctctgggacgcgggccacacgcgtggagagcttcgcccacggcgtgtgcttcagccgcgagccgctggccccgggccaggtcttcctggtcgagatcgaggagaaagagctgggctggtgcggacatctgcgtctcggtctgaccgcgctggaccccgccagtctggcccccgttcccgagttttctctgcccgatctggtcaacctgggccacacctgggtcttcgccatcacgcgccaccacaaccgcgtgccccgggagggccgcccggaggcggaggcagcggcccccagccgacctccaaccctcctcgtggaaccatatctgcgcattgagcagtttcgcattccccgggactcgcctggtgggccgcagccggccagggctctacagccatctcttggaccagctctatgagctgaacgtgctgcctccgaccgcgcgccgtagccgcctgggtgtcctcttttgcccgcgccccgatggcacggccgacatgcacatcatcatcaacggcgaggacatgggcccgagcgcccggggactgccagctgcgcagcccctctacgcggtggtggacgtgtttgcttccacaaagagcgtgcgccttgtccagctcgagtatggcttcttcttcccacagtgccatccctgcagactctgtgccgcctagtgatacaaaggagcatggtgcaccggctggccattgatgggctccacctgcccaaagaacttaaggatttctgcaagtatgagtgaagacccacagtgcaccagagcacagctgcatcctggagccccagacctgtggctggctggtccgaagttggccacattgctgccagccaagaccagaaataaacagccgatgctgacatcttgaaaaaaaaaaaa

SEQ ID NO: 12435 - DNA, 1137 bp, Homo sapiens
  SIMILAR (738)..(133): 911254mologous to Homo sapiens putative p150,accession number U93563,Smith-Waterman Score=931.
gatacgtactgcaggggagaccagctgcacatcctgctggttgtgagggaccacttgggacgcaggaagcaatatggcggggatttcctgagggccaggaggtcttccccagcgctgatggcaggtgcttcaggaaaggtgactgacttcaacaacggcacctacctggtcagcttcactctgttctgggagggccaggtctctctgtctctgctgctcatccaccccagtgaaggggtgtcagctctctggagtgcaaggaaccaaggctatgacagggtgatcttcactggccagtttgtcaatggcacttcccaagtccactctgaatgtggcctgatcctaaacacaaatgctgaattgtgccaatacctggacaacagagaccaagaaagcttctactgggtgaggcctcaacacatgcgctgtgctgcactcactcacatgtattctaagaacaagaaagtttcttatcttagcaaacaagaaaagagcctctttgaaaggtcaaatgtgggtgtagagattatggaaaaattcaatacaattagtgtctccaaatgcaacacactgaagtcagtggatctgcatgaatctggaaaattgcaacaccagcttgctgtggatttggataggaacatcaacatccagtggcaaaaatattgttatcccttgataggatcaatgacctattcagtcaaagagatggagtacctcacccgggccattgacagaactggaggagaaaaaaatactgtcattgttatttccctgggccagcatttcagaccctttcccattgatgtttttatccgaagggccctcaatgtccacaaagccattcagcatcttcttctgagaagcccagacactatggttatcatcaaaacagaaaacatcagggagatgtacaatgatgcagaaagatttagtgactttcatggttacattcaatatctcatcataaaggacattttccaggatctcagtgacattcgtcatgtcctcaaatacaatgcttcaaaaaacgctgctgatcttgatctctttttcagtagtaacctggatgatttttataatttctcagaacttcacaaaggtaggagcaaatcacctttgatgcagatcacacagtaa

SEQ ID NO: 12436 - DNA, 1213 bp, Homo sapiens
  SIMILAR (1443)..(514): 941254mologous to Homo sapiens putative p150,accession number U93568,Smith-Waterman Score=1496.
atggaccccgccgggcgcgcccggggccaaggggccacggcaggggggctgctgctccgggctgctgcggccgccaagggtctcagggaagacctgtggggcgcggccgccctggccttggaggagcctgtcccggatcccgaagcgggagggtcttggagaggaggacacagcagttgccggacacgagctcctactcccaaatgagagaagctttcagaatgctgctaaaagcaataatttggatcttatggagaagctgtttgaaaagaaggttaacattaatgttgtgaacaatatgaaccgcacagccctgcattttgcagtggggagaaatcatttatctgcagtggatttcttgcttaaacacaaggccagggtggatgttgctgataagaccagaatgagagagcttctcttggaaatctttctgactgtgcccagggcacagttccatgatttgcactgccttgagtccaagttggaagactgtgaaatgagagacacattaagacacatgcaggctgtgtatagggagactaatattttaactcacacagtaacttgtgtgagattgggagccctttcttaccttaagaccatggcatgccgtccccaacagaacatcttgagtgataagaacatggactctgttcttaccagctacatgaacctgggaaagctgcataacctctctgtgcttcagtttctctatctgaaaaatgaggataagaatagcacctacgttaatttaattctcagtgagcgaattcctaccctcatttttcagatacagaaaccgaagtacagagaggttatgcagcttgcccagatgttagtggttctggctttaaccctcttctcattcacagtcgtagtccttaactctattagggctatggtcccctctgaacgcatatttaaagcgaaagatcttctttctagaaaaatacacattcacatttatgataaaaatattgcatacgagtcggcagttcccattatgccagtgattcctcaaactggatctccaacttatacctccagtgcggcgctcccacaatgcttaactccaggaaacaccattcacagtgtagccattgtgaatggcagttcttggagtagcgcactacgtagccagtgtgaccacagactgcatacttgcagctttaccctagtgcctcagaggcatcctcacacccagctcatctga

SEQ ID NO: 12437 - DNA, 405 bp, Homo sapiens
  SIMILAR (4)..(405): 981254mologous to Homo sapiens huntingtin interacting protein 1,accession number AJ238403,Smith-Waterman Score=700.
gcacgagatgctgttggcttcagagatcaaacacctgccccgaagactcctaataggtcaagagagagagacccagactagcgaactcaaaataaagagaagaggaaacgaagaagctccctctcaccaccctcttctgcctatgagcggggaacaaaaaggccagatgacagatatgatacaccaacttctaaaaagaaagtacgaattaaagaccgcaataaactttctacagaggaacgccggaagttgtttgagcaagaggtggctcaacgggaggctcagaaacaacagcaacagatgcagaacctgggaatgacatcaccactgccctatgactctcttggttataatgccccgcatcatccctttgctggttacccaccaggttatcccatgcaggcc

SEQ ID NO: 12438 - DNA, 1092 bp, Homo sapiens
  SIMILAR (1293)..(4): 901254mologous to Homo sapiens putative p150,accession number U93564,Smith-Waterman Score=2064.
tttattgttgtttgtttcttatacttttccttgctttcctcactttctgccatgggagtatgtccttgtatgtgtgctgagtaaaacaaagaggagggaatgattcacacacagtttagctcctgtcttgggtaggtggtgcctagcacttctgcctcctggccacagaagtcccagggaagaaagatgaagtgcctggtggctccaaggcagccacctcatttatcctctttggtctcaccttttcatctcaaggcccgacaccccaccctccaaaccagtggcctttgaggagtttaagaatgagcaaggtagtgagatcaaccgaattttcaaagaaaacaaatccatcttgaatgaacggaggaaaagggccagcgagaccacacagcacatcaatgccatcaagcgggagattgatgtgaccaaggaggccctgaatttccagaagtcactacgggagaagcaaggtggtcagattgaggtggggctgctggtagggactatgaaaaaccaagtaagggaacaagaatgtggatgccagagagccaagggactcactttcagtaaggccattccctatgctgaatccctgacacccgtgctgggagcaactttttgtggtccttattttctttctagatatgatacaccaacttctaaaaagaaagtacgaattaaagaccgcaataaactttctacagaggaacgccggaagttgtttgagcaagaggtggctcaacgggaggctcagaaacaacagcaacagatgcagaacctgggaatgacatcaccactgccctatgactctcttggttataatgccccgcatcatccctttgctggttacccaccaggttatcccatgcatcgcctatgtggatcccagcaaccctaatgctggaaaggtgctcctgcccacacccagcatggacccagtgtgttctcctgctccttatgatcatgctcagcccttggtgggacattctacagaacccctttctgcccctccaccagtaccagtggtgccacatgtggcagctcctgtggaagtttccagttcccagtatgtggcccagagtgatggtgtag

SEQ ID NO: 12439 - DNA, 1386 bp, Homo sapiens
  SIMILAR (490)..(1620): 821254mologous to Homo sapiens putative p150,accession number U93572,Smith-Waterman Score=1632.
atgacatcagactgccagcttggcacgaggcaatatctgtgtcgttcttggcagaaattatattttccagcccgtgtctgcaggtatattcgaattgttgggactcacaacacagtgaacaagatttttcacattgtggcttttgaatgtatgtttacaaacaaaaccttcactcttgagaaggggctgataggttactactttgggattgtgacactcaaagtggacacagtggaacacctgggagagaaaaggaaaagaccccatgagtgaagggtcagcatgcggccctggagttgccgcaagttgggatactgccctgcccagctttgggggccaccacgagggagttagaggaggtccttcccactgcccacgcctgccccggcgcagacacctgatggcaactagcatgctgtaaacacattttgatcagtcaagaggaaaggaaattgagccagtggcccaaaagttagagacaccatgacacgggtttcccacaaaatctttcacactggattacttccgtttttgccaacctttgtctaattgggctctttttttcttttttaattaattttttgtattttggcagtttgggttaaaagtcaacaggagttgactgggtggtggtggtggtggtggttcgattctgtgaggttgtggaaagcaggtccacagataacgtccaccatctgtgtggcatctgcgtgggttgtctctgggtattctggttttctcccgcgtcccaaagctgtgcacttgaggttcattggtgtgtctgcagggtcccagtctgagtgcatgtgaatgtgtgtgagcgtgccctgcaatggcatggtgtcctgtcctgagctggttcctgatgcatagttctcctggccctgcaatggttgagcacagaccctgctaagcagccgtgctggggagtggacttcaacctcatgtggctccagccagcctggaacaaacgccctcaatgtgtagaagccagccacctggccgacagtcaccctctaggagctaagaagagtttgcatacctgacagcaggtcagccctggaagcaccatgaactctgtgcccaacaccgtgccagcactgtgcagaccagggcacagcaccgagctcagcgccccgcaagcaagggtaagccatggccctgacctggagagtagacaacgtgcttcggggggtcctgacatgcatgtgtgagctgtggggtgcaggagagaagggcggggtgggggctgtcgttgccactgcacgagcatgtgtgcacatacatacacacggccttctaccgtagaatcaagttcacagagacaaatgtagtatcaactgcagaattatattgaaaatataaattccacgcttaaaaaaaaaa

SEQ ID NO: 12440 - DNA, 1330 bp, Homo sapiens
  SIMILAR (8)..(607): 491254mologous to Caenorhabditis elegans contains similarity to a BR-C/TTK domain,accession number AF016430,Smith-Waterman Score =527.
acttgattgggtcagagtgatagatcattcacaatatctgtgtcgttcttggcagaaattatattttccagcccgtgtctgcaggtatattcgaattgttgggactcacaacacagtgaacaagatttttcacattgtggcttttgaatgtatgtttacaaacaaaaccttcactcttgagaaggggctgatagttcccatggagaatgttgcaacaattgctgattgtgccagtgtgattgaaggagtcagtcggagccgaaatgccttgctgaatggggacactaagaattatgactgggattctggctacacatgtcaccagctaggaagtggtgcgattgtggttcagttggcacaaccgtacatgattgggtcaatacgggtactactttgggattgtgatgatcgaagctatagctactacgttgaggtttctaccaaccagcaacagtggaccatggttgctgacagaactaaagtctcctgcaagtcctggcagtcagtaacttttgaaaggcagcctgcctccttcatccgtatcgttgggacacacaacacagcaaatgagtcacactgtgtcaagcgtgtgcctccgaggaacctctggtttaagagaggcagcataggaaatgatgggtcgaaatgcaacagtttaggaggcaagagtgaggatgctgtcaccgcagccttgttcatcctgaacccaacgggataccacgagcgtccatccacagaggatggggtttttatcgatttgtttattcttgtgcaagaacccgagcaggtgttccactgtgtccactttgagtgtccagagcagcagagcagccagaaggaggaaaatagtgaggaatcggggacaggggacaccagcctggccgcccaggctccaactcacgctcccccaaccggcagcaccaataaaggaggcagcgggcctggtgtgacttggtgggctcgggcaacggcaggaaacggtctcctccctgagcaggggtctctgttgactgcccccacctctgcccctttccagggaggagccgacctagctgcaaaagcagacaccgaacaggttttctcccaaggacagaaaggggctgctttgttcttctcaatttatccaaatcaggcaggtctcaagggggagaaaatgggtcttcaatcttcatcaagtccaccattaacaccctacctctctaatctagcccaggcgcagggaacaggaggaagtcatagacaggcctgtgttggaatacaaaaatggcacgcaaacactcaggcggaggagaaagccattgggcctttgctacctggaggcaccctttag

SEQ ID NO: 12441 - DNA, 2868 bp, Homo sapiens
  SIMILAR (1228)..(1833): 891254mologous to Homo sapiens putative p150,accession number U93563,Smith-Waterman Score=993.
atgccccgcgtctcggcgcctttggtgctgcttcctgcgtggctcgtgatggtcgcctgcagcccgcactccttgaggatcgctgctatcttggacgaccccatggagtgcagcagaggggagcggctctccatcaccctggccaagaaccgcatcaaccgcgctcctgagaggctgggcaaggccaaggtcgaagtggacatctttgagcttctcagagacagcgagtacgagactgcagaaaccatgtgtcagatcctccccaagggggtggtcgctgtcctcggaccatcgtccagcccagcctccagctccatcatcagcaacatctgtggagagaaggaggtccctcacttcaaagtggccccagaggagttcgtcaagttccagttccagagattcacaaccctgaacctccaccccagcaacactgacatcagcgtggctgtagctgggatcctgaacttcttcaactgcaccaccgcctgcctcatctgtgccaaagcagaatgccttttaaacctagagaagctgctccggcaattccttatctccaaggacacgctgtccgtccgcatgctggatgacacccgggaccccaccccgctcctcaaggagatccgggacgacaagaccgccaccatcatcatccacgccaacgcctccatgtcccacaccatcctcctgaaggcagccgaacttgggatggtgtcagcctattacacatacatcttcactaatctggagttctcactccagagaacggacagccttgtggatgatcgtgtcaacatcctgggattttccattttcaaccaatcccatgctttcttccaagagtttgcccagagcctcaaccagtcctggcaggagaactgtgaccatgtgcccttcactgggcctgcgctctcctcggccctgctgtttgatgctgtctatgctgtggtgactgcggtgcaggaactgaaccggagccaagagatcggcgtgaagcccttgtcctgcggctcggcccagatctggcagcacggcaccagcctcatgaactacctgcgcatggtagaattggaaggtcttaccggccacattgaattcaacagcaaaggccagaggtccaactacgctttgaaaatcttacagttcacaaggaatggttttcggcagatcggccagtggcacgtggcagagggcctcagcatggacagccacctctatgcctccaacatctcggacactctcttcaacaccaccctggtcgtcaccaccatcctggaaaacccatatttaatgctgaaggggaaccaccaggagatggaaggcaatgaccgctacgagggcttctgtgtggacatgctcaaggagctggcagagatcctccgattcaactacaagatccgcctggttggggatggcgtgtacggcgttcccgaggccaacggcacctggacgggaatggtcggggagctgatcgctaggaaagcagatctggctgtggcaggcctcaccattacagctgaacgggagaaggtgattgatttctctaagccattcatgactctgggaattagcattctttaccgcattcatatgggacgcaaacccggctatttctccttcctggacccattttctccgggcgtctggctcttcatgcttctagcctatctggccgtcagctgtgtcctcttcctggtggctcggttgacgccctacgagtggtacagcccacacccatgtgcccagggccggtgcaacctcctggtgaaccagtactccctgggcaacagcctctggtttccggtcggggggttcatgcagcagggctccaccatcgcccctcgcgccttatccacccgctgtgtcagtggcgtctggtgggcattcacgctgatcatcatctcatcctacacggccaacctggcagccttcctgaccgtgcagcgcatggatgtgcccattgagtcagtggatgacctggctgaccagaccgccattgaatatggcacaattcacggaggctccagcatgaccttcttccaaaattcccgctaccagacctaccaacgcatgtggaattacatgtattccaagcagcccagcgtgttcgtgaagagcacagaggagggaatcgccagggtgttgaattccaactacgccttcctcctggaatccaccatgaacgagtactatcggcagcgaaactgcaacctcactcagattgggggcctgctggacaccaagggctatgggattggcatgccagtcggctcggttttccgggacgagtttgatctggccattctccagctgcaggagaacaaccgcctggagatcctgaagcgcaaatggtgggaaggagggaagtgccccaaggaggaagatcacagagctaaaggcctgggaatggagaatattggtggaatctttgtggttcttatttgtggcttaatcgtggccatttttatggctatgttggagtttttatggactctcagacactcagaagcaactgaggtgtccgtctgccaggagatggtgaccgagctgcgcagcattatcctgtgtcaggacagtatccacccccgccggcggcgcgccgcagtcccgccgccccggccccccatccccgaggagcgccgaccgcggggcacggcgacgctcagcaacgggaagctgtgcggggcaggggagcccgaccagctcgcgcagagactggcgcaggaggccgccctggtggcccgcggctgcacgcacatccgcgtctgccccgagtgccgccgcttccagggcctgcgggcacggccgtcgcccgcccgcagcgaggagagcctggagtgggagaaaaccaccaacagcagcgagcccgag

SEQ ID NO: 12442 - DNA, 1257 bp, Homo sapiens
  SIMILAR (619)..(750): 881254mologous to Homo sapiens excitatory amino acid receptor 1, kainate receptor subunit EAA1=glutamate ionotropic receptor,accession number S67803,Smith-Waterman Score=199.
atgctgtggtcgaattcagcaatgcagacagcagcagctcaaaggtgcttcctgagtccatcctccacccccgatggaggacacagggtggtacttcggggcactgagggttgttcctctttgccagcacaaagcctgcctcaccccagggagtggcatggcccctgctgctgttctgtgtcacctgctgagaaagcagatctggctgtggcaggcctcaccattacagctgaacgggagaaggtgattgatttctctaagccattcatgactctgggaattagcattctttaccgcgttcatatgaagagccttcctttcctcttgtcagctgaactggctctaagtgcagagcgtcatacagatttgcccaatacactagtcattttcagtgcccatgattcagctgccatggtatgctccagaacagagcctgtacctcgaggctgcccaacagggtctaggcagccacgtggcatcctggcgcttcagtgtggaggccagaagaggagaggaatcctcaccaaacagtcaggtcagatagccattttccccagagacctgggaatggacaatgtaagatgcgatgcactgaacctcattgtcaaaaactgtctttacaatggagctagcctgggaatggagaatattggtggaatctttgtggttcttatttgtggcttaatcgtggccatttttatggctatgttggagtttttatggactctcagacactcagaagcaactgagtgcctaggacagaaatgtggacatattctgacacctaaaaagcttggagagttccaagttccttgtaagtttgatgcaaatgcactcagcggcagcgtggcttggctgatgtttgtggcctttatctcacacgccaggctcatgtcccaggagaagagcagtggccacgccaagccttcaggctttgacagaaatggtggcagctgcacggcccctattaatctccaggaggccaaagagaagcgttcaatactgctgaccgccatcatccacttaagcaaagtggggaccactcatcaagtttgcacagactgtgcacctgatgagattttgcctgtcagcttcttagggtcgtctttgcctgtgtttagctatttgttttcagcaaggcacagagctgcccatttcccatctggttctcacttgccctggtgctgtctcgatggagctcagtgtacttcagtggctgtgaaagcaggagcagtcaccaaaatccaggtcttctga

SEQ ID NO: 12443 - DNA, 579 bp, Homo sapiens
  SIMILAR (215)..(859): 481254mologous to Homo sapiens E-1 enzyme,accession number AF113125,Smith-Waterman Score=332.
atggggtctggccactgtgcacagtcagacatgctggctgctacagcagggcaggcagctccagctggttatcccaatgtctgctcagcactggctgagtccagggcttttatgggcttcagggtagaggaagtgagtgctgattggcccatgggcggccacaggcaggcccagaaaaggtaccacaagttcccactccagtcggtgggagtggcagtctggcctgaagccctgcccactggagcatatcctgcccacagtgcccctgctgcccctgctggagcacctacacccatgccctgtcaatggtctgggaacaccccagcctctctatcccagccaaagctcaacagtgagagaccagaggacaaagctgctgacccagtcccagtcccacaggatgatcacactagctccccagtagtggatcctaaccagaatgaaatggctgaaatgccaggcagagaattcagaatcgggatgataaggaagcacactgagacacaagaagaggttgaaacccaacccaggcaaaacagtaaaacaacccaacagttgaaagatgacataaccatttaa

SEQ ID NO: 12444 - DNA, 3046 bp, Homo sapiens
  SIMILAR (409)..(804): 261254mologous to Zea mays Hydroxyproline-rich Glycoprotein (HRGP),accession number AJ131535,Smith-Waterman Score=101.
atggccgtgacaccagtgactggagagactgtggacacccatggctgtgacaccagtgatctggagagactgtgggtcacccagggccgtgacaccagtgactgcagagactgtgggacacccatggccgtgacaccagtgactggagactgtgggacacccatggccgtgacaccagtgactggagagactcacatcctcatcagactcctcaatacaccaaagcacatcctcatcagactcaatacaccaaagcacattctcatcagacacctcaatacaccaaagcacatcctcatcagactcaatacaccaaagcacattctcatcagactcaatacaccaaagcacattctcatcagacacctcaatacaccaaagcacatcctcatcggactcaatacaccaaagcacatcctcatcagactcctcaatacaccaaagcacatcctcatcagacacctcaatacaccaaagcacaccctcatcagacacctcaatacaccaaagcacattctcatcagtcacctcaatacaccaaagcacatcctcatcagactcaatacaccaaagcacattctcatcagacacctcaatacaccaaagcacatcctcatcagactcaatacaccaaagcacatcctcatcagactcaatacaccaaagcacatcctcatcagacacctcaatacaccaaagcacattctcatcagactcctcaatacaccaaagcacatcctcatcagactcctcaatacaccaaagcacatcctcatcagactcctcaaaaccagtgtggtgtccatgggctctggagaccatcagttcaacctcgcagagatcctgtcacagaactacagtgttaggggggagtgcgaggaggcctcgaggtgcccagacaagcccaaggaggagctggagaaggacttcatctcccagaaacccacgagccgatttcaaaagcatatggaagctcaaggtaccccaaacagcccaaacaatcttgaaacaatacttcctgatttcaaaattcaccacagagccacagcaatcaaaacagtgtggtactgccataaggacagcacaaagatcaacgaactagaactgagaatccagaaatacagtcacacattcatagtcaactggatttccacaaagagaataaaaactgtgctcaaaaagacagtaacaagtgttgacaagaacgtggacaaagtggaactctcctgtgccctgccgggcctcctccacattgaagttgcatttcaccaactcgtacagcgcctggggagaggacatgttggctcttccatgggctcagcgcaggagccgacagcaagaactgtctataccatccagcgagtggcatcaggggccgtccacaccaccctcctgggcgatgtcagagccacctacacctctatccagggagtgacatcagggcccgtccacaccaccctcctgggcgatgtcagggccacctacacctctatccagggagtgacatcaggggccgtccacaccaccctcctgggcgatgtcagggccacctacacctctatccagggagtgacatcaggggccgtccacaccaccctcctgggcgatgtcagggccacctacacctctatccagggagtgacatcaggggccgtccacaccaccctcctgggcgatgtcagggccacctacacctctatccagggagtgacatcaggggccgtccacaccaccctcctgggcgatgtcagggccacctacacctctatccagggagtgacatcaggggccgtccacaccaccctcctgggcaatgtcagggccacctacacctctatccagggagtgacatcaggggccgtccacaccaccctcctgggcgatgtcagggccacctacacctctatccagggagtgacatcaggggccgtccacaccaccctcctgggcgatgtcagggccacctacacctctatccagggaggactggcatcagggcccgtccacaccaccctcctgggcgatgtcagagccacctacacctctatccagggactggcatcaggggccgtccacaccatcctcctgggcgatgtcagggccacctacacctctatccagggagtgacatcaggggtgtcccaggtatccagggcagcccaaatggcagtccccagctcgcggatcctccagttgtcaaagccgaaggccccagccaccctcttggaaagagtgggaccccgtgccaaaacccaagccacatgtgtcagaccataaccgcctccttcacttggccaaagttccacgcaaagagggatctggaaagaaggtgggagctttcccagaaatcaaaggccctgaagccttcagagacaaggcgagggccatggaatcacagagcaacgacatgccctttgatgagctgcttgcgctctatggctacgaggcgtcagaccccatttcagaccgggagagtgagggtggtgacgtggacccgaacctcccagacatgaccctggacaaagaacaaatagcgaaggatttgctttcaggggaagaagaggaagagacgcaatcatctgctgacgacctcaccccgtccgtgacctcccacgaggcctccgacctcttccctaaccggagtggatgcctcctcgctggggaggcagagtcctcgcgtggtctcctgcctcgagcacagcctgtgcccaggggagccgggcttgcagacaacagcaggggggccctcctgagggcccacgggactgtcagagtcggaacgacagccacagtcaaaccagccgacgctcctcctgagagcccacgggaccgtcggagtcggaacgacagccacaggcccacgggaccgtcagagtcggaacgacagccacagtcaaaccagccgacgctcctgctgaggggccacgggaccatcagagtcagaacgacagccacggtcaaaccagccgacgctcctgctgagagcccacgggaccgtcggagtcggaacgacagccacggtcaaagcagccgacgctcctgctga

SEQ ID NO: 12445 - DNA, 1414 bp, Homo sapiens
  SIMILAR (1)..(1755): 911254mologous to Homo sapiens putative p150,accession number U93572,Smith-Waterman Score=2740.
atggaggagacttggccttggcggatgggaagggaggtgaaccagacactgcagaactctcgctcaacgtcaggacttggctccacgcaggtgtcagacaggttcctggccaagaaagtcacactgaagcttcccagggccaaggagctcaggtatcccaggacgcagactaccaggatgtatctgggctcagaatgtgagcctctggcagtggatgggggagaggttcccagccagaccccgcagacagagtcacttggatcaggagcaaatgggaaagatgcagaggccctgacaccagccaacacctcagtctcctcccagatgactcctgcttccctggccaccctcagctcagcagggccccaggagccccagtgccatggcagcaccttccataagtggctcctgaatgttgtctattcggaattccccctggaaggccagcgctgggtctgtcctggtcaccacgtgcctggatccccatttttatgtggaagaaggctatgatgtccctttcagagaaaattcgagaagctccactcaggcgcaagctctggggctgctggccgtgagttcagtgttagtgaatccacaaggcagatccagtgagacagtggctcccaaccttttttggcaccagggcactggtttcgtggaagacaatttttccacggatgttggagtagggggcgtggtttcaggaggaaaccgttccacctcagatcatcaggcattagattctcataaggagtgtgctgcctgcctccctgggcccaaagctcagtcggacaagtgcgttcctgaccgagatcctcgctgggaggtgctggatgtcaccaagaaggtggtggccagcccccggatcatctccctggccaagcccaaagtgcgcaagggcctcaacgagggatacgacaggcgggccacgggaccgtcggagtcggaacgacagccacagtcaaagcagccgacgctcctgctgagggcccacgggaccgtcggagtcggaacgacagccacagtcaaagcagctgacgctcctcctgagggcccacgggaccgtcggagtcggaacgacagccacagtcaaaccagccgacgctttccccccctgctgaggggccacgggaccgtcggagtcggaacgacagccacagtcaaaccagccgacgctcctgctgaggggccacgggaccgtcggagtcggaacgacagccacagggccacgggaccgtcggagtcggaacgacagccacagtcaaaccagccgacgctcctgctgaggggccacgggaccgtcggagtcggaacgacagccacagtcaaaccagccgacgctcctgctgaggggccacgggaccgtcggagtcggaacgacagccacagtcaaaccagccgacgctcctgctga

SEQ ID NO: 12446 - DNA, 927 bp, Homo sapiens
  SIMILAR (574)..(657): 921254mologous to Homo sapiens DNA polymerase epsilon p12 subunit,accession number AF261688,Smith-Waterman Score=127.
atgcagccgtctgatgaggccacaacccctaggcccctcaggagctttgcagagaggaggacgtgtactccaggcgaggcctctggacctgtgttcctgtgccaaagtcctgtcaggctggtgggcaccaggaaaggcctgcaccctcttcctgctctcccaggaagccagctccctgagctcctgagccagccggaaactcttcctccagcctcccgggttgaacacccctccccattctgggaaaggaaagcagcctccagggaaatgttttctgccttcctgcttctagaaccacctcagtgttgccggaaatggaagcagcccctgtgggctttgagctggagctctggggctactcttgtggctgctggccagctcggggcatcgggttctgtctgggatgatctaaggaagcagcacccgtggtgtatctggagccgagtgctgctgatgggaggggatcctgtgtaccagctgggctggagcgggaacacggctgagctgaccctggcacagtcggctcctccagggcaatggaatggaggagtctcagctgaggagggcacggtccagggaaacaggaaaaccctccagaggagagatttggataatgcgatagaagctgtggatgaatctgcttttttggaaggtacttcgggtcgattgctcagcagtgcaggttcccggccttcatctgcatccttcagctcgcccctctccgcaggcttcagcgttgagaagaacagtcttggcacttgcatacatactcttcctgttctaccctcgctcacaccgatcttccacaacgtgtgtccgtcttccagtcaggcctggatgcagccgctgctgcttggagcagagatgaagaaagtgttctgcttaagtggcttactgcacgatgaggaccagaataaaggtctttga

SEQ ID NO: 12447 - DNA, 735 bp, Homo sapiens
  SIMILAR (2)..(97): 751254mologous to Mus musculus LNV,accession number AF188504,Smith-Waterman Score=100.
cctgctcctcctcatcgcctccattgtggcagcttccaagagtgacaaccagagcggactggtagccggagcggtgaggatgttttggggagcctttaggaatgaattcttatttaaaatgctcattttcttcctgatgggggaagagaagggcttggtttctggggcattcccttcatagaattaatacctaccttgatccagccatcagctctctccaaagagccttaagcagaggcgtacagtcccagaaggtggattgtcagggctgccagcaaattcatagaccccagcagcccaggcctctctctcttacaggcactactgaaatcagggggccaggcgggttttaattcacacacccactctgatcatttgctcgttggctgcctcagcactatgcagagacagatgctggagcctcttttgggcccagtgggaaatgtactgtgatcaattagagatacatgccatgagcctgagctttgccattcctgatttttaacagtattcaggccaggaaataatactcctgtatctttcagaggcaaaaattgatccatctgatagccataaatagaagtagatggaaatatacaaaaataccggcctgtgagatatatacctacctatatatgtgtataccttacagaaggttatggctttttttttaaagaattctggaattccggcgtctgggttccggagttaaataacctattttttccgtccggg

SEQ ID NO: 12448 - DNA, 277 bp, Homo sapiens
  SIMILAR (46)..(147): 911254mologous to Mus musculus LNV,accession number AF188504,Smith-Waterman Score=144.
atgcaatttaaatatcacctttgccctctgatcctcttccataaggaacttctgcactatttaatcggtaccctgctcctcctcatcgcctccattgaagcagcttccaagagttacaaccagagcggactggtagccggagcgatggccagtaacatgtggtctgagacagctttcagaagagagaatgaacagcggcccagtccagatgtggacactcagtattttaccacacgttgtgcatttaccctagcaatagtcatccaactgctgacaa

SEQ ID NO: 12449 - DNA, 2566 bp, Homo sapiens
  SIMILAR (262)..(579): 701254mologous to Mus musculus LNV,accession number AF188504,Smith-Waterman Score=342.
atgttggaattatcagaccatgaatttaaaacaactatgactaatacgctaaggactctagtggaaaaagtagacaacatgcaagaacagatgggtaatgttaagcagagaggtcaaaaaccatcaaatattggcaacttcgtacaattgggcctaatatgtaaaccccaggtcaccatcacgctgtcctctttgctctatggatatccagcagatgaaagggatggttctgctttgttattttcttgttttcctgcttcttctgagggggcttcccgctggcacaatctaacaaacttcagagaggacgaagtcaccctgctgattgccttcatctgtgtgcggagctccctgtggaccaactacagcgcctacagctactttgaagtggtcaccatttgcgacttgataatgatcctcgccttttacctggtccacctcttccgcttctaccgcgtgctcacctgtatcagctggcccctgtcggaacttctgcactatttaatcggtaccctgctcctcctcatcgcctccattgtgggcagcttccaagagttaacaaccagagcgggattggtaggccggagcgacaattggtacaaaaggagcccaggaaaagaaacccggggaagaagtggatgtgggctgctgccggtgttgttcacaagcaaggaaaatggctgcaggcttcaaagcccagagattccagaagaagctactgcctcttcgtcgaccatttgatgagcctcccacaggcactcttcgtctcccagcacccgaatctcatctacaaatctttggtttcatggccaccttcctctgcatggcaagcatatggctgtcctataagatctcgtgtgtaacccagtccacagaagcagcaagcagcatacagcaggtgaacacttacagagtgcctacctgcaagagtatcctgccaactgtaactaacacaacaactctgaggggcgtgattatctcccatttggcagatattgaaaatttgctacctgcacctgctgtgttcccaccctctggagacctgggaacctggctgcagcctgggaaggctggagaagcagatggcagcacccaccagctcctctccctgtcccacctcttccctggggaaccagaccctacctgtgtggtgtattgtaatcgagcttctctccctgactaccctggaacttttcttgctaatgtcactggcaaccttcttatagctcagtctaagtgttgccggaaatggaagcagcccctgtgggctttgagctggagctctggggctactcttgtggctgctggccagctcggggcatcgggttctgtctgggatgatctaaggaagcagcacccgtggtgtatctggagccgagtgctgctgatgggaggggatcctgtgtaccagctgggctggagcgggaacacggctgagctgaccctggcacagtcggctcctccagggcaatggaatggaggagtctcagctgaggagggcacggtccagccctcagagacccttgcccctctgggcactgtggggacccagaggcagagcagagggtgtggggaacctcatagtccctggatcctgggagctttcgaggaaggctggccagagctctggggcctggggctctctgggagctgttcaacccaggggccttgtggaacccaaactgtgtacccaccacccctgctcccagagcagttacagccaggtggatccaagcaaagatgtgagaggagggaaggatgcacccatgggggaggagcagggagccaggggagccatcctggcaacctgaggccccaggaaagggtgttggcaccggtggccgcaagggcactgggagatgaggccgacggacatttgctcacatcccccaccacaaccagcccgttccctggccttgctcttggggagaaaatgaaaagaattgaaattaagagaaggcagagattgaagtgtggcatcaagattgagaggagaaaggttgaggaatatgctagccctgcaaggcctacgaccatgtcatgccagcataacctgatagctgtgatttgggccttcaactgtcaccttggcgctttcctgtggacactgccatgggacctgctcagcggccacacagtgcaacttgcaagtgctgcaggggaattcactccctgtgaggtaacactgaccaatgggacacaggaaccaaagaagaaggaggaggaggaggaagaggaagaggaagaagaagaagaagaagatagaagaaggacaaggaggagaggaggagaggagggggagggggaggaggaggagaaaagaagaaaaaagaaagaagaagaagaagaaaagtggccctacagcaaaattggccgctggatggtacatccaaacctaagaatattcctacagctttccatcccccagtcatcagacatgtggccacatttgcccccagagctgaacaaacaagacctaaagatcaagccagacagcagtaacagaagccttgccctagagccctttatttcctttgggtcaaggaactacagggtctgggactaa

SEQ ID NO: 12450 - DNA, 932 bp, Homo sapiens
  SIMILAR (7)..(321): 851254mologous to Mus musculus LNV,accession number AF188504,Smith-Waterman Score=482.
tggaccaactacagcgcctacagctactttgaagtggtcaccatttgcgacttgataatgatcctcgccttttacctggtccacctcttccgcttctaccgcgtgctcacctgtatcagctggcccctgtcggaacttctgcactatttaatcggtaccctgctcctcctcatcgcctccattgtggcagcttccaagagttacaaccagagcggactggtagccggagcgatctttggtttcatggccaccttcctctgcatggcaagcatatggctgtcctataagatctcgtgtgtaacccagtccacagatgcagccgtctgatgaggccacaacccctaggcccctcaggagctttgcagagaggaggacgtgtactccagggcgaggccttctgggacctgtgttcctgtgccaaagtcctgtcaggctggtggggcaccagggaaaggcctgcaccctcttcctgctctcccaggaagccagctccctgagctcctgagccagccggaaactcttcctccagccttccggggagaacatccctcccattctgggaaaggaaagcagccctcccagggaaatgttttctgccttcctgcttctagaaccacctcaggtactgatggaacccaacttagcacagcttgaaggggtttgtgaatactcccgcctaaatccctttctacttcactcctcaggggagtgaagtgcctttaaggaacaaagccctgtcctaaatttatcttagcttgtcagtccggtcttagagataccctctttcctgaagtgaggcgtgccctgagaaaacaactatgtggtcagcctgtccccaaggagatcttgtgtctcctctccatctctgcctttgttaccagtgtgcatgtgtttgtgtgttttttaataaaatattgactcggccagttaaa

SEQ ID NO: 12451 - DNA, 1389 bp, Homo sapiens
  SIMILAR (99)..(440): 421254mologous to Arabidopsis thaliana glucose 6 phosphate/phosphate translocator,accession number AF233658,Smith- Waterman Score=216.
agcggccgcggtgggccgcccactgttgctcggtcccggtacccagtcgccatccgtcgtccggcccgctgctgccgccgcgcttctacccgcgctacgtgctaccgctcgccttcggagagtacttcgcgtccgtgtcagcgcacgtcagcatctggaaggtgcccgtgtcctatgcacacaccgtcaaggccaccatgcccatctgggtggtcctcctgtcccggatcattatgaaggagaagcagagcaccaaggtatacttgtcactcatccccatcatcagcggtgtcctgctggccaccgtcaccgagttgtcttttgacatgtggggactcgtcagcgccctcgccgccacgctgtgcttctcgcttcagaacattttctccaaaaaggtatttggtcaccatcagcggacatgcatggggtttcaggggtgtgcgggcagcaaactgcatgtaatcccggaacttcctacactcgagaaaaggccagcggctgcagacatctgcaaagtcttgggcaaacgacagtctgctctccccaaaacatggtgcaagcaatgatgctggatccatcctcctgaccgaaaatagttttctttcttcttcctcgctgacgttagcgctgctgaagccttgattcgtgtttttttctctagaagagtccatcaagcttcctagcaatactttcatttcttcttcgtcactgtctggagaatcaaatgttctagcaggttctttctgtttgggggttagcaaagtcctctctttcccagcaggtgcttcaggggatatgttttcaacaggtgcttgtttcttctttagaaacctactgaccttcgcgttctgtgcattattttcggtgacaggaagttcacgggcttgattctgggaagttttgtctgtgttctgggacgcgagttcgagtgcacccccagagaggattctgtcagctctctttggaagaccagcatcggcggtcattgagtcagattccgtgtcagacaaattcctctgcagcttccgattcatgatccgggtttccagctgggccagcttcatgagtgcggcattggctcggatcctggaggcagtggtgggcggtctacatgaggcaagcctgggtccactcccgagcacagggttctctttcaggagtaagtgtttctcatctagagtttggtttctttttagaaatctgctatgaccaggtgctattttggtaagatttctactgatctggaagtttctgatttcttccattgttgaatcttccaaggaaacatcactgaagtcaccaaaaacatcacgcatgggacggctggctttccttgcagaagccattctaatcccacgccgtccattcgcagaggcagccgccacgaaa

SEQ ID NO: 12452 - DNA, 522 bp, Homo sapiens
  SIMILAR (1)..(465): 831254mologous to Homo sapiens ribosomal protein L23a,accession number U43701,Smith-Waterman Score=634.
  misc_feature (1)...(522): n = a,t,c or g
atggcactgaaagcagagaaggaagctcctgccactcctaaagccaaagccaaggctttgaaggccaagaaggcagtgttgaaaggtgtccacagccacaaaaaacagaagatctacatgtcaccaaccttccagtggcccaagacactgcgactccagaggcaacccaaagatcctcggaagagcacccccaggagaaatgagcttgaccactatgctgtcattaagtttctgctgaccactgagccggccatgaagaagatagaagacaacaacaacatgcttgtgttcattaaggacgttaaagccaacaagcaccaaatcaaacaggctgtgaagaagctctataacattgacgtggcccaattcaacaccctgattcggcctgatggagagaagaaggcgtatgttcagccatctcctgattatgatgctttggatgttgccaacaaaattgggatcatctaaactgagtccagctgcctaattctgannnnnnnnnnnnnnnnnnnnnnncaccat

SEQ ID NO: 12453 - DNA, 1170 bp, Homo sapiens
  SIMILAR (544)..(2838): 871254mologous to Homo sapiens putative p150,accession number U93574,Smith-Waterman Score=3461.
atggaagtccttttatgcagagcatctttgatagcgcagtgttccttggaacatactctaagaaacctgtactggctcatctctacagaccctctggctccagactggtgggtgaagcaggtccgagggggcgaggccaatgtggctgaaggaggtgatggcaatggccagaaagcagtgctgaccagagacggctactgggtcactggccaaattcagcacatgtatgaacttttaatactttttattgaatatccatcccaggcattatatgaacttctcaagtgtaaccacaatataaaggaagcaatcgaaagatactgctgcaatggaaaggcctctcaagaaggaatgactgcatggacggaagaagaatgccgaagctttgaacatgcactcatgctttttggaaaagattttcatcttatacagaagaataaggtgagaactaggacagttgctgagtgtgtagcattctactatatgtggaagaaatctgaacgttatgattactttgctcaacagacaagatttgggaaaaaaagatataaccatcaccctggagttacggactatatggatcgtttagtagatgaaacagaagctttgggtgggacggtaaatgcttcagccttaacttctaaccggcctgagcctattcctgatcaacagctaaacattctcaactccttcactgccagtgacttgacagctttgaccaacagtgtagcaaccgtctgcgaccccacagatgtgaattgtttggatgatagctttcctccactgggcaacacaccccgtggacaagttaatcatgtgcctgttgtaacagaagagttactcaccctgcccagcaatggggaaagtgattgttttaatttatttgagactggattttatcactcggagctaaaccctatgaacatgtgcagtgaagagtcagagagaccagcaaaaagattgaaaatgggcattgccgtccctgaatcctttatgaatgaagtttctgtaaataacctgggtgtggactttgaaaatcacacacatcacatcaccagtgccaaaatggctgtttctgtggctgactttggcagtctctctgccaacgagaccaatggtttcatcagtgcccatgctctgcatcagcacgcggccctacactctgagtga

SEQ ID NO: 12454 - DNA, 512 bp, Homo sapiens
  SIMILAR (10)..(240): 671254mologous to Homo sapiens HDCMB45P,accession number AF068294,Smith-Waterman Score=242.
gaaccaaagtggtttcttgagatggaatctactcttggtgaagatgctgtgaacactgttgaaatgacaacaaagaattcagaagattacataaatttagttgataaagcagtggcaggttttgagaagattagctccagttttgaaagaagttctactgtgggtaaaatgctatcaaacagcatcacacattacagataaatcttttgtgaaaagaaaagtcaattgttgcagcaaactcttcattgtcatattttaagaagttgccacagccaccccaaccttgagcaaccactacccagatcaatcagcagccatcaatatcaaggctagcccctccaccagcaaaaagaccacatcttgcagaaggctcagatgaacattagcattttttagcattaaaatattttttgaattgagatatgtatatttttcagccataatggtattacacacttactagattacaatataatataaatgttttatatgccctgggaaaaaaaaaaaaa

SEQ ID NO: 12455 - DNA, 1749 bp, Homo sapiens
  SIMILAR (727)..(1377): 911254mologous to Homo sapiens putative p150,accession number U93563,Smith-Waterman Score=997.
aaacaagcataagccatgaatcctccacttggtgtgttactttttattactacagaaagtgctgttgcttgaatatgaatatcatttagtgtaataaaatgtagaaggacacattattgtgttccagctctggttcagtctggcagtgcccagcataaaccgtcaaaacttgataaaagactgtcttggggttatcttgctgtcatgattccgatgtgttttgatttccttctggagtcataaattgcacctttggtaccatgagggaagaattgttccttcggatagaattgttcctcctcatggaattgtttcttctcatggagttgcgcttcctcagagaattttgatgagacagttcactcttttggagggtctgaataaggatggaaggtttctcatccagctctcgggcactgcaccgtggagcagctactttaacagtgttgccaaatttggagtaatccacagaatacactccttcttcctcagtcacaatggacacaaagcggtggccccattggatctcctcagcaatgtaggaggttcgtgcttgtgtggtgatgccagtagtttcaaccactccttccagaataactatgacctccaagtcttggttggccaggtcagttgctgagatgtcatacaggggactgcgcttgtcaatcacgtggcagatgatcaaaggggccaccagaaaaatgttattgctctcgattgggttatcaacaggaatgtccagttggtgaataggaaccacctccccttcaggtgtagttgttttcttgaccacctggatgcgcacagaggcactaatgatcatgcttttcctcaggtcacccactcggaacatgaagcacagcttgccatttcggacggcaatcacagcatggcggctgaaaatcaaagtttctgcccttctgtgagcctgagctgttttcatgaaaatgcagcctaacatgactgcattgatgatcaaacccacaatattctggagaatcaaaaccgtgatggccaaagggcattcctctgtcatcatcctccctccaaacccaatggtaacttgaacttcaatggagaagagaaaagcagaagtgaaagacctgacattagtcacacacacagtggactccaaaccacttttctccattccacttttctccatgtaagcatagatgtccccatgggcaaaggccaccagccaccacatgatagcgaagagcagccagctgcagaggaaggacatggtaaagatgaccagcgtgtggcgccatttcaggtccaccaaggtggtgaagatgtcctgtagaaagcgtccttgctcacggatgttcttatgcgccaggttgcaggccccgctcttggcgatgaagcgggctttggggaggcggtctcggatgcgcggcttgcgcaggttctctgcggcgatgcgcgccagcacatactcctccgggatgatactctttctggccaacatcgtcctgtcaccatagccagcttagccacctccctctcacctgcctctccgtccctggacacccgtcctcagactccgggtagcgggcgcggcggctggacctccttgcacacgccggcgggccgcgggcaggtccctcgctctcccatgctggcgcgcgggaccaggggccgcccaggccggagggacaaattgggggctgcgtgtcctaaggagaagagttaaaataataaaaggtgcaactgaatctaaacgcagggagggcctcgtgc

SEQ ID NO: 12456 - DNA, 1968 bp, Homo sapiens
  SIMILAR (1640)..(2041): 881254mologous to Homo sapiens putative p150,accession number U93569,Smith-Waterman Score=639.
atgaagcttccagagaaaggaacaggcagcattctttgctgtcctgcagcctccactggtgatacccaggcaaacagggtctggagtggacctccaccaaacttcagcagactgcagctgaggggcctgactgttaaaaggaaaactaacaaacagaaagcaaaagcatcaacatcaacaaaaaggatgtccacaaagaaaccccatctgcaggtcaccaacatcaaataccaaaggatcacaattcctcaccagcaagggaacaaaactggacggacagagaatgagtttgacgaatcgacagaagtaggcttcagaaggtgggtaataacaaactcctccgagctaaaggagcatgttcaaacaaaatgcaaggaagctaagaaccttgaaaaaagggacatggatgaagctggaaaccatcattctcagcaaactattgcagggacaaaaaaccaaacaccacatgttctcactcataagtgggagctggacgatgagaacacatggacacaggaaggggaacatcacacaccggggcctgttggggggacacgcagcccccaatttgtccctccggcctgggcggcccctggtcccgcgcgccagcatgggagagcgagggacctgcccgcggcccgccggcgtgtgcaaggaggtccagccgccgcgcccgctacccggagtctgacgatgttggccagaaagagtatcatcccggaggagtatgtgctggcgcgcatcgccgcagagaacctgcgcaagccgcgcatccgagaccgcctccccaaagcccgcttcatcgccaagagcggggcctgcaacctggcgcataagaacatccgtgagcaaggacgctttctacaggacatcttcaccaccttggtggacctgaaatggcgccacacgctggtcatctttaccatgtccttcctctgcagctggctgctcttcgctatcatgtggtggctggtggcctttgcccatggggacatctatgcttacatggagaaaagtggaatggagaaaagtggtttggagtccactgtgtgtgtgactaatgtcaggtctttcacttctgcttttctcttctccattgaagttcaagttaccattgggtttggagggaggatgatgacagaggaatgccctttggccatcacggttttgattctccagaatattgtgggtttgatcatcaatgcagtcatgttaggctgcattttcatgaaaacagctcaggctcacagaagggcagaaactttgattttcagccgccatgctgtgattgccgtccgaaatggcaagctgtgcttcatgttccgagtgggtgacctgaggaaaagcatgatcattagtgcctctgtgcgcatccaggtggtcaagaaaacaactacacctgaaggggaggtggttcctattcaccaactggacattcctgttgataacccaatcgagagcaataacatttttctggtggcccctttgatcatctgccacgtgattgacaagcgcagtcccctgtatgacatctcagcaactgacctggccaaccaagacttggaggtcatagttattctggaaggagtggttgaaactactggcatcaccacacaagcacgaacctcctacattgctgaggagatccaatggggccaccgctttgtgtccattgtgactgaggaagaaggagtgtattctgtggattactccaaatttggcaacactgttaaagtagctgctccacggtgcagtgcccgagagctggatgagaaaccttccatccttattcagaccctccaaaagagtgaactgtctcatcaaaattctctgaggaagcgcaactccatgagaagaaacaattccatgaggaggaacaattctatccgaaggaacaattcttccctcatggtaccaaaggtgcaatttatgactccagaaggaaatcaaaacacatcggaatcatga

SEQ ID NO: 12457 - DNA, 990 bp, Homo sapiens
  SIMILAR (1296)..(148): 911254mologous to Homo sapiens putative p150,accession number U93574,Smith-Waterman Score=1839.
tatacagattttagaatagagtctggcatgtaataaatgatcagtaaaaatgagctgctgttgtagtaattcttttaaactatggagtgaatatttacctttaaaaacggataccaaatttttattatgtttaccatgtaagtgtggtgttttaaagtataaacacaataaagatcttttgacagttatgaatagtattataaattaacatttttcttgtaataaagggaacatttttgtcttggtgcttgtctttgtttcctacctttttaattgctttaaattagtgttatatttttgttcacttttttatctttttttaaatagctggggctctcagtgcacataggtatttccggagataatccttccgaattatgcgtggtatcattgttgatagtgggatattcctttacacatatagttccttattgtaggaagtaaaaagaaaaaaggaaggcaattattcgggtggagttgtatttaaatttttcatgttgtttctaaagattaaacagaatgatatgtgcgataattaaatttgagttctccccctgcaggatatatgtgggaagaaaatctcttaaccaatcatctaaaggagatcatatcttacaggtgatgcttagctttgattctttgggaggatggggctctggggaggaaccttttacagtaatttaagattattccttacttttaaggccagtcattgtgactcacgcctgtaatcccagcacattgggaggccgaggtgggtgcatcacttgaggccaggagttcgagaccagcctgggcaacctggtgaaaccccacttctactaaaaatacaaaaattagccaggtgtggtggtacacacctgtaatcccagctactcgggaggctgaggcatgagaatcatttgaaccaggaggtggaggttgcagtgagccgagatcgcgccacttcactccagcctgggtgacaaagtgagactctctctctctcaa

SEQ ID NO: 12458 - DNA, 1579 bp, Homo sapiens
  SIMILAR (667)..(1368): 821254mologous to Homo sapiens putative p150,accession number U93568,Smith-Waterman Score=1047.
ttccactcaacaccatctcttcccttggcttacaaaagccctttttaattgtactgaagtcaggcaagacatagtctatcattactgtattttcttctcctttcaactttgcaatatccatgtctctataaaaatcctgagacacatagcatacatcttctttcacttgattaatcacatgtgtttcatccataacatgtagctgcctgtaagatatgatctcctttagatgattggttaagagttttcctcccacatttatccgaataattgcttcttttttctttttacttctacaataaggaactatatgtgtaaaggaatatccactatcaacaatgatacagcataattcggaaggattatctcggaaatacctatgtgcactgagagccccagcatttactcttaatactgcttgaaactggtattcttcaaatagaatttcattcattgattcttgaattgaagtgaagttaaagtatggttcagtgataataatattagtatctaaaaaatcaaccttttgaaaagggaggatgtaaaagagtccagaagggtcttttatttcatctatctggttggcagtaaaagttttaagacgtgctgtttttgaccggaactgacaattaggaataaccgacacattttcatggctgtaaccgattttggcgttgtaagctccattatccagcactaaggtcgtcatctcaccaccaaccacaccgcagccgtagttgttttccctttccgacccctctgctcgagctttttccggtactctggcttccggggcgtcgcgggggcaacggccagcgggcgggggcaagggccagcgggctaggacaactgccaacgggcttggaggggggcgttctacaaattccaggccactttgagcgccggggccggaacccgggcagaggagggcagcgacggcgatggggaggctgcagagcccggggcgggtaccgcgcgggaaccagcgcgactgcgtggctaccgcagccgtcggttcgtgttggacgggcgccgctgctgcctctgctacttcaagaacccccacgacccgctgcccctcggccacctggacatagcagaagcctgcttcagctaccagcgcgccgacgaggcggcggagcagcctgcgcacttccaggtgcgcagcgcgggagccgccacggtgcttgaggtgggaactcgcgccctccgaggggtccacctgcttcgagcacatagagggatctgggcccaggcctggagcccagtatcctttctccaggctgtgctccctgcctggctcctgtgaacctccaccttctctctcattcctcttccgcgctgcaggctcggctttctccagggcagcagggttgggctgcctttgtgccacactcccttccctagcaggacgatggttcctctcagcactgtcctttttgtttggcctcctggtgggaggtgaagccagctggacttcctgggtcgagtggggacttggagaacttttctgtctagtctttgggtccgtgccacctttaagagctgcaacactcaccgcaaaggtctgcagcttcat

SEQ ID NO: 12459 - DNA, 1794 bp, Homo sapiens
  SIMILAR (790)..(1449): 911254mologous to Homo sapiens unknown,accession number AF149422,Smith-Waterman Score=1098.
atgggtagcacttgtggctgcagcttttactccgagaaaactttgccacaaaatattaataactactgcagcatgacagagcttctgaggtattttaatattctcgttctcacataccagtctccgtcagatagtgtgactgatgctaaatttacatttcataaggctattgctgacatagatagtgagtcctgtgatggagctgggcaaagtaaatttaaaaccatctggaaaggattcaccattctagatgccattaagaacatttgtgattcacgggaggaggtcagaatattaacattaacaggagttgggaagaagttcattctaattctcatgaatgagtttgaggggttcaatacttcagtggagggagtcactgcacatgtggtagaaatagcaagagaattagaattacaagggcattctgaagatgtgactgaattgctgcaatctcatgataaaacttggatgaatgaggagttgcttcttctggacaagcaaccaaagtggtttcttgagatggaatctactcttggtgaagatgctgtgaacactgttgaaatgacaacaaagaattcagaagattacataaatttagttgataaagcagtggcaggttttgagaagattagctccagttttgaaagaagttctactgacacgcagcccccaatttgtccctccggcctgggcggcccctggtcccgcgcgccagcatgggagagcgagggacctgcccgcggcccgccggcgtgtgcaaggaggtccagccgccgcgcccgctacccggagtctctcatctttcaccaagaaacctcggcgaacctgcgactgacgcgttgccagcctccgcaagaacaactctgcccagcaagtggagctggggatgaggaaaacttcatgataagggtaaagaactcgaacccaggctctgcgacgtccccaagctgtccgggtccctggaccccgcaggaatcaaggggaaccgagagaggacggaggagaacgcgagaggccggatccacccctacagatgaagatccaaactccgaggcgtttcctcgcaagcccagtcagccagcaacttccacgtcggactccaggcgggggcgggagcgagggtcagctgcgactgcgcgcctgggaactggtggcctgatgcatccgcgatcgtcgctttcgactgacggtcccgcgctcacagtaccggaaaaagctcgagcagaggggtcggaaagggaaaacaactacggctgcggtgtggttggtggtgagatgacgaccttagtgctggataatggagcttacaacgccaaaatcggttacagccatgaaaatgtgtcggtgtattcctaattggcagttgcggtcaaaaacagcacgtgttaaaacttttactgccaaccagatagatgaaataaaagacccttctggactcttttacatcctcccttttcaaaagggctacttggtgaattggggatgttcagagacaagtttggggattaccttttttgggaaaagaaatgtatcaggttgattttttagatactaatattattattcactgaaccatactttaacttcacttcaattcaaggaatcaatgaatgaaattctatttgaaggaataccagttttcaagcagtatttaaggaggtaaatgctggggctctcagtgcacataggtatttccgagataatccttccgaattatgctgtatcattgttgatagtggatattcctttacacatatagttccttattgtagaagtaaaaagaaaaaagaa

SEQ ID NO: 12460 - DNA, 1449 bp, Homo sapiens
  SIMILAR (565)..(1758): 881254mologous to Homo sapiens putative p150,accession number U93563,Smith-Waterman Score=1863.
atggagaaaaaaatcactggatataccaccgttgatatatcccaatggcatcgtaaagaacattttgaggcatttcagtcagttgctcaatgtacctataaccagaccgttcagctggatattacggcctttttaaagaccgtaaagaaaaataagcacaagttttatccggcctttattcacattcttgcccgcctgatgaatgctcatccggagttccgtatggcaatgaaagacggtgagctggtgatatgggatagtgttcacccttgttacaccgttttccatgagcaaactgaaacgttttcatcgctctggagtgaataccacgacgatttccggcagtttctacacatatattcgcaagatgtggcgtgttacggtgaaaacctggcctatttccctaaagggtttattgagaatatgtttttcgtctcagccaatccctgggtgagtttcaccagttttgatttaaacgtggccaatatggacaacttcttcgcccccgttttcaccatgggcaaatattatacgcaaggcgacaaggtgctgatgccgctggcgattcaggttcatcatgccgtttgtgatggcttccatgtcggcagaatgcttaatgaattacaacagtactgcgatgagtggcagggcggggcgcactggcagtaccgcagtgaccaaaacaaagtccctacctccattggagcttgtatcacaggggcaataaccatggctttgctagaaaacttggtagcaggaaatgtgtacattgtcaagatatctgcatccaatgaggtgggagaaggacccttttcaaattctgtggagctggcagtacttccaaaggaaacctctgaatcaaatcagaggcccaagcgtttagattctgctgatgccaaagtaacagtgcctgaaatgcctgagtcgctgagaacaccacgggacatatggaaatcatctgcttccaagacggcacagaatggaactcaacagttacctcgtaccagtgcctccttagctagtggaaatgaggtaggaaagaacctggaaggagctgtaggaaatgaagaatctttaatgccaatgatcatgccaaacagcttcattgatgcaaaggcaccgtgtatgaaatctaacaatgcgctcatcgtcatcctcggcaccgtcaccctggatgctgtaggcataggcttggttatgccggtactgccgggcctcttgcgggatatcgtccattccgacagcatcgccagtcactatggcgtgctgctagcgctatatgcgttgatgcaatttctatgcgcacccgttctcggagcactgtccgaccgctttggccgccgcccagtcctgctcgcttcgctacttggagccactatcgactacgcgatcatggcgaccacacccgtcctgtggatctacccactagtcaattcaccatcttgttga

SEQ ID NO: 12461 - DNA, 2450 bp, Homo sapiens
  SIMILAR (613)..(1503): 921254mologous to Homo sapiens putative p150,accession number U93572,Smith-Waterman Score=1471.
cgtttttcctgctcctctgctgctgggccagacttgagctggccccagattctatgtcagaggccatgacccaggtgtcagagcaggccgtaccgctggcctcttctctgaataattatatgggggctggcatgatgttaaactttgtcagtagaaggtgctggagagacattataagagtaaggggcttttgctttccttcctgtttcggttgttcctctgaacgggtttctgcagcattcatagcctccttccaggtcctgcagtgctggcaacatcagtgccaggctctgcaatgccggcagcacccagggcatcttcctttggcactcccctcagaaggtagcaccacagcagcttctctggcatccagtgagccgcagctgtgcactcaccgtgtctccaagattttccccatgttagctccagggcttgggagaaacaaagggctttccctctacctgagttgctcagatccccagtggaaagaccccagaagaaaatatcatgtgagactcctggcttacaacaacatagacgatggctatcaggcagatcagactgtcagcactccaggatgcgtgtctgttcgtgatcgcatggtccctcctccaccaccaccccaccatctctatgcgaaggctaacacctcatcttccatcttcctgcactggaggaggcctgcattcaccgctgcacaaatcattaactacaccatccgctgtaatcctgttggcctgcagaatgcttctttggttctgtaccttcaaacatcagaaactcacatgttggttcaaggtctagaaccaaacaccaaatacgaatttgccgttcgattacatgtggatcagctttccagtccttggagccctgtagtctaccattctactcttccagaagcaccagcaggcccaccagttggagtaaaagtgacattaatagaggatgacactgccctggtttcttggaaaccccctgatggcccagaaacagttgtgacccgctatactatcttatatgcatctaggaaggcctggattgcaggagagtggcaggtcttacaccgtgaagtagataaacagcaggggatggtccataggtttagatccaaaattaaaatgtttgcagataaacatcctagcaagtgtacagaagcaatgaaaagtagctcaatgttagtgaaacaccattctatttctgcatttgaagtccagccaatttccactgaggtccacgaaggtggagttgctcgatttgcatgcaagatttcatcccaccctcctgcagtcataacatgggagttcaatcggacaactctacctatgactatggacaggataactgccctaccaacaggagtattgcagatctatgatgtcagccaaagggattctggaaattatcgttgtattgctgccactgtagcccaccgacgtaaaagtatggaggcctcgctaactgtgattccagctaaggagtcaaaatccttccacacaccaacaattatagcaggtccacagaacataacaacatctcttcatcagactgtagttttggaatgcatggccacaggaaatcccaaaccaatcatttcttggagccgccttgatcacaaatccattgatgtctttaatactcgggtacttggaaatggtaatctcatgatatctgatgtcaggctacaacatgctggagtatatgtttgtcgggccactacccctggcacacgcaactttacagttgctatggcaactttaactgtattagttaagaaggatgataggtacatatattttaagtgtgtctatatagatgctctgaatagggaaatcatggaggaagtgaacactgagcaatgccgagaaaaggcacctggagagatgtatggagatgtagacaggagctcagcatctcctccttcatttgttgaatggccagaaagtttaacaaggcctcgagctggcactgctcgatttgtgtgtcaggcagaaggaatcccctctcccaagatgtcatggttgaaaaatggaaggaagatacattcgaatggtagaattaaaatgtacaacagtaaattggtaattaaccagattattcctgaagatgatgctatttatcagtgcatggctgagaatagccaaggatctattttatctagagccagactgactgtagtgatgtcagaagacagacccagtgctccctataatgtacatgctgaaaccatgtcaagctcagccattcttttagcctgggagaggccactttataattcagacaaagtcattgcctattctgtacactacatgaaagcagaaggtccccaatcacttttaccagagattgtaaattccttgagttcagagaacatgtcttacttgtctgtgttgctaacagccagaacagtgccctgcatacaacaggcactcgataaaggtttacttgaatga

SEQ ID NO: 12462 - DNA, 3330 bp, Homo sapiens
  SIMILAR (1102)..(2040): 761254mologous to Homo sapiens putative p150,accession number U93569,Smith-Waterman Score=1185.
atggcagaagtaacaggaacaaagagagggcgcacaaaagagacactgtacaccaaacatcatttggctcagcggtattcaggggagaccgaggaaaggatccatatagttctgaggtttctggcccgtaaagtagataaacagcaggggatggtccataggtttagatccaaaattaaaatgtttgcagataaacatcctagcaagtgtacagaagcaatgaaaagtagctcaatgttagtgaaacaccattctatttctgcatttgaagtccagccaatttccactgaggtccacgaaggtggagttgctcgatttgcatgcaagatttcatcccaccctcctgcagtcataacatgggagttcaatcggacaactctacctatgactatggacaggataactgccctaccaacaggagtattgcagatctatgatgtcagccaaagggattctggaaattatcgttgtattgctgccactgtagcccaccgacgtaaaagtatggaggcctcgctaactgtgattccagctaaggagtcaaaatccttccacacaccaacaattatagcaggtccacagaacataacaacatctcttcatcagactgtagttttggaatgcatggccacaggaaatcccaaaccaatcatttcttggagccgccttgatcacaaatccattgatgtctttaatactcgggtacttggaaatggtaatctcatgatatctgatgtcaggctacaacatgctggagtatatgtttgtcgggccactacccctggcacacgcaactttacagttgctatggcaactttaactgtattagaaagtttaacaaggcctcgagctggcactgctcgatttgtgtgtcaggcagaaggaatcccctctcccaagatgtcatggttgaaaaatggaaggaagatacattcgaatggtagaattaaaatgtacaacagtaaattggtaattaaccagattattcctgaagatgatgctatttatcagtgcatggctgagaatagccaaggatctattttatctagagccagactgactgtagtgatgtcagaagacagacccagtgctccctataatgtacatgctgaaaccatgtcaagctcagccattcttttagcctgggagaggccactttataattcagacaaagtcattgcctattctgtacactacatgaaagcagaaggtttaaataatgaagagtatcaagtagtcatcggaaatgacacaactcattatattattgatgacttagagcctgccagcaattatactttctacattgtagcatatatgccaatgggagccagccagatgtctgaccatgtgacacagaatactctagaggatgccaaatatcggcggggccaagtggtgctgtatcgcttgtctttccgcctaagtactgagaattcaatccaagttctggagctcccggggaccacgcatgagtaccttttggaaggcctgaaacctgacagtgtctacctggttcggattactgctgccaccagagtggggctgggagagtcatcagtatggacttcacataggacgcccaaagctacaagcgtgaaagcccctaagtctccagagttgcatttggagcctctgaactgtaccaccatttctgtgaggtggcagcaagatgtagaggacacagctgctattcagggctacaagctgtactacaaggaagaagggcagcaggagaatgggcccattttcttggataccaaggacctactctatactctcagtggcttagcgtttttcctgctcctctgctgctgggccagacttgagctggccccagattctatgtcagaggccatgacccaggtgtcagagcaggccgtaccgctggcctcttctctgaataattatatgggggaccccagaagaaaatatcatgtgagactcctggcttacaacaacatagacgatggctatcaggcagatcagactgtcagcactccaggatgcgtgtctgttcgtgatcgcatggtccctcctccaccaccaccccaccatctctatgcgaaggctaacacctcatcttccatcttcctgcactggaggaggcctgcattcaccgctgcacaaatcattaactacaccatccgctgtaatcctgttggcctgcagaatgcttctttggttctgtaccttcaaacatcagaaactcacatgttggttcaaggtctagaaccaaacaccaaatacgaatttgccgttcgattacatgtggatcagctttccagtccttggagccctgtagtctaccattctactcttccagaagcaccagcaggcccaccagttggagtaaaagtgacattaatagaggatgacactgccctggtttcttggaaaccccctgatggcccagaaacagttgtgacccgctatactatcttatatgcatctaggaaggcctggattgcaggagagtggcaggtcttacaccgtgaaggggcaataaccatggctttgctagaaaacttggtagcaggaaatgtgtacattgtcaagatatctgcatccaatgaggtgggagaaggacccttttcaaattctgtggagctggcagtacttccaaaggaaacctctgaatcaaatcagaggcccaagcgtttagattctgctgatgccaaagtttattcaggatattaccatctggaccaaaaatcaatgactggcattgctgtaggtgttggcatagccttgacctgcatcctcatctgtgttctcatcttgatataccgaagtaaagccaggaaatcatctgcttccaagacggcacagaatggaactcaacagttacctcgtaccagtgcctccttagctagtggaaatgaggtaggaaagaacctggaaggagctgtaggaaatgaagaatctttaatgccaatgatcatgccaaacagcttcattgatgcaaagggaggaactgacctgataattaatagctatggtcctataattaaaaacaactctaagaaaaagtggttttttttccaagactcaaagaagatacaagttgagcagcctcaaagaagatttactccagcggtctgcttttaccagccaggcaccactgtattaatcagtgatgaagactcccctagctccccaggtcagacaaccagcttctcaagaccctttggtgttgcagctgatacagaacattcagcaaatagtgaaggcagccatgagactggggattctgggcggttttctcatgagtccaacgatgagatacatctgtcctcagttataagtaccacaccccccaacctctga

SEQ ID NO: 12463 - DNA, 1362 bp, Homo sapiens
  SIMILAR (418)..(2175): 821254mologous to Homo sapiens putative p150,accession number U93569,Smith-Waterman Score=2406.
atgggcatggtggaaaagtggctccagcaggtggagcagatgatgctggccagtatgcgagaagtcattggacttgggattgaagcatatgtcaaggtccctcgaaatcactgggtcttacagtggcctggacaggtggttatctgtgtctcctccatcttttggacccaggaggtgtcccaagccctggcggaaaataccttactggatgggaatgattttaaggagccctaccaagagatgaagtttttcatacctcagctaatcatgatcaaacttgaagtcagtgaacccattattgtcttcaatccatcttttgatggctgctgggaattaatacgtgactctttcctggaaattattaagaactctaatgggatccccaagctgaaatacataccacttaagttctccttcactgctgctgctgctgatcggcaatgtgtgaaagcagctgagccaggagagcccagcatgcacgcggctgccactgcaatggcaggtaccagggccggtactacatttgatgaattacaatgccaagaagacatggtttgtaccaggtgtgggatgatctacatggagccccatcaactaggctggaagcccctgaaggattcctacatggacaccctgccctccagtctcaccaaggagcacaaagaattgagatactattactatctgaccaatggaattcgcaaagacatgattgcccctgaggagggtgaagtgatggttcggatttcaaagctgatttctaacacgctgctgacgagtcccttcctggagcccctgatggtggtcctcgtgcaggagaaggagaatgactattactgtagcctcatgaaaagcatcgggccgaatcttatttatttaccgctaagggtttataatctcgcgttctcggatacatccgtcgacaaagtcttcctacccttcagttccgataaagatacaaacatcttgtgtgcaattgatgacattcaaatgctacttgatgatcacgtgataaagacccagaccatgtgtggctccccattcatcaaaccaatagaagcagaatgccggaaatgggaagaaaagctaattcgcatacaagacaatttggatgcctggttgaaatgccaagccacctggctgtacctggaaccaatcttcagttcagaggacatcatagcccagatgccagaagaggggaggaaatttggcattgttgatagttactggaaatcacttatgtcccaagcgatctgtgctgatgatttgaaagccgcactaagtgcgaatttagccttgccggtcgtgcgctgcttcagcgctgccacaacaacgaaccatctatatagaaagaaagaataa

SEQ ID NO: 12464 - DNA, 675 bp, Homo sapiens
  SIMILAR (385)..(675): 971254mologous to Homo sapiens 16-SEP-1998 Human stomach protein zsig28 DNA,accession number Z52249_cd1,Smith-Waterman Score =508.
atgctgcaggcagtgcgagccctgatgatcgtaggcatcgtcctgggtgccattggcctcctggtatccatctttgccctgaaatgcatccgcattggcagcatggaggactctgccaaagccaacatgacactgacctccgggatcatgttcattgtctcaggtctttgtgcaattgctggagtgtctgtgtttgccaacatgctggtgactaacttctggatgtccacagctaacatgtacaccggcatgggtgggatggtgcagactgttcagaccagggtacctgatcagttggctgtgacccacaggaatgtgtgttcaggggcatggtcagggatggatgtggaatccaaaagtggggacagaaagaacaggcacagccaggtgcagtacacatttggtgcggctctgttcgtgggctgggtcgctggaggcctcacactaattgggggtgtgatgatgtgcatcgcctgccggggcctggcaccagaagaaaccaactacaaagccgtttcttatcatgcctcaggccacagtgttgcctacaagcctggaggcttcaaggccagcactggctttgggtccaacaccaaaaacaagaagatatacgatggaggtgcccgcacagaggacgaggtacaatcttatccttccaagcacgactatgtgtaa

SEQ ID NO: 12465 - DNA, 1284 bp, Homo sapiens
  SIMILAR (607)..(1515): 911254mologous to Homo sapiens p40,accession number U93564,Smith-Waterman Score=1422.
atgggacatgatggcctctcggaacctgaagtcccagcctgggagggcagccctggggtggctgtgaaggtggaggagcccaggtataaaaaggacaagcagctcaatgagaaaatctccctgctccgcagcgacatcaccaagctggaggtggacgccatcgtcaacgccggcctctgtttcctcctctgcaaaatgagggtggtgaagaaaccacccgtcaggttactgggggcactcggagctgatgcacgtgacgtgcaaatgacggtcactcagcacctggcgggaatcggggctcagcacctcgcactggtgctgaaactggtgtcatcagcgccgttctgggcatcacccctgtcccagcggtgccgagggacatgcaccggcagcccctgcctcatcctctcctgccgcctggagggcccagcagagcctggcctgtgggcaggggagatggccgggccagcgacgagtccagggctggctgtacagcagactttgcagctggaacctgttagcgacatgggcctggccctgggctccctcctcctcggggaagccaagcgcaggggcctccggaccagtgaccccagtcaaacccagagggtcttgggcggcagcgacgaaggagggcaggagcagcccaagagagaccactctaaggctgtgactaccaaccaagcctttattgagcacctactgcatgccaggccctgttcagatggggaacatgcagcaaatgggaccgagagccccctgccctgtggagctcacgtgctgcctgccggcagctcccctgtgctccggaagcactggacacagccccagcacctgctgcaggaattaatgaaacgaatgaatgactgttacagactacatgggagcgacagcaaacccaggtctggggaagttcctggaggggagggtttctcagctgggacctggaggacggtcggagtcagccaaggaaatggaggagagggtgctcctgacagagagggcttatttttcacttacactgagaagtctacactgccagtggctggcaaggtgccccagatggcacctgaggggagccagctggcatacccgggcatcgcagaggacagaatgactctcgccatcccagggtgtctaagcacattgtcacctctgactctgggcatctaccagtccaaggagcaacactccttccccctacaccctgagggggtcccgggggtctgcgtccagctgacggaattagctgatggactggatgcgggctgtgaaagaggatga

SEQ ID NO: 12466 - DNA, 402 bp, Homo sapiens
  SIMILAR (112)..(273): 751254mologous to Homo sapiens ribosomal protein L35,accession number U12465,Smith-Waterman Score=206.
atgtggccgagaggaaaaggtgtcaggtctcagggatgctgggagctccggctctgcctggctggcttcattatagaccaggcagaaacacaagagcacccgtccacagcccgcagagaaaacctcaggaaattctacaagggcaagaagtaccagcccgtggacctgcagcctaagaagacatgcgccatgagccactgtctcaacaagcacgaggagaacctgaagggcaagaagcagcagtggaaggagtggctgtccccgctgaggaaggaggaaggagcgcctgtccctgctgaggaagggctgcccggctgtcctggcatccagcccagaaaagctgcgctccctgggaacggcttggagcagatgagcgcttacagcattgcaccatcctggtaa

SEQ ID NO: 12467 - DNA, 402 bp, Homo sapiens; identical to SEQ ID NO: 12466
  SIMILAR (112)..(273): 751254mologous to Homo sapiens ribosomal protein L35,accession number U12465,Smith-Waterman Score=206.

SEQ ID NO: 12468 - DNA, 573 bp, Homo sapiens
  SIMILAR (573)..(304): 1001254mologous to Homo sapiens Human signal peptide containing protein HSPP-97 SEQ ID NO:97,accession number Y87320,Smith-Waterman Score=436.
tttttttcagaatacatttctttcttaatctttgtgagtacataccaccatactggtggcaatggcggtgagagcctctgtggaccagggaagctgtggtgtgagttccatgctagctctataagccaggctctggggcagcatccaagacgctctgtattagatactgaccagtctcatgtgccactggtgaggaggaagacaacgtgcttttcccaaagggcgatgatctccccagatgatgacccttctcaggaggcaggagcgctttcccggaataaccttttggctccttattcagctctgactttcatggagaatggcaactgtcttctccagctttttcagctgggcaagctcctggttcaggcaagccacctgcatggtcagctgttggtttttgtgcagaagatcatcataagtatgtgactgttgcccactcacaattgagatggcagcaccttcctccaactgttgaattttttctgacaaaatgaggttttcctccagcactctgaccagtttttgcttcaaactttccgagaaacttcttgttgaggaggagggagccgg

SEQ ID NO: 12469 - DNA, 1480 bp, Homo sapiens
  SIMILAR (1570)..(2889): 921254mologous to Homo sapiens putative p150,accession number U93563,Smith-Waterman Score=2073.
atggcggagcaatgggagctggacgaggaaggcattcgccgcctgggggcgctgacgctggagcagccggaactggtggagtctctttcattgcagggatcttatgctggcaaaatccattccattggtgatgccttcagaaattttaaaaatctccgatccttagatttatcaaggaatttgatcactagccttaagggaatccagtatttatgttcactccaagacctgaatttatattataacaacattccttcattagtggaagtgtcccgtctacaaccgttacccttcctcaaagaactggatttgagacttaatcctgttgtaaggaaagatacagattataggctctttgctgtatatacactacaaactctggagaaattagatgaccgaactgtacgtgaaggtgagagaaaagctgccaagctgcattttagtcagttgggcaacagtgaaaattttcttttagaggtggaaaaaagctctagggagaagacaatgaaaaactgtgtaacagatctgtatgccacaacccatttcaacagtgaccctgctgtacttgtcaatgtagagcaacaattatctaccagcctggatgatttaacaccagcacatggttctgtcccaaacaacgctgtcctgggaaacaggacaactcctctgcggacactgctgttgtctcctgggacttcagaacacagaaagatttttaccaagaggtcactaagcccatcgaagagaggattcaaatggaaggacaatatccttgccaacctgaatctaaagcatggtttccaagatgctaacaggcagcgaggcaagtgttggcttgtttgtgtttgtgcgagaaacaggtcaggaaagtttgaagcaaaaactggtcagagtgctggaggaaaacctcattttgtcagaaaaaattcaacagttggaggaaggtgctgccatctcaattgtgagtgggcaacagtcacatacttatgatgatcttctgcacaaaaaccaacagctgacccatgcaggtggcttgcctgaacccaggagcttgccccagctgaaaaagctggagaagacagttgccattctccatgaaagtcagagatcccctggtggtaacataatgagtattctgctgcagcagcttgaataaggagccaaaaggttattccgggaaagcgctcctgccatcctgagaagggtcatcatctggggagatcatcgccctttgggaaaagcacgttgtcttcctcctcaccagtggcacatgagactggtcagtatctaatacagagcgtcttggatgctgccccagagcctggcttatagagctagcatggaactccccccccagcttccctggtccacaaaggctctccccgccattgcccccagtatggtggtatgtactcccaaagattaaaaaagaaatgtattttgattaaaaaaaaaaaaaaaaaaaaaaaaaaaaaaaaaa

SEQ ID NO: 12470 - DNA, 463 bp, Homo sapiens
  SIMILAR (67)..(20): 431254mologous to Homo sapiens Human secreted protein encoded by gene 94,accession number Y36317,Smith-Waterman Score=44.
ctctcttccatccttgccaagacagccagcaacatcattgatgtgtctgctgcagactcacagggcatggagcagcatgagtacatggaccgtgccaggcagtacagacatacagggcatcacactgaaaaggagctgtgatctgagggtcaggagtgtgggcctgggtaccagcactgccactgacttgcctctctctcagccttagttgccccttcactgaagacctttccagctttggtgatctacgattctatcacagcaagcaacaggaagacagagcatcatgctaggcacataagaagcttttaaaatactggttaaattgagatcaccacaccaggggaatagtgtccaagtcatgctccagctcctttcccctcttagggatcttggaatagaaaaggccaaacattgttaaaatcttaaaacttgaatctgaatatacacagaaaaaaaaaaa

SEQ ID NO: 12471 - DNA, 1443 bp, Homo sapiens
  SIMILAR (280)..(474): 961254mologous to Homo sapiens Human secreted protein, SEQ ID NO: 5090,accession number G01009,Smith-Waterman Score=318.
  misc_feature (1)...(1443): n = a,t,c or g
ctgcctcagattcaggtctgttcagctttgacagtgttcccatcatcactggacaagggacaagaacagtctcatccagtctgaggttagcccaagccaggtctcagctaagagctgacaccctaaacccttgtctcttgggttcatcttcaatatccctggaagatgtccccttccccccatcttactctcatagacctaagtaatcaaaagtagaatgggtagaacagaggggccagaaccagcacatggatgaatatacttccctttatcagagggtgacaaaccaaaacacaaaaagaccaaacatgtaaaaacccagggttctagaaatacaaactcaattcattcaaattcaaggctcatccagaccctggtcacaaaccatagtgaggtgcatcgtcgagcaccaagtcagggagagggggcaggagtgactctgaggccaacagagagggtgggaagggggatctccctaggtcccctgggtgatcaccccccacccaaactgggtatcttccacattctcaaatgactatggaatacataccaaggctcttgtccttttgggcccccaccccatccctggggccaggagctttcaaagggccagttccccaaaaggtttttacccttcactttgctcaggcttctaagccttcctcttcttcctccttcttcacattttctcctgtgattagtaagcaggttagggtactgtataagccgcaagtgaaggctggggggccaagggggtggggtagagatgggatgaagagaggagaagagcctgtccaaggacccccnctcttcatgggatccccaaactttacaaccagctcctcttttgcgtccaccacggatctgaaaaaanttgcaactgtaggcataaccaggctatccttgaagacctgctgcaaaaatcagagaacgggaatgggctcaactggccagcacttggtggggctggctggtaaagagacggcagcggtggcaagcttcttccaaatgggtcaaggctgctgctcaagcaacacccaaagcgggtgctgtactgcctggcacggtccaatgtactcatgctgctccatgcccctgtgagtctgcaagcagacacatcaatgatgttgctggctgtcttggcaaggatggaagaagagcagggcctgctcatcagtgcgagcggaaggcaggctgtggtagttgggctcggctccattgagagctttggtaggggggggctgactagggtccagacagacagcttccgctcctctgcggtcctggtccgagtcctcgttcctcgctgctgtagcagcaccccatggccgggctcgggccggccgctcaggccgcgccgaggagggacggcgtccgtgaggagcccttccggtcacatgacccgcggcggcctcccgcaggcaaccacccgcccccaccccc

SEQ ID NO: 12472 - DNA, 426 bp, Homo sapiens
  SIMILAR (258)..(560): 961254mologous to Escherichia coli proton-glutamate,accession number M84805,Smith-Waterman Score=478.
cttcacttcctgaaagtcccgcagtcttcgaatgtctttgtcctttctgagcagtgtgtttggtagctttctgatcttctccactcgttctggtttaatccccagttcacagcaactcacgtttagtaggttttggtaactcagttcttgtctcttcagttcaatttcaatgaagtcattttctttggggttctgaattctgactttaaacacaagctctagacaggtgtcactgggtttcttgttatcacttgggtccgttgttggcaagtgtggatttgtgccttcttgtttatattcacctgctggcttctccccgatgtcctgttccggttcagccatgagtcacctctagtccgtcagatgtgcagcccctctcgcatttatgcacaagctcccaaccaaataaaaagcactttctacagc

SEQ ID NO: 12473 - DNA, 1278 bp, Homo sapiens
  SIMILAR (202)..(498): 811254mologous to Escherichia coli K12 possible NAGC-like transcriptional regulator,accession number AE000145,Smith-Waterman Score=395.
atggaaaccgtgttgtttacgtttcacagatttgccggggataaaggctacttaatgaaggagggcctgaaagtactcatgggaaaggagttccttggatttttggagaatcaaaaagaccctctggctgcagacataacaatgaaggacatggaccagtgccaagacagcacactgaacttccagaacttgttttcactcactgcggggctcaccactgtggacaacaactattttgtagtacctatgaagcagaagggaacgaagcaggcagaactaagcaattactcagcccttatagacacacaacacacttccggatccagtggtggggtgcagatagggcaagcacaggacaacatcctcttcagagaagggaagaacagaagatgcaaagcaggctctgatgacagcgatgatgccatttggccagagagacggcgcgagagccccagtgggaaccacccggagacccagaagatcgaattcgccactgcgctgcgcggccgccacactcgccgggatcggccgggtttgaagacgcgccatggaagccagaggggtctgacgatggggacctctcggagcgtcgtcgccctgctactgcgccttggcggccgcgctccatctggaggcttcctcgtgacgcatacgcagcctggccgccaagaagaccgtcgcctgcctgggacagccaccctggacacccagaagccaggagatttccaaaagacacaccagcatgctgggaagacagcatcggcctggcagccaggtgacccaggtccagtgccaggcctgtgcctggctggccacgtgactagtggtgaatataaacaagaaggcacaaatccacacttgccaacaacggacccaagtgataacaagaaacccagtgacacctgtctaggtattttgtttcctttacaaactgtatttgaatttatgggtgatttagagcttgtgtttaaagtcagaattcagaaccccaaagaaaatgacttcattgaaattgaactgaagagacaagaactgagttaccaaaacctactaaacgtgagttgctgtgaactggggattaaaccagaacgagtggagaagatcagaaagctaccaaacacactgctcagaaaggacaaagacattcgaagactgcgggactttcaggaagtggaactcattttaatgaaaaatggaagctccagattgacagaatatgtgccatctctgacagaaaggccctgctatgatagcaaagctgcaaaaatgacttattaa

SEQ ID NO: 12474 - DNA, 777 bp, Homo sapiens
  SIMILAR (643)..(1260): 421254mologous to Bacillus subtilis YtqA,accession number AF008220,Smith-Waterman Score=457.
atggtggtggtggtgatgatggtggtggtggtggtggcagcaatgatggtggtggcagcgacatccagcatccaccatgggcaatatcggagctcctatcagccggaatcaggttttgtggccttcagtgaagaaccgtcactgacgcgctctgtgcatggccttgggcttctccggagctcattcttgcttcgggcgttcaccctctatagagctcagacacagcccatcagctctgagctgcagaaaagccaaggcaaccctggcagggtctgcgtttacttctttcacttgcttctgctcggggtggaggagtgggactggggaggccagcggagccttccaattcctccccagggcagagggggaatggaagtcctggcggtggagctggagctccgcatcctcctggccctgctcagtggctgtgatgctgggccccaaaccaccctattgaggtctgacgggggagaggagagcagccagtctggacgatgggtggccgacaggaggcaaaagcaagaggggaagctggctgaaatttctgtatttccactcagtttctccaacaaaacctgctggttgaagctgaattatccggggactgtggacgctggcagtgaattgtgtctggcggaaagcactcaggctcttgaatctaacaggccaggttggggctggcagccctccactactttctgttccttcgtcaacgttgactcttgccttggacagaccgagctgctgactggccccttctctccactctctggctag

SEQ ID NO: 12475 - DNA, 3507 bp, Homo sapiens
  SIMILAR (1)..(369): 1001254mologous to Escherichia coli glutathionylspermidine synthetase/amidase,accession number U23148,Smith-Waterman Score= 659.
atggttggatactttcgcctttggatacctggttttgccatcctaacaaaaccattatataaactcacaaaaggaaacttagctgaccccatagatcctaaatcctttccccactcctctttctgttccttgaagacagctttagaaactgcccccactctagctctccctgactcatcccaacctgcttcattacacacagccgaagtgcagggctgtgcagtcggaattcttacacaaggaccaggatcgcgtcctgtagcctttttgtccaaacaacttgatcttactgttttaggctggccatcatgtctccgtgcagccgctgctgctgccctaatacttttagaggccctcaaaatcacaaactatgctcaactcactctctacagctctcataatttccaaaatctattttcttcctcacacctgacacatatactttctgctcccggactccttcagctatacttacactttgttgagtctcccacaattaccattgttcctggcccggacttcaatccggcctcccacattattccggataccacacctgaccctcatgactgcatctctctgatccacctgacattcaccccatttccccacatttccttcttccctgtttctcaccctgatcacacttggtttattgatggcagttccaccaggcctaatcgccactcaccagcgaaggcaggctatgctatagtatcttccacatctatcattgaggctactgctctgcctccctccactacctctcagcaagctgaactagttgccttaactcaagccctcactcttgcaaaaggactatgcgtcaatatctatactgattctaaatatgccttccatatcctgcaccaccatgcagtcatatgggctgaaagaggtttcctcactacacaagggtcctccatcattaatgcctctttaataaaaactctgctcaaagccgctttacttccaaaagaagctggggtcattcactgcaaggggcatcaaaaggcatcagatcccattgctctaggcaatgcttatgttgataaagtggctagacaagcagctagctctccaacttctgtccctcacggccagtttttctccttcacttcagtcactcccacctactcccccactgaaacttccacctatcaatctcttcccacacaaggcaaatggttcttagaccaaggaaaatatcttcttccagcctcacaggcccattctattctgtcatcatttcataacctcttctatgtagacataattcctcggtttggccttcccacctctatacagtctgataacggaccagcctttactagccaaatcacccaagtagtttctcaggctcttggtattcagtggaaccttcataccccttaccgtcctcaatcttcaggaaaggtggaacggactaatggtcttttaaaggcacacctcaccaagtttagcctccaacttacaaaggattggacagcacttttacctcttgctcttctcaaaatcagagcctgtcctcgagatgctacaggatacagtccatttgaacttttatatggacgcactttcttgcttggccccaacctcatcccagacaccagccctctaggcgactatcttccagtactccagcaggctagacaggaaattcgccaggctgctaatcttctcttgcctactccagatccccagccatatgaagacaacctagctggacgatcagttcttgttaagaatctgacccctcaaactctacaacctcgatggaccggaccctacttagtcatctatagtaccccgactgccgtctgcctgcagaatcctccccactgggttcaccattccagaataaagctgtgtccatcggacagccagcctaatccctcctcttcctcctggaagtcgcaagtactctcccccacttcccttaaactcactcatatttctgaagaacatgcctacacagctgtccccgccttacagacagactgggcaacatctcccatctccctacacctccgaacttcctttaacagccctcacctttaccctcctgaagaactcatttactttctagacaggtccagcaagacttccccagacatttcacatcagcaagctgccgccctccttcgcacttatttaaaaaacctttctccttatatcaactctactccccccatatttggacctctcacaacacaaactactattcctgtggccgctcctttgtgtatctcttggcaaagacccactggaattcccctaggtaatctttcaccttctcgatgttcctttactcttcatctccgaagtccaactacaaacatcaatgaaacaattggagccttccagctccatattacagacaagccctctatcaatactgacaaacttaaaaacattagcagtaattattgcttaggaagacacttgccctgtatttcactccatccttggctatcttccccttgctcatcagactctcctcccaggccctcttcttgtttacttatacccagccccgaaaataacagtgaaagattgctcgtagatactcgacgttttctcatacaccatgaaaatcgaaccttcccctctacgcagttaccccatcagtccccattacaacctctgacagctgccgccctagctggatccctaggagtctgggtacaagacacccctttcagcactccttctcacctttttactttacatctccagttttgcctcgcacaaggtctcttcttcctctgtggatcctctacctacatgtgcctacctgccaattggacaggcacatgtacactagtcttccttacccccaaaattcaatttgcaaatgggaccgaagagctccctgttcccctcatgacaccgacacaacaaaaaagagttattccactaattcccttgatggtcggtttaggactttctgcctccactgttgctctcggtactggaatagcaggcatttcaacgtctgtcatgaccttccgtagcctgtctaatgacttctctgctagcatcacagacatatcacaaactttatcagtcctccaggcccaagttgactctttagctgcagttgtcctccaaggacaactccgaggccttgacttactcactgctgaaaaaggaggactctgtatattcttaaatgaagagtgttgtttttacctaaatcaatctggcctagtgtatgacaacataaaaaaactcaaggatagagcccaaaaacttgccaaccaagcaagtaattatgctgaatccccttgggcactctctaattggatgtcctgggtcctcccaattgttagtcctttaatacccatttttctccttcttttatttggaccttgtatcttccgtttagtttctcaattcatccaaaaccgtatccaggccatcaccaatcattctatacgacaaatgtttcttctaacatccccacaatatcaccccttaccacaagacctcccttcagcttaa

SEQ ID NO: 12476 - DNA, 741 bp, Homo sapiens
  SIMILAR (630)..(283): 951254mologous to Homo sapiens lectin-like receptor F1,accession number AF175206,Smith-Waterman Score=562.
tcaatttgcaaataggaccgaagagctccctgttcccctcatgacaccaacacgacaaaaaagagttattccactaattcccttgcttgttggtttaggactttctgcctccactattgctctcggtactggaataggaggcatttcaacctctgtcacgaccttccatagcctctctagtgtcttctctgctagcatcacagacatatcacaaactttatcagtcctccaggcccaagttgactctttagctgcagttatcctccaaaaccaccgaggccttgacttactcactgctgtctggtctgcagatctcgaagcacaaaggtccttattacttatatttcttcttgtgccattattcacttgtagatctccagtgtcctcatactgagtggcatttgaacaacttcctttttggcattttagcaatactccctgagaaaccaacaggatcaaggagatcaaagtcaaagtgagaataccattcacggttccagatattcccagtaagattttataccagtgcaacgtcactgaataatctttaaatgtaagttgagatgtttgggcagaactccttttctttgactgtacattcaatgtcatgtatctttcttcatcttgcatcttcaatgtgagtgaatgtgtgtgtacacaggtatgttttgttttattaagtataacttaaaaaaaggaaagaataataaatctgctgctaatcagagcgcacgcgtgggt

SEQ ID NO: 12477 - DNA, 885 bp, Homo sapiens
  SIMILAR (358)..(681): 581254mologous to multiple sclerosis associated retrovirus polyprotein,accession number AF009668,Smith-Waterman Score=298.
atggagacagaaactggagttatgcagccacaatctaaggaagacctggaaccaccagaaactgcaagagtcaaggaagggttctcccatagagcctctggaaagaacctggccttggccaaccttgattccagacttctggccttcagaatgctgcttatgctgcagttctctcaaccactgtggagggatctaaaaccagctgtaaccagtcagggaaccaagaaatgtagcaggacgagctgcagacaaaatccctcagacaccaagatagtgaagggagtggctttaatcagctggaagcatcggcagactagcgtcttaaaatccaggcttctcagggaccagtgtaagcctcttccccctgggaccagcaccgagttagcacttacccgagccttagaactgggaaaaggaaaaagaacaaatgtgtatacagatagcaagtgtgcttacctaatcctacatgcccatgctgcaatatggaaagaaagggcattcctaacatctgggggaacctccattaaatatcacaaggaaaccatggagttattgcatgcagtgcaaaaacccaaggagttggcagtcttatgctgccaaagccatcaaaaggggaaggagaggggagaacagcagcacaagcagctggcagaggcaaaggaaagaccagccagaaaggaaagagaaagagacagaaagagagaaagaaaaagaaagagagacaaagtcaaagacagaagaaggtaccttcttttgctggtgctctctcgtgtttttgtgtttctgtgtttcttcattcgtttcttcggttcgtctctgctttgtactgctttttctctctgctctcgttctgtcctgcgtcttcgtccctcattctgttcttag

SEQ ID NO: 12478 - DNA, 464 bp, Homo sapiens
  SIMILAR (21)..(383): 321254mologous to Toxocara canis myosin heavy chain,accession number AJ306290,Smith-Waterman Score=126.
aattacaagaagtaaaggcaaggcgtaacacactgcataattagaaggaccatcttgtaaatgattatgagcaaaacatgaaactgttacaaaccaaatatgatgctgatataaaccttctaaaacaagaacatgctctttcagcttctaaggcatctagtatgattgaagaattagagcagaatgtctgtcaattaaaacagcagttacaggaatcagaacttcaaagaaagcaacaactaagggatcaagaaaataagtttcagatggagaaaagtcatctaaaacacatctatgaaaaaaaggctcatgacttgcagagtgaacttgataaaggaaaagaagatactcaaaagaaaattcataaatttgaggaagctttgaaatggaaaaagtggaggcagatctaactagatccaaatctcttcgtgagaaacaatcaaaggagtttttatggcaactgg

SEQ ID NO: 12479 - DNA, 1038 bp, Homo sapiens
  SIMILAR (34)..(786): 251254mologous to Mus musculus golgin-245,accession number AF051357,Smith-Waterman Score=182.
cgacccacgcgtccggaaagaaagaataatgaaatagaagaactgaaaactttatacaggagtaaacaacatgaaactgaagagactattagaaagcttgaaaagaaagttcagacactgatacgtgactgtcaagttatcagagagactaaagaagaccagattgcagagctgaaaaagatatgtgaacaaagtacggaatctctaaataatgactgggaaaaaaagcttcacaatgctgtagcagaaatggaacaggaaaagtttgatcttcaaaagcaacacactgaaaacattcaagaattgcttgaggatacaaatgtgcgtctgaataaaatggagagtgaatacatggcgcaaacacagtccacaaaccacatgatcaaagaactggaggcccgtgtccagcagctgactggagaagcagagaacagtaatttacagaggcagaaattaattcaagaaaaagcagaacttgaaagatgttaccagataacgtgtagtgaattacaagaagtaaaggcaaggcgtaacacactgcataaagagaaggaccatcttgtaaatgattatgagcaaaacatgaaactgttacaaaccaaatatgatgctgatataaaccttctaaaacaagaacatgctctttcagcttctaaggcatctagtatgattgaagaattagagcagaatgtctgtcaattaaaacagcagttacaggaatcagaacttcaaagaaagcaacaactaaggaaaaagatcaaggtggacaaccagcttctccaacatattgggttccctggcagaggacctgtctctgccttaagccacaggaaacattgtgagttcctgaagggagaaatattcctgaggatagccagagacaaagggagagcatctgtgcttctctttgtgcatctgccccgctttcctcttggcatcaacacaactactcgacactttagcttgcgtatggcccgtagtggctgcctagtcaaccttcctcatagaaacgttccaggttttcagcttctgcattga

SEQ ID NO: 12480 - DNA, 498 bp, Homo sapiens
  SIMILAR (204)..(82): 411254mologous to Mus musculus Dominant megacolon mutant Sox- 10 protein,accession number AF047389,Smith-Waterman Score=88.
aggtgagcatcacaaacatcttagtcttcacagccgactgcttatcaccgacatcattctcttggtctcgagggacttcaacctgatgtgagtcatcctcctccttggcatgagtgatcctggaggacaaggtcgaatgggaagatgcgtacagcagggccgcccgggcatactcatcccgctcacggcctcgctcccactctgtcatgctggggtccagacagcgttccagagcatctttctgaccctgtttcatgtgtactaagaactcgtcgtatcgcttttgcttttccggatctttggcgaaaggcttgaagttgctggcttttaaggtggccgtcccaccacctaatgccatgttccaagagcagtgcccagcagccgctgcaggggagggctgggctctgctgctctgagcgttctgggccagactcatggccgtgagctgagctgctttcaggtcagttgcctgcttcatttctttgattctctctttgg

SEQ ID NO: 12481 - DNA, 1086 bp, Homo sapiens; identical to SEQ ID NO: 8486
  SIMILAR (118)..(501): 931254mologous to Homo sapiens Human CCAAT/Enhancer Building Protein (C/EBP),accession number R62381,Smith-Waterman Score=593.

SEQ ID NO: 12482 - DNA, 1122 bp, Homo sapiens; identical to SEQ ID NO: 8484
  SIMILAR (13)..(198): 351254mologous to Saccharomyces cerevisiae SFL2 gene poduct (AA 1-669),accession number X16365,Smith-Waterman Score=110.

SEQ ID NO: 12483 - DNA, 454 bp, Homo sapiens
  SIMILAR (79)..(408): 511254mologous to Homo sapiens actin filament associated protein,accession number AF188700,Smith-Waterman Score=273.
  misc_feature (1)...(454): n = a,t,c or g
tacgtctgcaagnccggnggaannnnctcctgcacctggtgagggaatgcaggatatgcgccttcctgctgcgtttataagtgtttcgggcagngggccaagcagctgagggtcatcagggaggaccagctcctgtgctacaaaagctccaaggatcggcagccacatctgaggttggcactggatacctgcagcatcatctacgtgcccaaggacagccggcacaagaggcacgagctgcgtttcacccagggggctaccgaggtcttggtgctggcactgcagagccgagagcaggccgaggagtggctgaaggtcatccgagaagtgagcaagccagttgggggagctgagggagtggaggtccccagatccccagtcctcctgtgcaagttggacctggacaaggcaaagggaagaagagcagcctggcagaactgaagggctcaatgag

SEQ ID NO: 12484 - DNA, 453 bp, Homo sapiens
  SIMILAR (1)..(375): 681254mologous to Gallus gallus actin filament-associated protein,accession number L20303,Smith-Waterman Score=470.
atgagcagctcctatgagtcctacgatgaagaggaggaggaagggaagagcccgcagccccgacaccagtggccctcagaggaggcctccatgcacctggtgagggaatgcaggatatgtgccttcctgctgcggaaaaagcgtttcgggcagtgggccaagcagctgacggtcatcagggaggaccagctcctgtgttacaaaagctccaaggatcggcagccacatctgaggttggcactggatacctgcagcatcatctacgtgcccaaggacagccggcacaagaggcacgagctgcgtttcacccagggggctaccgaggtcttggtgctggcactgcagagccgagagcaggccgaggagtggctgaagcagacctcatccttgcaccgcctctacttcactctgacaccatcctttcctcctctgatcttcctgctggaacaatga

SEQ ID NO: 12485 - DNA, 474 bp, Homo sapiens
  SIMILAR (7)..(426): 431254mologous to Gallus gallus actin filament-associated protein,accession number L20303,Smith-Waterman Score=256.
ttcacccagggggctaccgaggtcttggtgctggcactgcagagccgagagcaggccgaggagtggctgaaggtcatccgagaagtgagcaagccagttgggggagctgagggagtggaggtccccagatccccagtcctcctgtgcaagttggacctggacaagaggctgtcccaagagaagcagacctcagattctgacagcgtgggtgtgggtgacaactgttctacccttggccgccgggagacctgtgatcacggcaaagggaagaagagcagcctggcagaactgaagggctcaatgagcagggctgcgggccgcaagatcacccgtatcattggcttctccaagaagaagacactggccgatgacctgcagacgtcctccaccgaggaggaggttccctgctgtgaggccctgacactcaacgaaaggaaaagccagctgaccactgtatttctatgctccctgtga

SEQ ID NO: 12486 - DNA, 1410 bp, Homo sapiens; identical to SEQ ID NO: 4326
  SIMILAR (64)..(1398): 771254mologous to Homo sapiens putative p150,accession number U93572,Smith-Waterman Score=1655.

SEQ ID NO: 12487 - DNA, 846 bp, Homo sapiens
  SIMILAR (64)..(846): 621254mologous to Homo sapiens putative p150,accession number U93563,Smith-Waterman Score=762.
atggggaaaaaacagagcagaaaaactggaaactctaaaaagcagagcacctctcctcctccaaaggaacgcagttcctcaccagcaacggaacaaagctggacggacaatgactttgacaaactgagagaagaatggttcagacgatcaaattactctgagctacaggacgatattcaaaccaaagtcaaagaagttgaaaactttgaaaaaaatttagaagaatgtatagctagaataaccaatacagagaagtgcttaaaggagctgatggagctgaaaaccaggctcaagaactacgtgaagaatgcagaagcctcaggaaccaatgcaatcaactggaagaaaggaactagaaaagcaagagcaaacacattcagagctagcagaaggcaagaaataactaagatcagagcagaactgaaggaaatggagacacaaaaaacccttcaaaaaattaatgaatccaggagctggttttttgaaaagatcgacaaaattgatagaccgctagcaagactaataaagaaaaaaagagagaagaatcaaatagacacaataaaaaatgataaaggggatatcaccaccgatccaaaagaaatacaaactaccatcagagaattctacaaacacctctatgcaaataaactagaaaatctagaagaaatggataaattccttgacacatacactctcccaagactaaaccaggaagaagttgaatctctgaatagagcaataacaggagctgaaattgtggcagtaatcaatagcttaccaaccaaaaagagtccaggaccagatggattcacagccgaattctaccagaggtacaaggaggaactg

SEQ ID NO: 12488 - DNA, 1281 bp, Homo sapiens
  SIMILAR (496)..(1281): 961254mologous to Homo sapiens putative p150,accession number U93563,Smith-Waterman Score=1277.
aataaccaatacagagaaccaatacagaaccaatacatctgcttaaaggagcagatggagctgaaagccaagactcgagaattacgtgaagaatgcagaagcctcaggagccgatgcaatcaactggaagaaagggtatcagcgatggaagatgaaatgaatgaaatgaagcgagaagggaagtttagagaaaaaagaataaaaagaaatgaacaaagcctccaagaaatatgggactatgtgaaaagaccaaatctacgtctgattggtgtacctgaaagtgatggggagaatggaaccaagttggaaaacactctgcaggatattatccaggagaacttccccaatctagcaaggcaggccaacgttcagattcaggaaatacagagaacaccacaaagatactcctcgagaagagcacctccaagacacataattgtcagattcaccaaagttgaaatgaaggaaaaaatgttaagggcagccagagagaaagcactaaatgcccacaagagaaagcaggaaagatccaaaattgacaccctaacatcacaattaaaagaactagaaaagcaagagcaaacacattcaaaagctagcagaaggcaagaaataactaaaatcagagcagaactgaaggaaatagagacacaaaaaacccttcaaaacattaatgaatccaggagctggttttttgaaagaatcaacaaaattgatagaccgctagcaagactaataaagaaaaaaagagagaatcaaatagacgcaataaaaaatgataaaggggatatcaccaccgatcccacagaaatacaaactaccatcagagaatactacaagcacctctacgcaattaaactagaaaatctagaagaaatggataaattcctcgacacatacactctcccaagactaaaccaggaagaagttgaatctctgaatagaccaataacaggagctgaaattgtggcaataatcaatagcttaccaaccaaaaagagtccaggaccagatggattcacagccgaattctaccagaggtacaaggatgaactgataccattccttctgaaactattccaatcaatagaaaaagagggaatcctccctaactcattttatgaggccagcatcatcctgataccaaagccgggcagagacacaaccaaaaaagagaattttagaccaatatccctgatgaacatcgatgcaaaaatcctcaataaaatactggcaaacggaatccagcagcacatcaaaaagcttatccaccatgatcaa

SEQ ID NO: 12489 - DNA, 316 bp, Homo sapiens
  SIMILAR (1)..(165): 941254mologous to Homo sapiens putative p150,accession number U93574,Smith-Waterman Score=267.
atggataaattcctcgacacatacaccctcccaagactaaaccaggaagaagttgaatctctgaatagaccaataacaggctctgaaattgtggcaataatcaatagcttaccaaccaaaaagagtccaggaccagatggattcacagccgaattctaccagaggaatccaacttacaagggatgtgaaggacctcttcaagcagaactacaaaccactgttcaaggaaataaaagaggatacaaacaaatggaagaacattccatgctcatgggtaggaagaatcaatatcgtgaaaatggccatactgcccaag

SEQ ID NO: 12490 - DNA, 2265 bp, Homo sapiens; identical to SEQ ID NO: 2285
  SIMILAR (946)..(2256): 951254mologous to Homo sapiens putative p150,accession number U93574,Smith-Waterman Score=2181.

SEQ ID NO: 12491 - DNA, 2745 bp, Homo sapiens; identical to SEQ ID NO: 5617
  SIMILAR (352)..(1782): 951254mologous to Homo sapiens putative p150,accession number U93563,Smith-Waterman Score=2344.

SEQ ID NO: 12492 - DNA, 1275 bp, Homo sapiens
  SIMILAR (160)..(1203): 931254mologous to Homo sapiens unknown,accession number AF148856,Smith-Waterman Score=1755.
atggataaattcctcgacacatacactctcccaagactaaaccaggaagaagttgaatctctgaatagaccaataacaggagctgaaattgtggcaataatcaatagcttaccaaccaaaaagagtccaggaccagatggattcacagccaaattctaccacagacaaacaaagagccaaatcatgagtgaactcccatttacaattgcttcaaagagaataaaatacctaggaatccaacttacaagggatgtgaaggacctcttcaaggagaactacaaaccactgctcaaggaaataaaaaagtatacaaacaaatggaagaacagtccatgctcatgggtaggaagaatcaatatcatgaaaatggccatagtgcccaaggtaatttacagattcaatgccatccccatcaagctaccaatgactttcttcacagaattggaaaaagctactttaaagttcatatggaaccaaaaaagagcccacatcaccaagtcaatcctaagccaaaagaacaaagctggaggcatcacactacctgatttcaaactatactacaaggctacaggaaccaaaacagcatggtactggtaccaaaacagagatatagaccaatggaacagaacagagccctcagaaataatgccgcatatctacaactatctgatctttgacaaacctgagaaaaacaagcagtggggaaaggattccctatttaataaatggtgctgggaaaactggctagccatatgtagaaagctaaaactggatccattccttacaccttatacaaaaatcaatgcaagatggattaaagacttaaacattagacctaaaaccatcaaaaccctagaagaaaacctaggcattaccattcaggacataggcatgggcaaggacttcatgtctaaaacaccaaaagcaatggcaacaaaagacaaaattgacaaatgggatctaattaaactaaagagcttctgcacagcaaaagagattaccatcagagtgaacaggcaacctacaaactgggagaaaattttcacaacctactcatctgacaaagggctaatatccagaatctacaatgaactcaaaccaatttacaagaaaaaaccaaacaaccccatcaaaaagtgggcgaaggacatgaagagacacttctcaaaagaagacatttatgcagccaaaaaacgtgaaaaaatgctcaccatcactggccatcagagaaatgcaaatcaaaaccacaatgagataccatctcacaccagttag

SEQ ID NO: 12493 - DNA, 2133 bp, Homo sapiens
  SIMILAR (403)..(2130): 761254mologous to Homo sapiens putative p150,accession number U93574,Smith-Waterman Score=2094.
atggcaaagaagttaaaaactgtgaaaaaaaatcaagacgaatggataactagaacaaccaatgcagagaagtccttaaaagacctgatggagctgaaaaccaaggcacgagaactacgtgacgaatgcagaagcctcagtagccgatgcgatcaactggaagaaagggtatcagtgatggaagatgaaatgaatgaaaggaagcgagaagagaagtttagagaaaaaagaacaaaaagaaatgaacaaagcctccaagaaatatgggactacgtgaaaagaccaaatctatgtctgattggtgtacctgaaaatgacggggagaatggaaccaagttggaaaacactgtgcaggatattatccaggagaacttccccaatctagcaaggcaggccgacattcaaattcaggaaatacagagaacaccacaaagatactcctcgagaagagcaactccaaaacacataattgtcagattcaccaaagttgaaatgaaggaaaaaatgttaagggcagccagagagaaaggtcgggttacccacaaagggaagcccatcagactaacagctgatctctcagcagaaactctacaagccagaagagagtgggggcaaatattcaacattcttaaggaaaagaattttcaacccagaatttcatatccagccaaactaagcttcataagtgaaggagaaataaaaccctttacagacaagcaaatgctgagagattttgtcaccaccaggcctgcactaaaagagctcctgaaggaagtgctaaacatggaaaggaacaaccggaagaagttgaatagaccaataacaggctctgaaattgtggcaataatcaatagcttaccaaccaaaaaaagtccaggaccagatggattcacagctgaattctaccagaggtacaaggaggagctggtaccattccttctgaaactattccaatcaaaagaaaaagagggaatccaccctaattcatttgatgaggccagcatcatcctgataccaaaggctggcagagacacaaccacaaaagataattttagaccaatatccttgatgaacattgatgcaaaaatcctcaataaaatactggcaaaccaaatccagcagcacatcaaaaagcttatccaccatgatcaagtgggcttcatccctgggatgcaaggctggttcaacatatgccaatcaataaatgtaatccagcatataaacagaaccaaagacaaaaaccacgtgattatctcaatagatgcagaaaaggcctttgacaaaattcaacaacgcttcatgctaaaaactctcaataaattaggtattgataggatgtatctcaaaataataagagctatctatgacaaacccacagccaatatcatactgaatgggcaaaaactggaagcattccctttgaaaatgggcacaagacagggatgccctctctcaccactcctattcaacatagtgttggaagttctggccagggcaatcaggcaggagaaagaaataaagcatattcaattaggaaaaaaggaagtcatattgtccctgtttgcagatgacatgattgtatatctagaaaactccattgtctcagcccaaaatctccttaagctgataagcaacttcagcaaagtctcaggatacaaaatcaatgtacaaaaatcacacgcattcttacacaccaacaacagacaaacagagagccaaatcatgagtgaactcccattcacaattgcttcaaagagaataaaatacctaggaatccaacttacaaaggatgtgaaggacctcttcaaggagaactacaaaccactgctcaatgaaataaaagaggatacaaagaaatggaaacacattccatgctcatgggtaggaagaatcaatatcgtgaaaatggccatactgcccaaggtaatttatagattcaatgccatccccatcaagctaccaatgactttcttcacagaattggaaaaaactactttaaagttcatatggaaccaaaaaagagcccacaccgccaagtcaatcctaagccaaaagaacaaagctggaggcatcacactacctgacttccaactatactgcaaggctacagtaaccaaaacagcatggtactag

SEQ ID NO: 12494 - DNA, 474 bp, Homo sapiens
  SIMILAR (142)..(474): 771254mologous to Homo sapiens NAG13,accession number AF194537,Smith-Waterman Score=429.
atggagctgaaaaccaaggctcgagaactacgtgaagaatgcagaagcctcaggagccgatgcgatcaactggaagaaagggtatcagcaatggaagatgaaatgaatgaaatgaagcgagaagggaagtttagagaaaaaagaataaaaagaaatgagcaaagcctccaagaaatatgggactatgtgaaaagaccaaatctacgtctgattggtgtacccgaaaaaatacaaactaccaacagagaatactacaaacacctctacgcaaataaactagaaaatctagaagaaatggatacattcctcgacacatacactctcccaagactaaaccaggaagaagttgaatctctgaatagaccaataacaggagctgaaattgtggcaataatcaatagtttaccaaccaaaaagagtccaggaccagatggattcacagccgaattctaccagaggtacaaggaggaactg

SEQ ID NO: 12495 - DNA, 1200 bp, Homo sapiens; identical to SEQ ID NO: 11865
  SIMILAR (1)..(1131): 951254mologous to Homo sapiens putative p150,accession number U93574,Smith-Waterman Score=1940.

SEQ ID NO: 12496 - DNA, 1521 bp, Homo sapiens
  SIMILAR (1)..(1518): 941254mologous to Homo sapiens putative p150,accession number U93569,Smith-Waterman Score=2480.
atgggagactttaacaccccactgtcaacattagacagatcaacgagacagaaagtcaacaaggatacccaggaattgaacttagctctgtaccaagcagacctaatagacatctacagaactctccaccccaaatcaacagaatatacatttttttcagcaccacaccacacatattccaaaattgaccacatacttggaagtaaagctctcctcagcaaatgtaaaacaacggaaattataacaaactatctctcagaccacagtgcaatcaaactagaaatcaggattaagaatctcactcaaaaccgctcaactacatggaaactgaacaacctgctcctgagtgactactgggtacataacgaaatgaaggcagaaataaagatgttctttgaaaccaacgagaacaaagacacaacataccagaatctctgggacgcattcaaagcagtatgtagagggaaatttatagcactaaatgcccacaagagaaagcaggaaagatccaaaattgacaccctaacatcacaattaaaagaactagaaaagcaagagcaaacacattcaaaagctagcagaaggcaagaaataactaaaatcagagcagaactgaaggaaatagagacacaaaaaactcttcaaaaaattaatgaatccaggagctggatcaacaaaattgatagaccgctggcaagactaataaagaaaaaaagagagaagaatcaaatagatgcaataaaaaatgataaaggggatatcaccaccaatcccacagaaatacaaactaccatcagagaatactacaaacacctctatgcaaataaactagaaaatctagaagaaatggataaattccttgacacatacactctcccaagactaaaccaggaagaagttgaatctctgaatagaccaataacaggatctgaaattgtggcaataatcaatagcttaccaaccaaaaagagtccaggaccagatggattcacagccgaattctaccagaagtacaaggaggaagtggtaccattccttctgaaactattccaatcaatagaaaaagagggaatgctccctaactcattttatgaggccagcatcatcgtgataccaaagctgggcagagacacaaccaaaaaagagagttttagaccaatatccttgatgaacattgatgcaaaaatcctcaataaaatactggcaaaccgaatccagcagcatatcaaaaagcttatctaccatgatcaagtgggcttcatccctgggatgcaaggctggttcaatatactcaaatcagtaaatgtaatccagcatataaacagaaccaaagacaaaaaccacatgattatctcaatagatgcagaaaaggcctttgacaaaattcaacaacccttcatgctaaaaactctcaataaattaggtattgatgggatgtatctcaaaataataagagctatctatgacaaacccacaaccaatatcatactgaatgggcaaaaactggaagcattcccttag

SEQ ID NO: 12497 - DNA, 3192 bp, Homo sapiens; identical to SEQ ID NO: 3969
  SIMILAR (1)..(339): 691254mologous to Homo sapiens putative p150,accession number U93570,Smith-Waterman Score=399.

SEQ ID NO: 12498 - DNA, 2202 bp, Homo sapiens; identical to SEQ ID NO: 8649
  SIMILAR (24)..(611): 991254mologous to Homo sapiens similar to 45 kDa secretory protein ; similar to CAA10644.1 (PID:g4164418),accession number AC004832,Smith-Waterman Score=1028.

SEQ ID NO: 12499 - DNA, 2823 bp, Homo sapiens; identical to SEQ ID NO: 6307
  SIMILAR (1)..(1182): 921254mologous to Homo sapiens similar to 45 kDa secretory protein ; similar to CAA10644.1 (PID:g4164418),accession number AC004832,Smith-Waterman Score=1924.

SEQ ID NO: 12500 - DNA, 1593 bp, Homo sapiens; identical to SEQ ID NO: 7846
  SIMILAR (736)..(870): 511254mologous to Human endogenous retrovirus K gag protein,accession number Y17834,Smith-Waterman Score=115.

SEQ ID NO: 12501 - DNA, 3552 bp, Homo sapiens
  SIMILAR (143)..(250): 661254mologous to Homo sapiens Sequence encoded by a human CD30-L cDNA clone,accession number R45007,Smith-Waterman Score=130.
atgggagactttaacaccccactgtcaacattagacagatcaaggagacagaaagtcaacaaggatacccaggaattgaactcagctctgcaccaagtggacctaatagacatctacagaactctgcaccacaaatcaacagaatatacatttttttcagcaccacaccacacctattccaaaattgaccacatagttggaagtaaagctctcctcagcaaatgtaaaagaacagagattataacaaactatctctcagaccacagtgcaatcaaactagaactcaggattaagaatctcactcaaaaccgctcaactacatggaaactgaacaacctgctcctgaatgactactggatacataacaaaatgaaggcagaaataaagatgttctttgaaaccaacaagaacaaagacacaacataccagaatctctgggatgcattcaaagcagtgtgtagagggaaatttatagcactaaatgcccacaagagaaagcaggaaagatccaaaattgacaccctaacatcacaattaaaagaactggaaaagcaagagcaaacacattcaaaagctagcagaaggcaagaagtaactaaaatcagagcagaactgaaggaaatagagacacaaaaaacccttcaaaaaattaatgaatccaggagctggttttttgaaaggatcaacaaaattgatagaatgctagcaagactaataaagaagaaaagagagaagaatcaaatagacacaataaaaaatgataaaggggatatcaccaccgatcccacagaaatacaaactaccatcagagaatactacaaacacctctatgcaaataaactagaaaatctagaagaaatggataaattcctcgacacatacactctcccaagactaaaccaggaagaagttgaatctctgaatagaccaataacaggagctgaaattgtggcaataatcaatagcttaccaaccaaaaagagtccaggaccagatggattcacagccgaattctaccagaggtacaaggaggaactggtaccattccttctgaaactattccaatcaatagaaaaagagggaatcctccctaactcattttatgaggccagcattattctgataccaaagccgggcagagacacaaccaaaaaagagaattttagaccaatatccttgatgaacattgatgcaaaaatcctcaataaaatattggcaaaacgaatccagcagcatatcaaaaagcttatccaccatgatcaagtgggcttcatccctgggatgcaaggctggttcaatatacgcaaatcaataaatgtaatccagcatataaacagaaacaaagacaaaaaccacatgattatctcaatagatgcagaaaaagcctttgacaaaattcaacaacccttcatgctaaaaactctcaatagattaggtattgatgggacgtatttcaaaataataagagctatctatgacaaacccacagctaatatcgtactgaaggggcaaaaactggaagcattccctttgaaaactggcacaagacagggatgccctctctcaccactcgtattcaacatagtgttggaagttctggccagggcaattaggcaggagaaggaaataaagggtattcaattaggaaaagaggaagtcaaattgtccctgtttgcagacgacatgattgtatatctagaaaaccccattgtctcagcccaaaatctccttaagctgataagcacttcagcaaagtctcaggatacaaaatcaatgtacaaaaatcacaagcattcttatacaccaacaacagacaaacagagccaaatcatgagtgaactcccattcacaactgcttcaaagataataaaatacctaggaatccagcttacaagggatgtgaaggacctcttcaaggagaactacaaaccactgctcaaggaaataaaagaggatacaaacaaatggaagaacattccatgctcatgggtaggaagaatcaatattgtgaaaatggccatactgcccaaggtaatttacagattcaatgccatccccatcaagctaccaatgactttcttcacacaattggaaaaaactactttaaagttcatatggaaccaaaaaagagcccgcatcgccaaggcaatcctaagccaaaagaacaaagctggaggcatcacactacctgacttcaaactatactacaaggctacagtaaccaaaacagcatggtactggtaccaaaacagagatatagatcaatggaacagaacagagccctcagaaataacgccgcatatctacaactatctgatctttgacaaacctgagaaaaacaagcaatggggaaaggattccctatttaataaatggtgctgggaaaactggctagccatatgtagaaagctgaaactggatcccttccttacaccttatacaaaaatcaattcaagatggattaaagacttaaatgttagacctaaaaccataaaaaccctagaagaaaacctaggcattaccattcaggacataggcatgggcaaggacttcatgtccaaaacaccaaaagcaatggcaacaaaagccaaaattgacaaatgggatctaattaaactaaagagcttctgcacagcaaaagaaactaccatcagagtgaacaggcaacctacaaaatgggagaaaattttcgcaacctcctcatctgacaaagggctaatatccagaatctacaatgaactccaacaaatttacaagaaaaaaacaaacaaccccatcaaaaagtgggcaaaggacatgaacagacacttctcaaaagaagacatttatgcagccaaaaaacacatgaaaaaatgctcatcatcactggccatcagagaaatgcaaatcaaaaccacaatgagataccatctcacaccagttagaatggcaatcattaaaaagtcaggaaacaacaggaatccaacttacaagggatgtgaaggacctcttcaaggagaactacaaaccactgctcaaggaaataaaagaggatacaaacaaatggaagaacattccatgctcatgggtaggaagaatcaatatcgtgaaaatggccatactgcccaagaattggaaaaaactactttaaagttcatatggaaccaaaaaagagcccgcatcgccaaggcaatcctaagccaaaagaacaaagctggaggcatcacactacctgacttcaaactatactacaaggctacagtaaccaaaacagtatggagaagtgatatcaaaagacaacgactacaccaaaatttggagaaaaaggtgaatccagacagtcacagtactaacttcatcttcgagaaattcatctctcctgtggggtttattgaagctataacccaagaaatcaaggaacgtggattctacattgatctgagagtgatttttgttgttctccgatggaagttggacagcaaagctaaagcagtgatcaaacatcttggtggaccaggcctcaactgtgatcgcccagacaaggctggttcaggtttgctgaaattaggatag

SEQ ID NO: 12502 - DNA, 2727 bp, Homo sapiens; identical to SEQ ID NO: 5629
  SIMILAR (595)..(702): 661254mologous to Homo sapiens FLJ00047 protein,accession number AK024455,Smith-Waterman Score=112.

SEQ ID NO: 12503 - DNA, 3570 bp, Homo sapiens
  SIMILAR (1)..(888): 981254mologous to Cloning vector pZC320 SopA,accession number U26464,Smith-Waterman Score=1526.
atgggactctcagaggatccagaactgcagcccgtcctcgctgggctgtccctgtccatgtatctggtcacggtgctgaggaacctgctcagcatcctggctgtcagctctgactcccacctccacacccccatgtacttcttcctctccaacctgtgctgggctgacatcggtttcacctcggccacggttcccaagataattgtggacatgcagtcgcatagcagagtcatctcttatgtgggctgcctgacacggatgtcttttttggtcctttttgcatgtatagaagacatgcttctgactgtgatggcctatgactgctttgtagccatctgtcgccctctacactacccagtcatcgtgaatgctcacctccgtgtcttcttagttttggtgtcctttttccttagcctgttggattcccagctgcacaggatccttttgtcttactgtaaaattgttccctccattctaaggatttcaacatcagatgggaaatataaagccttctccacctgtggctctcacctggcacttgtttgcttattttatggagcaggcattggcgtgtacctgacttcagctgtgtcaccaccccccaggaatggtgtggtggtgtcagtgatgtacactgtggtcacccccatgctgaaccctttcatctacagcctgagaaacagggacattcaaagcaccctgcggaggctgctcagcagaacagtcgaatctcatgatctgttccatcctttttcttgtgtggggaagcgcaaatccaaccaagaatgtgataccacacatttggatggatgtgataaacaaacaagcattggtgaaactagagggaaggagtacaccctgtgtgacagtaggagtaacctcacccaaggatataaggaacaaatacagaggatgcacacgtgttgtgacattagcagtaacatccatttaggatattacgaatattaccacaatgtgaataccccctgtgatattaggagtaacatccccctacaatattgggaaccatatcacacggtgtacaccccctgtgacattagagggaggcccatgaaccgaggaagcaggtggccatctgtggcagctgtcacagcccagcataaagctaagcacttctacttattatatcattcaaaagctgcctcagcctgcaagggcagtaattccccaaagcaggctccagggcccaaggaaagccctcggcagggaaacattgagtgtcaggcacagggaatcaggccatcgggtcacctggacaccgtaaggctccaagagctgccccctctccaccaggaggaactgacttaccaaggtgacagtctagagactgcttgcccaattaaagccatgatccccaatctcacactccaactacgggaggacattcaaaccaaaggcaaagaagttgaaaactttgaaaaaaatttagaagaatgtataactagaataaccaatacggagaagtgcttaaaggagctgatggagctgaaaaccaaggctcgagaactacgtaaagaatgcagtagcctcaggagccgatgccatcaactggaagaaagggtatcagcaatggaagatgaaatgaatgaaatgaagtgggaagggaagtttagagaaaaaagaataaaaagaaataagcaaagcctccaagaaatatgggactatgtgaaaagaccaaatctacgtctcattggtgtacctgaaagtgacggggagaatggaactaagttggaaaacactctgcaggatatcgtccagaacttccccaatctagcaaggcagaccaatgttcagattcaggaaatacagagaacgccacaaagatactcctcgagaagagcaactccaagacacataattgtcagattcaccaaagttgaaatgaaggaaaaaatgttaagggcagccagagagaaagaaatacaaactaccatcagagaatactacaaacacctctacgcaaataaactagaaaatctagaggaaatggataaattccttgacacatacactctcccaagactaaaccaggaagaagttgaatctctgaatagaccaataacaggctctgaaattgtggcaataatcaatagcttaccaaccaaaaagagtccaggaccagatggattcacagccgaattctaccagaggtacaaggaggaactggtaccattccttctacaactattccaatcaatagaaaaagagggaatcctccctaactcattttatgaggccagcatcatcctgataccaaaggctggcagagacacaaccaaaaaagagaattttagaccaatatccttgatgaacgttgatgcaaaaatcctcaataaaatattggcaaaacgaatccagcagcacatcaaaaagcttatccaccatgatcaagtgggcttcatccctgggatgcaaggctggttcaatatacgcaaatcaataaatgtaatccagcatataaacagagccaaagacaaaaaccacatgattatctcaatagatgcagaaaaggcctttgacaaaattcaacaacccttcatgctaaaaactctcaataaattagaattggaaaaaactactttaaagttcatatggaaccaaaaaagagcccgcatcgccaagtcaatcctaagccaaaagaacaaagctggaggcatcacactacctgacttcaaactatactacaaggctacagtaaccaaaacagcatgcctggccccacaccacagtccatcaactcctgctccaggtggaaacctcagaaacccacaaagctcggacctgctccaggtcaccaagcagcagggccaggcactggcaatccaacgagaagccccactacatcgcattccagctcctgaagccattccctggtattttcagccccagccggccacacagctcggatctcctcctgtggatccccccagctctgcgatgatggcagaagagcacacagatctcgaggcccagatcgtcaaggatatccactgcaaggagattgacctggtgaaccgagaccccaagaacattaacgaggacatagtcaagaacgcctgccttcttcagaaaaacaaacacccatttgccccccggctcaggctacacaacacccagaggaaccagatgcccaccagccctacaaacacttgttccaggtttgtgctcatcagggacaccctgttgcacaaagaagaaactgacctggtggattttgaagacgtgatcgcagagcctgtgggcacctacagctttgacggcgtgtggaaggtgagctacaccaccttcactgtctccaagtactggtgctaccgtctgttgtccacgctgctgggcgtcccactggccctgctctggggcttcctgttcgcctgcatctccttctgccacatctgggcggtggtgccatgcattaagagctacctgatcgagatccagtgcatcagccacatctactcactctgcatccgcaccttctgcaacccactcttcgcggccctgggccaggtctgcagcagcatcaaggtggtgctgcggaaggaggtctaa

SEQ ID NO: 12504 - DNA, 2064 bp, Homo sapiens
  SIMILAR (790)..(1599): 981254mologous to Homo sapiens putative p150,accession number U93574,Smith-Waterman Score=1361.
aaaagcaagagcaaacacattcaaaagctagcagaaggcaagaaataactaaaatcagagcagaactgaaggaaatagagacacaaaaaacccttcaaaaaattaatgaatccaggagctggttttttgaaaggatcaacaaaattgatagaccgctagcaagactaataaagaagaaaagagagaagaatcaaatagacgcaataaaaaatgataaaggggatatcactaccagtcccacagaaatacaaacaaccatcagagaatactacaaacacctctacgcaaataaactagaagatctagaagaactggataaattcctcgaaacatacaccctcccaagactaaaccaggaagaaggtgactctctgaatagaccaataacaggatctgaaattgtggcaataatcaatagcttgccaaccaaaaagagtccaggaccagatggattcacagccgaattctaccagaggtacaaggaggaactggtaccattccttctgaaacgattccaatcaatagaaaaagagggaatcctccctaactcattttatgaggccaacatcatcctgataccaaagtcggccagagacacaaccaaaaaagataattttaggccaatatccttgatgaaccttgatgcaaaaatcctcaataaaatactggcaaactgaatccagcagcacatcaaaaagcttatccaccatgatcaagtgggcttcatccctgggatgcaaggctgtgttggaagttctggccagggcaattaggcaggagaaggaaataaagggtattcaattaggaaaagaggaagtcaaattgtccctgtttgcagatgacatgattgtatatctagaaaaccccattgtctcagctcaaaatctccttaagctgataagcaacttcagcaaagtctcaggatacaaaatcaatgtacaaaaatcacaagcattcttatacaccaataacagacaaacagagagccaaatcatgagtgaactcccattcacaattgcttcaaagagaataaaatacctaggagtccaccttacaagggatgtgaaggacctcttcaaggagaactacaaaccactgctcaatgaaattaaagaggatacaaacaaatggaagaacattccatgctcacggataggaagaatcaatatcgtgaaaatggccatactgcccaaggtaatttatagattcaatgccatccccatcaacctaccaatgactttcttcacagaattggaaaaaactactttaaagttcatatggaaccaaaaaagagcccgcatcaccaagtcaatcctaagccaaaagaacaaagctggaggcatcatgctacctgacttcaaactatactacaaggctacagtaaccaaaacagcatggtactggtaccaaaacagagatatagatcaatggaacagaacagagccctcagaaataacgccgcacatctacaactatctgatctttgacaaacctgagaaaaacaagcaatggggaaaggattccctatttaataaatggtgctgtgaaaactggctagccatatatagaaagctgaaactggatcccttctttacaccttatacaaaaatcaattcaagatggactaaagacttaaatgttagacctaaaaccataaaaaccctagaagaaaacctaggcattaccattcaggacataggcatgggcaaggacttcatgtctaaaacaccaaaagcaacggcagcaaaagcccaaattgacaaatgggatctaattaaactaaagagcttctgcacagcaaaagaaactaccatcagagtgaataggcaacctacaaaatgggaggaaattttcgcaacctactcatctgacaaagggctgatatccagaatctacaatgaactcaaacaaatttacaagaaaaaaacaaacaaccccatcaaaaagtgggcaaaggacatgaacagacacttctcaaaacaagacatttatgcagccaaaaaacacatgaaaaaatgctcatcatcactggccatcagagaatgcaaatcaaaaccacaatga

SEQ ID NO: 12505 - DNA, 3370 bp, Homo sapiens
  SIMILAR (418)..(1707): 921254mologous to Homo sapiens putative p150,accession number U93564,Smith-Waterman Score=2077.
atggagctgaaaaccaaagctcaagaactacgtgaggaatgcagaagcctcaggagccgatgcgatcaactggaagaaagggtatcagcaatggaagatgaaatgaatgaaatgaagcgagaagggaagtttagagaaaaaagcataagaagaaatgagcaaagcctccaagaagtatgggattatgtgaaaagaccaaatctacatctcattggtgtacctgaaagtgatggggagaatggaaccaagttggaaaacactctgcaggatattatccaggagaacttccccaatctagcaaggcaggccaacgttcagattcaggaaatacagagaacgccacaaagatactcctcgagaagagcaactccaagacacataattgtcagattcaccaaagttgaaatgaaggaaaaaacgttaagggcagccagagagaaagcaccacaccacacctattccaaaattgaccacatacatggaagtaaagctctcctcagcaaatgtaaaagaacagagattataacaaactatctctcagaccacagtgcaatcaaactagaactcaggattcagaagctcactcaaaaccgctcaactacatggaaactgaacaacctgctcctgaatgactactggatacataacgaaatgaaggcagaaataaagatgttctttgaaaccaacgagaacaaagacacaatgtaccagaatctctgggacgcattcaaagcagtgtgtagagggaaatttatagcactaaatgcccacaagagaaagcaggaaagatccaaaattgacaccctaacatcacaattaaaagaactagaaaagcaagagcaaacacattcaaaagctagcagaaagcaagaaataactaaaatcagagcagaactgaaggaaatagagacacaaaaaacccttcaaaaaattaatgaacccaggagctggttttttgaaaggatcaacaagattgatagactgctagcaagactaataaagaaaaaaagagagaagaatcaaatagacgcaataaaaaatgataaaggggatatcaccaccgatccctcagaaatacgaactaacatcagagaatactacaaacacctctacgcaaataaactagaaaatctagaagaaatggataaattcctcgacatatacactctcccaagactaaaccaggaagaagttgaatctctgaatagaccaataacaggagctgaaattgtggcaataattaatagtttaccaaccaaaaagagtccaggaccagatggattcacagccgaattctaccagaggtacaaggaggaactggtaccattccttctgaaactattccaatcaatagaaaaagagggaatcctctgtaactcattttatgaggccagcatcattctgataccaaagccgggcagagacacaacaaaaaaagagaattttagaccaatatccttgatgaacattgatgcaaaaatcctcaataaaatactggcaaaccgaatccagcagcacatcaaaaagcttatccaccatgatcaagtgggcttcatccctgggatgcaaggctggttcaatatatgcaaatcaataaatgtaatccatcatataaacagagccaaagacaaaaaccacatgattatctcaatagatgcagaaaaagcctttgacaaaattcaacaaccgttcatgctaaaaactctcaataaattaggtactgatgggacgtatttcaaaataataagagctatctatgacaaacccacagccaatatcatactgaatgggcaaaaactggaagcattccctttgaaaactggcacaagacagggatgccctctctcaccactcctattcaacatagtgttggaagttctggccagggcaattaggcaggggaaggaaataaagggtattcaattaggaaaagaggaagtcaaattgtccctgtttgcagatgacatgattgtatatctagaaaaccccattgtctcagcccaaaatctccttaagctgataagcaacttcagcaaagtctcaggatacaaaatcaatgtacaaaaatcacaagcattcttatacaccaataacagacaaacagagagccaaatcatgagtgaactcccatttacaattgcttcaaagagaataaaatacctaggaatccaacttacaagggatgtgaaggacctcttcgaggagaactacaaaccactcctcaaggaaataaaagaggatacaaacaaatggaagaacattccatgctcatgggtaggaagaatcaaaatcgtgataatggccatactgcccaaggcaatttacagattgaatgccatccccatcaagctaccaatgactttcttcacagaattggaaaaaactactttaaagttcatatggaaccaaaaaagagcccacaccgccaaggcaatcctaagccaaaagaacaaagctggaggcatcacactacctgacttcaaactatactacaaggctacagtaaccaaaacagcatggtactggtaccaaaacagagatatagatcaatggaacagaacagagccctcagaaataatgccgcatatctacaactatctgatgtttgacaaacctgagaaaaacaagcaatggggaaaggattccctatttaataaatggtgctgggaaaactggctagccatatgtagaaagctgaaactggatcccttccttacaccttatacaaaaatcaattcaagatggattaaagacttaaacgttagacctaaaaccataaaaaccctagaagaaaacctaggcattaccattcaggacataggcatgggcaaggacttcatgtccaaaacaccaaaagcaatggcagcaaaagccagaattgacaaatgggatctaattaaactaaagagcttctgcacagcaaaagaaactaccatcagagtgaacagacaacctacaaaatgggagaaaattttcgcaacctactcatctgagaaagggctaatatccagaatctacaatgaactcaaacaaatttacaagaaaaaaacaaacaaccccatcaaaaagtgggcgaaggacatgaacagacacttctcaaaagaagacatttatgcagccaaaaaacacatgaaaaaacgctcatcatcactggccatcagagaaatgcaaatcaaaaccacaatgagataccatctcacaccagttagaatggcaatcattaaaaagtcaggaaacaacagaataaaaagactcacagactcagaaaggaggaaaatgaaatcagaggacaggttgacatgtgaggactccagaaaccttattactttcatacaatggaataaagaacaagaagaagaaagaaaaacca

SEQ ID NO: 12506 - DNA, 3018 bp, Homo sapiens
  SIMILAR (1714)..(2628): 931254mologous to Homo sapiens putative p150,accession number U93563,Smith-Waterman Score=1454.
atggggttttaccatgttggtcaagctggtactgaactcctgacttcaaatgatccactcacctcagcctctcaaagtgctcgcattacagggaaagctttacaaaaacccacagaggtacctgtaccatatgagaagatgctacaagaccagtcagctttgatagtacaggggcttccggaaggtgttgcctttaaacaccctgagaactatgatcttgcaaccctgaaatggattttggagaacacagctgggatttcatttattattaatagtgccaccattgagcctcctgctgctcagcccatgtcctttactcacatgggacactctttgtgtgttcttgtggtagagactcacgcaaagccagttgctgtgcagagctcaagcttcaccagaaacccagaggtcatttccctggaagtggcagctgtgacagtaaaggaagaatcagaagatcctgattatgattatatcacattcaaggatttacctggtattgcatatgaaacaaaagcctatgtcttgtggccacagctaagtaagatctgctctaaaaacggcgataaaaacaaggcttatcgaggccaacaatgcagactcaggcagcagaaccccttagctgcactgacaggcaaaatatctgtttcagtatacgtctctcatccatcacttaggtcagtgtccataggatggacccggcaggtggcaagacaaacgatgcaaaaggatcgtgatggacccctcaaaaatgaaggtgaaaagaactgcgcaggcagcgaaaaaaacaccctaacatcacaattaaaagaactagaaaagcaagagcaaacacattcaaaagctagcagaaggcaagaaataactaaaatcagagcagaactgaaggaaatagagacacaaaaaactgttgaaaaaattaatgaatccaggagctggttttttgaaaggatcaacaaaattgatagaccgctagcaagactaataaagaaaaaaagagagaagaatcaagtagatgcaataaaaaacgataaaggggatatcaccaccgatcccacagaaatacaaactaccatcagagaatactacaaacacctctacgcaaataaactagaaaatgtagaagaaatggataaattcctcgacacatacactctcccaagactaaaccaggaagaagttgaatctctgaatagaccaataacaggctctgaaattgtggcaataatcaatagcttaccaaccaaaaagagtccaggaccagatggattcacagccgaattctaccagaggtacaaggaggaactggtaccattccttctgaaactattccaatcaatagaaaaagagggaatcctccctaactcattttatgaggccagcatcattctgatagcaaagccaggtagagacacaacaaaaaaagagaattttagaccaatatccttgatgaacattgatgcaaaaatcctcaataaaatactggcaaaacgaatccagcagcacatcaaaaagcttatccaccatgatcaagtgggcttcatccctgggatgcaaggctggttcaatatacgcaaatcaataaatgtaatccagcatataaacagagccaaagacaaaaaacacatgattatctcaatagatgcagaaaaagcctttgacaaaattcaacaacccttcatgctaaaatctctcaataaattagaattggaaaaaactactttaaagttcatatgggaccaaaaaagagcccgtgtcgccaagtcaatcctaagccaaaagaacaaagctggaggcatcacagtacctgacttcaaactatactacaaggctacagtaaccaaaacagcatggtactggtaccaaaacagagatatagatcaatggaacagaacacagccctcagaaataatgccacatatctacaactatctgatctttgacaaacctgagaaaaacaagcaatggggaaaggattccctatttaataaatggtgctgggaaaactggctagccacatgtagaaagctgaaactggatcccttccttacaccttatacaaaaatcaattcaagatggattaaagacttaaacgttagacctaaaaccataaaaaccctagaagaaaacctaggcattaccattcaggacataggcatgggcaaggacttcatgtctaaaacaccaaaagcaatggcaaccaaagacaaaattgacaaatgggatctcattaaactacagagcttccacacagcaaaagaaactaccatcagagtgaacaggaaacctacagaatgggagaaaattttcacaacttactcatctgacaaagggctaatatccagaatctacaatgaactcaaacaaatttacaagaaaaaaacaaacaaccccatcaaaaagtgggcgaaggacatggacagacacttctcaaaagaagacatttatgcagccaaaaaacacatgaaaaaatgctcatcatcactggccatcagagaaatgcaaatcaaaactacaatgagataccatctcacaccagttagaatggcaatcattaaaaagtcaggaaacaacaggtgctggagaggatgtggagaaataggaacacttttacactgttggtgggactgtaaactagttcaaccattgtggaagtcagtgtggcgattcctcagggatctagaactagaaataccatttgacccagccagcccattactggatatatacccaaaggactataaatcatgctgctataaagacacatgcacacgtatgtttattgcagcattattcacaatagcaaagacttggaagcaacccaaatgtcgaacaatgatagactggattaagaaaatgtggcacatatacaccatggaattctatgcagccataaaaaatgatgagttcaagtcctttgtagggacatggatgaaattggaaatcatcattctcagtaaactatcgcaagaacaagaaaccaaacaccgcatattctcactaataggtgggaattga

SEQ ID NO: 12507 - DNA, 4216 bp, Homo sapiens
  SIMILAR (1066)..(1929): 901254mologous to Homo sapiens putative p150,accession number U93572,Smith-Waterman Score=1301.
  misc_feature (1)...(4216): n = a,t,c or g
atggagaatgactttgatgagctgagagaaggcggcttcagaagatcgaattattctgagctacgggaggacattcaaaccaaaggcaaagaagttgaaaactttgaaaaaaatttagaagaatgtataactagaataaccaatacagagaagtgcttaaaggagctgatggagctgaaaaccaaggctcaagaactacgtgaagaatgcagaagcctcaagagccaatgcaatcaactggaagaaagtgtatcagcaatggaagatgaaatgaatgaaatgaagcgagaagggaagtttagagaaaaaagaataaaaagaaatgaccaaagcctccaagaaatatgggactatgtgaaaagaccaaatctacgtctgattggtgtacctgaaagtgatggggagaatggaaccaagttggaaaacacgctgcaggatattatccaggagaacttccccaatctagcaacgcaggccaacgttcagattcaggaaatacagaaaacgccacaaagatactcctcgagaagnagcaactccaagacacataatgaaatacaaactaccatcagagaatactacaaacacctctacgcaaataaactagaaaatctagaagaaatggataaattcctcgacacatacactctcccaagactaaaccaggaagaagttgaatctctgaatagaccaataacaggagctgaaattgtggcaataatcaatagcttaccaaccaaaaaagagtccaggaccagatggatccacagccgaattctaccagagaataaaatacctgggaatccaacttacaagggatgtgaaggacctcttcaaggagaactacaaaccactgctcaaggaaataaaagaggatacaaacaaatggaagaacattccatgctcatgggtaggaagaatcaatatcatgaaaatggccatactgcccaaggtaatttatagattcaatgccatccccatcaagctaccaatgactttcttcacagaattggaaaaaactactttaaagttcatatggaaccaaaaaagagcccgcatcaccaagtcaatcctaagccaaaagaacaaagccggaggcatcacactacctgacttcaaactatactacaaggctacagtaaccaaaacagcatggtactgttaccaaaacagagatatagatcaatggaacagagcagagccctcagaaataatgctgcctatctacaactatctgatctttgacaaacctgacaaaaacaagcaatggggaaaggattccctatttaataaatggtgctgggaaaactggctagccatatgtagaaagctgaaactggatcccttccttacaccttatacaaaaattaattcaagatggattaaagacttacatgttagacctaaaaccataaaaaccctagaagaaaacctgggcaataccattcaggacataggcatgggcaaggactttatgtctaaaacaccaaaagcaatggcaacaaaagccaaaattgacaaatgggatctaattaaactaaagagcttctgcacagcaaaagaaactaccatcagagtgaacaggcaacctacaaaatgggagaaaattttcacaacctactcatctgacaaagggctaatatccagaatctacaatgaactcaaacaaatttacaagaaaaaaacaaccccatcaaaaaatttggagtcaaaatatggacctgagaaaatatctccagaaaatgatatttttgaaataaatttacccaaacatgttataaagcaaataagtaaaacacttggcctcgaggccttttattttagaaatgactcagaatatagaagtagatttgagggacgacagggacatcaagaaggatatatcaaccagaagatcatcagctatgaagaaatgcctgcttatactcatgcttctcctattcataatacacataaaccatatgaatgtaaggaatgtgggaaatactttagttgtggttcaaatcttattcagcatcagagtattcatactggagagaaaccctataaatgcaaagaatgtgggaaagcctttcaacttcacatacaacttactcgacatcagaaatttcatactggtgagaaaacttttgaatgtaaggaatgtggaaaagcctttaatcttcccacccagcttaatcgccataagaacattcacacagttaagaaactgtttgaatgtaaggaatgtgggaagtcttttaatcgtagctcaaaccttactcagcatcaaagtattcatgctggtgtaaaaccatatcaatgtaaggagtgtgggaaagcctttaatcgtggttcaaatcttattcagcatcaaaaaattcattccaatgagaaaccctttgtatgtagggaatgtgagatggcctttcgatatcattaccaactcattgaacattgccgaattcatactggcgagaaaccctttgaatgtaaagaatgcagaaaggcctttactcttctgacaaagcttgttcgacatcagaagattcatatgggtgagaagccctttgaatgcagggaatgcgggaaggcctttagtctcctcaatcagcttaatcgccataagaatattcacacaggtgaaaaaccatttgaatgtaaagaatgtgggaagtcctttaatcgtagttcaaaccttattcaacaccagagtattcatgctgatgtaaaaccatatgaatgtaaggagtgtgggaaaggctttaatcgtggtgcaaatcttattcagcatcaaaaaattcattccaatgagaaaccctttgtatgtagggaatgtgagatggcctttcgatatcattaccaacttattcaacattgccaaattcatactggtgggaaaccctttgaatgtaaagaatgtggaaaggcctttagtcttctgacacagcttgctcgacataagaacattcatactggtgagaaaccatttgaatgtaaagactgtgggaaggccttcaatcgtggctcgaaccttgttcaacatcagagtattcacactggtgagaagccctatgaatgtaaggagtgtgggaaggcttttagacttcacctacaactttctcaacatgagaaaactcatacaggtgagaaaccctttgaatgtaaggaatgtgggaaattctttcgtcgtggttcaaatcttaatcaacatcgaagtattcataccggaaagaaaccctttgaatgtaaggaatgtgggaaagcctttcgacttcatatgcaccttattcgacatcagaaatttcatactggtgagaagccctttgaatgtaaggaatgtggcaaggccttcagtcttcacacccagcttaatcaccataagaacattcacacaggtgagaagccatttaaatgtaaagaatgtgggaagtcctttaatcgtgtctcaaaccttgttcaacatcagagtattcatgctggtgtaaaaccatatgaatgtaaggagtgtgggaaaggctttagtcgtgtttcaaaccttattcagcatcagaaaactcattccagtgcgaaaccctttgtatgtaaggagtgtaggaagacctttagatatcattaccagcttactgaacattaccgaattcatactggtgagaaaccctttgaatgtaaagaatgcggaaaggcctttggtcttctgacacagcttgctcaacatcagatcattcatactggtgagaagccatttaaatgtaaggagtgtgggaaggcctttaatcgtggctcaaaccttgttcaacctcagagtattcatactggtgagaaaccctatgaatgtaaggagtgtgggaaggcttttagacttcacctacaactttctctgcatcaaaaacttgtacagaaaattcatacttgggtgaaaacctttgaatgtaaggaatgtgggaaggcctttcaatatcattaccaatttcatggacattatagatttcatattcgtgagaacccttatgaatgtcaaggatgtgggaaatgctttaccagtggtagaaaccttagagtacatcagagaattcatactggtgagaaaccatatcaatgtgaagaatgtgggaaagcctttagtcatagttcaaacctgttaaacatgttaaaattcatactgatgagaaaccctatgaatgtaaggaatgtgaaaaggcctttagcagtaattatgatcttactgtacatctga

SEQ ID NO: 12508 - DNA, 1152 bp, Homo sapiens
  SIMILAR (1066)..(1929): 901254mologous to Homo sapiens putative p150,accession number U93572,Smith-Waterman Score=1301.
atgggagactttaacaccccactgtcaacattagacagatcaacgagacagaaagtcaacaaggatacccaggaattgaactcagctctgcaccaagcggacctaatagacatctacagaagtctccacgccaaatcaacagaatatacatttttttcagcaccacaccacacctattccaaaattgaccacatacttggaagtaaagctctcctcagcaaatgtaaaagaacagagattataacaaactatctctcagaccacagtgcaatcaaactagaactcagaattaagaatctcactcaaaaccgctcaactacatggaaactgaacaacctgctcctgaatgactactggatacatgacgaaatgaaggcagaaataaagatgttctttgaaaccaacgagaacaaagacacaacataccagaatctctgggatgcattcaaagcaaccgctagcaagactaataaagaaaaagagaagaatcaaatagacacaataaaaaatgataaaggggatatcaccaccgatcccacagaaatacaaactaccatcagagaatactacaaacacctctatgcaaataaactagaaaatctagaagaaatggataaattcctcgacacatacactctcccaagactaaaccaggaagaagttgaatctctgaatagaccaataacaggagctgaaattgtggcaataatcaatagtttaccaaccaaaaagagtccaggaccagatggattcacagccgaattctaccagaggtacaaggaggagctgatagggtggcttagagaaagtgtgtcaaaaatatgtctaaaatttgatcaccaggttcaggtgatcactggccgcctgataatccgcttccagatcgccttcggcaccgttgtgctctgccagctcacgcgccatatcgacgtgtttgtaggcaagcggcttgcgaatgcacgatttgcgccatcgctgggtggtgcgcccgacctgttcactctcaaaccatgttttgtggcagtggaaactcagggcgatttacctcaagccacgacggtggttgatatcgacggttgcctgggcaagccagccaatgtacaggtggcattggatctggatgtgaaaggcttccagcagtgggtggctgag

SEQ ID NO: 12509 - DNA, 2031 bp, Homo sapiens
  SIMILAR (1133)..(954): 811254mologous to Homo sapiens Human secreted protein HLYES38, SEQ ID NO:220,accession number Y86305,Smith-Waterman Score =247.
atggtaaagggatcaattcaacaagaagagctaactatcctaaatatatatgcactcaatacaggagcacccagattcataaagcaagtcctgagcgacctacagagagacttagactcccacacattaataatgggagactttaacaccccactgtcaacattagacagatcaatgagacagaaagtcaacaaggatacccaggaattgaactcagctctgcaccaagcggacctaatagacatctacggaactctccacccccaatcaacagaatatacatttttttcagcaccataccacacctattccaaaattgaccacatacttggaagtaaagctctcctcagcaaatgtaaaagaagagaaattataataaactatctctcagaccacagtgcaatcaaactagaactcaggattaagaatctcactcaaaacctctcaactacatggaaactgaacaacctgctcctgaatgactacttggtacataacgaaatgaaggcagaaataaagatgttctttgaaaccaacgagaacaaagacacaacataccagaatctctgggacacattcaaagcagtgtgtggagggaaatttatagcactaaatgcccacaagagaaagcaggaaagatccaaaattgacaccctaacatcacaattaaaagaactagaaaagcaagagcaaacacattcaaaagctagcagaaggcaagaaataactaaaatcagagcagaactgaaggaaatagagacacaaaaaacccttcaaaaaatgaatccaggagctgaaatacaaactaccatcagagaatactacaaacacctctacacaaataaactagaaaatctagaagaaatggataaattcctcgacacatacactctcccaagactaaaccaggaagaagttgaatctctgaatagaccaataacaggatctgaaattgtggcaataatcaatagcttaccaaccaaaaagagtccaggaccagatggattcacagccgaattctaccagaggtacaaggaggaactgggtactccaacagacctgcagctgagggtcctattagaaggaaaattaacaaacagaaaggacatccacaccaaaaacccatctgtacatcaccatcatcaaagaccaaaagtagataaaaccacaaagatggggaaaaaacagagcagaaaaactggaaactctaaaaatcagagcgcctctcctcctccaaaggaatgcaattcctcaccagcaacaaaacaaagctggaccgaaaatgactttgaggagctgagagaggaaggcttcagacgatcaaattactctgagctatgggaggacattcaaaccaatggcaaagaagttaaaaactttgaaaaaaatttagaagaatggataactagaataaccaaggcagagaagtgcttaaaggacctgatggagctgaaagccaaggctccagaactacgtgacaaatgcagaagcctcaggagccgatgcgatcaactggaagaaagggtatcagcgatggaagacaaaatgaatgaaatgaagcgagaagagaagtttagagaaaaaagaataaaaagaaacgaacaaagcctccaagaaatatgggactatgtgaaaagaccaaatctacgtctgattggtgtacctgaaagtgatggggagaatggaaccaagttggaaaacactctgcaggatattatccaggagaatttccccaatctagcaaggcaggccaatgttcagattcaggaaatacagagaacgccacaaagatcctcctcgagaagagcaactccaagacacataattgtcagattcaccaaagttgaaatgaaggaaaaaatgttaagggcagccagagagaaaggtcgggttaccctcaaagggaagcccatcagactaacagcggatctcttggcagaaactctacaagccagaagagagtgggggccaatattcaacattcttaaagaaaagattttcaacccagaatttcatatccaaccaaactaa

SEQ ID NO: 12510 - DNA, 2266 bp, Homo sapiens; identical to SEQ ID NO: 10424
  SIMILAR (937)..(1572): 661254mologous to Mus musculus reverse transcriptase,accession number U15647,Smith-Waterman Score=709.

SEQ ID NO: 12511 - DNA, 2133 bp, Homo sapiens; identical to SEQ ID NO: 3488
  SIMILAR (1)..(846): 851254mologous to Homo sapiens putative p150,accession number U93564,Smith-Waterman Score=1241.

SEQ ID NO: 12512 - DNA, 2902 bp, Homo sapiens
  SIMILAR (1)..(846): 851254mologous to Homo sapiens putative p150,accession number U93574,Smith-Waterman Score=1248.
atggagaatgactttgacgagttgagagaagaaggcttcagacaatcaaattactctgagctacgggaggacattcaaaccaaaggcaaagaagttgaaaactttgaaaaaaatttagaagaatgtataactagaataaccaatacagagaagtgcttaaaggagctgatggagctgaaaaccaaggctcaagaactacgtgaagaatggagaagcctcaggagccgatgcgatcaactggaagaaagggtatcagcgatggaagatgaaatgaatgaaatgaagggagaagggaagtttagagaaaaaagaataaaaagaaatgagcaaagcctccaagaaatatgggattatgtgaaaagaccaaatctatgtctgattggtgtacctgaaagggatgggcagaatggaaccaagttggaaaacacgttgcaggatgttatccaggagaacttccccaatctagcaaggcaggccaacgttcagattcaggaaatacagagaacgccacaaagatactcctcgagaagagcaactccaagacacataattgtcagattcaccaaagttgaaatgaaggaaaaaatgttaagggcagccagagagaaagaaatacaaactaccatcagtgaatactacaaacacctctacacaaataaactagaaaatctagaagaaatggataaattccttgacacatacactctcccaacactaaaccaggaagaagttgaatctctgaatagaccaataacaggagctgaaattgtggcaataatcaatagcttaccaacgaaaaagagtccaggaccagatggattcacagccgaattctaccagaggtacaaggaggaactggtaccattccttctgaaactattccaatcaatagaaaaagagggaatcctccctaactcattttatgaggccagcatcattctgataccaaagtcaggcagagacacaacaaaaaaagagaattttagaccaatatccttgatgaacattgatgcaaaaatcctcaataaaatactggcaaaccgaatccagcagcacatcaaaaagcttatccaccatgatcaagtgggcttcattcctgggatgcaaggctggttcaatatacgcaaatcaataaatataatccagcatataaacagagccaaagacaaaaaccacatgattatctcaatagatgcagaaaaagcctttgacaaaattcaacaacccttcatgctaaaaactctcaataaattagcccaaaatctccttaagttgataagcaacttcatcaaagtctcagtatacaaaatcaatgtacaaaaatcacaagcattcttatacaccaacaacagacaaacagagagccaaatcatgagtgaactcccattcacaattgcttcaaagagaataaaatacctaggaatccaacttacaagggatgtgaaggacctcttcaaggagaactacaaaccactgctcaaggaaataaaagaggatacaaacaaatggaagaacattccatgctcacgggtagaaagaatcaatatcgtgaaaatggccatactgcccaaggtaatttatagattcaatgccatccccatcaagctaccaatgactttcttcacagaattggaaaaaactactttaaagttcatatggaaccaaaaaagagcccgcatcgccaagtcaatcctaaaccaaaagaacaaagatggaggcatcacgctacctgacttcaaactatactacaaggctacagtgaccaaaacagcatggtactggtaccaaaacatgtgctatagatcaatggaacagaacagagccctcagttattatgtcgcatatctacaaccatctgatctttgacaaacctgagaaaaacaagcaatggggaaaggattccctatttaataaatggtgctgggaaaactggctagccatatgtagaaagctgaaactggatcccttccttacaccttatacaaaaatcaattcaagatggattaaagacttaaatgttggacctaacaccataaaaaccctagaagaaaacctaggcattaccattcaggacataggcacgggcaaggacttcatgtctaaaacaccaaaagcaatggcaacaaaagccaaaattgacaaacgggatctaattaaactaaacagcttctgcacagcaaaagaaactaccatcagagtgaacaggcaacctacaaaatgggagaaaattttcacaacctactcatctgacaaagggctaatatccagaatctacaatgaactcaaacaaatctacaagaaaaaaacaaacaaccccatcaaaaagtgggcgaaggacatgaacagacacttctcaaaagaacacatttatgcagccaaaaaacacatgaaaaaatgctcaccatcactggccatcagagaaatgcaaatcaaaaccacaatgagataccatctcacaccagttagaatggcaatcattaaaaagtcaggaaacaacaggtcctcaaacctggctgtccaaaaaggacgccgcaaagtcctgcagagcccccaaaagacacaagcgcggacagaaaagcatcccccgagagacagcgaagccacacaccctctccgggccagctaccagggcgggcaacttcacccctcgaagcaaacgaaagcccctgttctccaagcaaaggaaaaggggatggcaaacagaaataaacaggaaccgctctcagccttcatcttccgcgccctcccccagcaaactccaggaaacagtttctccatctgtgcgatgattgaggtgctcttcgttttttctttcattcaaaaacatactgaactaggtgatggtgaacaagatggacataaggccttcctcagtggcaaggatctcaagatcccttcttga

SEQ ID NO: 12513 - DNA, 2748 bp, Homo sapiens; identical to SEQ ID NO: 2297
  SIMILAR (181)..(1503): 811254mologous to Homo sapiens putative p150,accession number U93569,Smith-Waterman Score=1787.

SEQ ID NO: 12514 - DNA, 3288 bp, Homo sapiens; identical to SEQ ID NO: 9136
  SIMILAR (331)..(990): 881254mologous to Homo sapiens putative p150,accession number U93572,Smith-Waterman Score=992.

SEQ ID NO: 12515 - DNA, 2529 bp, Homo sapiens
  SIMILAR (1246)..(1920): 941254mologous to Homo sapiens putative p150,accession number U93572,Smith-Waterman Score=1099.
ttatttctgaggggtctgttctgttccattggtctctatctctgtttggtaccagtacatggctgttgtggttactgtagccttgtagtatagtttgaagtcaggtagcgtgatgcctccacctttcttcttttggcttaggattgacttggcaatgcgggctcttttttggttccgtatgaactttaaagtagctttttccaattctctgaagaaagtcactggtagcttgatgcggatggcactgaatctataaattgcccggggcagaatggcaatgttcacgatattgattcttcctatccatgagcatggaatgttcttccatttgtttgtgtcctcttttatttcattgagcagtggtttgtagttctccttgaagaggtccttcacatcccttgtaagttggattcctaggtattttattctttgatcatggtggataagctttttgatgtactgctggattcggtttgtcagtattttattgaggatttttgcatcgatgctcatcagggatattggtctaaaattatctttttttgttgtggctctgcccggctttggtgtcaggatgatgctggcctcataaaatgagttagggaggattccctctttttctattgattggaatagtttcagaaggaatggtaccagctcctccttgtacctcaggtagaattcggctgtgaatccatctggtcctggactgtttttggttggtaagctattaattattgcctcaatttcagagcctgttattggtctattcagagaatcaacttcttcctggtttagtcttgggaggacgtatgtgtcaaggaatttatccatttctactagagtttctagtttatttgtgtagaggtgtttatagtattctctgatggtagtttgtatttcttttgtctttgatgatggtgacgtacggatggggttttggtgtggatgtcctttctgtttgttagttttccctttaacattctggaccctcagctgcaggtctgttggagtttgttggaggtccactccagaccctatttgcctgggtatcagcagtggaggctgcagaacagtgaatgttgctgaacagcgaatattgctgatcagcaaatgttgctgtctgatcgttcctctggaagttccgtcccttgcacttcctgggtggggcgatgcctcgccctgcttcggctcacgctcagtgcgctgcacccactgtcttgcacccactgtctggcactccctaaaatacaaactaccatcagagaatactacaaacacctctacacaaataaactagaaaatctagaagaaatggatacattcctcgacacatacactctcccaagactaaaccaggaagaagttgaatctctgaatagaccaataacaggagctgaaattgtggcaataatcaatagtttaccaaccaaaaagagtccaggaccagatggattcacagccgaattctaccagaggtacaaggaggaactggtaccattccttctgaaactattccaatcaatagaaaaacagggaatcctccctaactcattttatgaggccagcatcatcctgataccaaagcctggcagagacacaaccaaaaaagagaattttagaccaatatccttgatgaacattgatgcaaaaatcctcaataaaatactggcaaaacgaatccagcagcacatcaaaaagcttatccaccatgatcaagtgggcttcatccctgggatgcaaggctggttcaatatacacaaatcaataaatgtaatccagcatataaacagaactaaagacaaaaaccacatgattatctcaatagatgcagaaaaggcctttgacaaaattcaacaacccttcatgctaaaaactctcaataaattagaattggaaaaaactactttaaagttcatatggaaccaaaaaagagcccgcatcgccaagtcaatcctaagccaaaagaacaaagctggaggcatcacactacctgacttcaaactatactacaaggctacagtaaccaaaacagcatgtttcctcacctgtaaactagggatgtatgaaaacttcaagcaccttctgcaggcaccactggatgatgctcaagaaattctgcaagcacgcttcccgatgccacgttacatcaacacggagcatggaggcagtcaggagttttctcctcaaatacacaaattgtcttgcatcaacttcatttacatggaccagtttcctggcccccagaagcctcagaccctgaacattgcactgcgctctgcccctagctctccagtaggtggcgatggcaagtttggggcctacatgcaggtgcacattcagaatgatgggcctgtgaccatagagctggaatcgccagctcccggcactgctacctctgacccaaagcagcaccctccgggatcctcgagaggcggccggcgggtctgcgatgacatgatggccggcgggggccccggcgcgggccgcgggcggcagggcggcctgagtcgtcagccgattgtgtag

SEQ ID NO: 12516 - DNA, 3446 bp, Homo sapiens
  SIMILAR (1346)..(2194): 421254mologous to Trypanosoma cruzi neuraminidase,accession number M61732,Smith-Waterman Score=411.
atgtaccaagcaaatggaaaacaaaaaaaggcaggggttgcaatcctagtctctgataaaacagactttaaaccaacaaagatcaaaagagacaaagaaggccattacataatggtaaagggatcaattcaacaagaagagctaactatcctaaatatatatgcacccaatacaggagcacccacattcatacagcaagtcctgagtgatctacaaagagacttagactcccacacattaataataggagactttaacaccccactgtcaacatcagacagatcaacgagacagaaagtcaacaaggatacccaggaattgaactcagctctgcaccaagcagacctaatagacatctacagaaccctccaccccaaatcaacagaatatacatttttttcagcaccacaccacacctattccaaaattgaccacatacttggaagtaaagcactcctcagcaaatgtaaaagaacagaaattataacaaactatctctcagaccacagtgcaatcaaactagaactcatgattaagaatctcactcaaaaccactcaaccatatggaaactgaacaacctgctcctgaatgactactgggtacataaggaaatgaaggcagaaataaagatgttctttgaaaccaacgagaacaaagacacaacataccagaatctctgggacacattcaaagcagtgtgtagagggaaatttatagcactaaatgcccacaagagaaagcaggaaagatccaaaattgacaccctaacatcacaattaaaagaactagaaaagcaagagcaaacactttcaaaagctagcagaaggcaagaaataactaaaatcagagcagaactgaaggaaatagagacacaaaaaacccttcaaaaaattaacgaatccaggagcaggttttttgaaaggatcaacaaaattgatagcctgctagcaagactaataaagaaaaaaagagagaagaatcaaatagatgcaataaaaaatgataaaggggatatcaccaccaatcccacagaaatacaaactaccatcagagaatactacaaacacctctacgcaaataaactagaaaatctagaagaaatggataaattcctcgacacatacactctcccaagactaaaccaggaagaagttgaatctctgaatagaccaataacgggagctgaaattgtggcaataatcaatagcttaccaaccaaaaagagtccaggaccagatggattcacagccgaattctaccagaggtacaaggaggaacaggtaccattccttctgaaactattccaatcaatagaaaaagagggaatcctccctaactcattttatgtgtccagcatcatcctgataccaaagccgggcagagacacaaccaaaagagagaattttagaccaatatccttgatgaacattgatgcaaaaatcctcaataaaatactggcaaaccgaatccagcagcacatcaaaaagcttatccaccatgatcaagtgggcttcatccctgggatgcaaggctggttcaatatatgcaaatcaataaatgtaatccagcatataaacagaaccaaagacaaaaaccacatgattatctcaatagatgcagaaaaggcctttgacaaaattcaacaacctttcatgctaaaaactctcaataaattagatattgatgggttggaagttctggccagggcaatcaggcaggagaaggaaataaagggcattcaatcaggaaaagaggaagtcaaattgtccctgtttgcagatgacatgattgcatatctagaaaaccccatcgtctcagcccaaaatctccttaagctgataagcaacttcaacaaagtctcaggatacaaaatcaatgtgcaaaaatcacaagcattcttatgcaccaataacagacaaacagaaagccaaatcatgagtgaactcccattcacaattgcttcaaagagaataaaatacctaggaatccaacttacaagggatgtgaaggacctcttcaaggagagctacaaaccactgctcaatgaaataaaagaggatacaaacaaatggaagaacattccatgctcatgggtaggaagaatcaatatcgtgaaaatggccatactgcccaaggtaatttatagattcaatgccatccccatcaagctaccaatgactttcttcacagaattggaaaaaactaccttaaagttcatatggaaccaaaaaagagcccgcattgccaagtcaatcctaagccaaaagaacaaagctggaggcatcatgctacctgacttcaaactatactacaaggctgcagtaaccaaaacagcatggtactggtaccaaaacagagatatagatcaatggaacagaacagagccctcagaaataacgccgcatatctacaactacctgatctttgacaaacctgagaaaaacaagcaatggggaaaggattccctatttaataaatgtcttgatatgacgaatcatcgccgctgtgggacgactttagaggaccccaggatgaacccaagtgatagaccactagcaagactaataaagaaaaaaagagagatgaatcaaatagacgcaataaaaaatgataaaggggatatcaccaccgatcccacagaaatacaaactaccatcagagaatactacaaacacctctacgcaaataaactagaaaatctagaagaaatggataaattcctcgacacatacactctcccaagactaaaccaggaagaagttgaatctctgaatagaccaataacaggagctgaaattgtggcaataatcaatagcttaccaaccaaaaagagtccgggaccagatggattcacagccgaattctaccagaggtacaaggaggaactggtaccattccttctgaaactattccaatcaatagaaaaagaggaaatcctccctaactcattttatgaggccagcatcattctgataccaaagcctggcagagacacaatcaaaaaagagaattttagaccaatatccttgatgaacactgatgcaaaaatcctcaataaaatactggcaaaacgaatccagcagcacatcaaaaagcttatccaccatgatcaagtgggcttcatccctggggatgcaaggctggttcaatatacgcaaattaataaatgtaatccagcatataaacagagccaaagacaaaaaccacatgattatctcaatagatgcaggaaaggcctttgacaaaattcaacaacccttcatgctaaaaactctcaataaattagatacaaaaagtgaacttttagatataaacaacctttatcaagcagcctctgatgaaataagagcgattgtagctttcctgttatctggaaatgctacagaaccagattgggttgaccacgatgttcgcgcctacatagcagcgatggaaatgaaagtgg

SEQ ID NO: 12517 - DNA, 8979 bp, Homo sapiens
  SIMILAR (767)..(925): 961254mologous to Homo sapiens testis-specific gene,accession number AB033129,Smith-Waterman Score=264.
atggctactctgatccccctactgtttcacaagcatcctcatctcacacaaagatatcaattcaacgtcagaggtggctgcccgacgagcaccagtgccattgctactctggatcctagaactgcagtgtttccactcatgtctgtttttcagacctcagctccatggccattttggggtttcactcatcagacaccagtgccacagccactgaaagtgaaaatccacagttctgcagacaccgctgctgatatccaggcaaacagggtctggagtggacctccagcaaactccaagagacctgcagctgaggaaggaaaactaacaaacagaaaggacatccacaccaaaaacccatctgtacgtcaccatcatcaaagaccaaaagtagataaaaccacaaagacggggaaaaaacagaggagaaaaactggaaactctaaaaagcagagcgcctgtcctcctccaaaggaacgcagttcctcaacagcaacggaacaaagctggacggagaatgactttgacaagttgagagaaggcttcagacgatcaaactactccaagctacaggacgaaattcaaaccaaaggcaaagaagttgaaaacttggaaaaaagtttagacgaatgtataactagaataaccaatacagagaagggcttaaagaagctcgagaactacgtgaagaatgaagaaacctcaggagccaatgcgatcaactggaagaaagggatcaacaaaattgatagaccactagcaagactaataaagagaaaaagagagaagaatcaaatagacgcaataaaaattgataaaggggatatcaccaccgatcccacagaaatacaaactaccatcagagaatactacaaacacctctatgcaaataaactagaaaatctagaagaaatggataaattcctcgacacatacactctcccaagactaaaccaggaagaagttgaatctctgaatagaccaataacaggagctgaaattgtggcaataatcaatagcttaccaaccaaaaagagtccaggaccagatggattcacagctgaattctaccagaggtacaaggaggaactggtaccattccttctgaaactattccaatcaatagaaaaagagggaatcctccctaactcattttatgaggccagcatcatcctgataccaaagctgggcagagacacaaccaaaaaagagaattttagaccaatatccttgaggaacattgatgcaaaaatcctcaataaaatactggcaaaccgaatccagcagcacatcaaaaagcttatccatcatgatcgagtgggcttcatccctgggatgcaaggctggttcaacatacgcaaatcaataaatgtaatccagcatataaacagaaccaaagacaaaaaccacatgattatctcaatagatgcagaaaaggcctttgacaacattcaacaacccttcatgctaaaaactctcaataaattaggaatggatgggacatatctcaaaataagaagagctatctatgacaaacccacagccaatatcatactgaatgggcaaaaactggaagcattccctttgataactggcacaagacagggatgccctctctcaccactgctatacaacatagtgttggaagttctggccagggcaattaggcagaagaaggaaataaagggtattcaattaggaaaagaggaagtcaaattgtccctgtttgcagacgacatgactgtatatctagaaaaccccatcatatcagcccaaaatctccttcagctgataagcaacttcagcaaagtctcaggatataaaatcaatgtacaaaaatcacaagcattcttatacaccaataacagacaaacagagagccaaatcaagagggaactcccattcacaattgcttcaaagagaataaaatacttaggaatccaacttacaagggatgtgaaggacctcttcaaggaaaactacaaaccactgctcaatgaaataaaagaggatacaaacaaatggaagaacattccatgctcatgggtaggaagaatcaatattgtgaaaatggccatactgcccaaggtaatttatagattcaatgccatccccatcaagctaccaatgactttcttcacagaattggaaaaaactactttaacgctcatatggaaccaaaaaagagcccacatcgtcaagtcaatcctaagccaaaagaacaaagctggaggcatcacgctaccagacttcaaactatactacaaggctacagtaaccaaaacagcatggtactggtaccaaaacagagatatagatcagtggaacagaacagagccctcagaaataatgccacatatctacaactatctgatctttgacaaacctgagaaaaacgagcaatggggaaaagattccctatttaataaatggtgctgggaaaactggctagccatatgtagaaagctcaaactggatcccttccttacaccttatacaaaaattaattcaagatggattaaaggcttaaatgttagacctgaaaccataaaaaccctagaagaaaacctaggcattaccattcaggacataggcatgggcaaggacttcatgtctaaaacaccaaaaacaatggcaacaaaagccaaaattgacagatgggatctcattaaactaaagaacttctgcacagcaaaagaaactaccatcagagtgaacaggcaaactacaaaatgggagaaaattttcacaacctactcatctgaaaaagggctaatatccagaatctacaatgaactcaaacaaatttacaagaagaaacaaacaaccccaacaaaaagaggtattccaaaagaaagcattattgtaataggagatgacagctccatgcatgttaatgcccctgaaggccttccagtgggacaagatttggaggttgaagatggtgatattgattatcctgattctgatggcagctcctcaccagctatggaacaaagctggacagagaaggactttgatgaattgacagaagtaggcttcagaagaataaacagtgtggagaagatgttaaatgacctgatggagctgaaaaccatggcacaagaactttgtgacacatgcacaagtttcagtagcagatttgatcaagtggaagaaaggatatcagtgattgaatatcaaattaatgaaataaagcaagaggaggagtttagagaaaaaagagtaaagagagacaaacaaagcctccaagaaatatgggacaatgtgaaaagaccaaatctatgtttgattggtatacctgaaagtgatggggagaatggaaccaagttggaaaacacttttcaggatattatccaggagaacttccccaacctagcaaggcaggccaacattcaaattcaggaaatacagaaaataccacaaagatactccttgagaagagcaaccccaagacacataattgtcagattcactaaggttgaaatgaaggaaaaaatgttaaaagcagccagagagaaaggtcaggttacccacaaagggaatcccatcagactaacagtggatctctcagcagaaaccttagaagccagaagagagtggggaccaatattcaacattcttaaagaaaagaattttccacccggaatctcatatccagccaaactaagcttcataagcaaaggagaaataaaatactttacagacaagcaaatactgagagattttgtcaccaccaggcctgccttacaagacctcctgaaggaagcactaaacacggaaagtaacaactggtaccagccactgcaaaatcatgccaaaatgtaaagaccatcgagactaggaagaaactgcatcaactaacgagcaaaatcaccagctaacatcataatgacaggatcaaattcacacataacaatattaactttaaatgtaaatggactaaattctccaattaaaagacacagactggcaagttggataaagagtcaagacccatcagtgtgctgtattcaggaaacccatctcatgtgcagagacacacataggctcaaaataaaaggatggaggaagatctaccaagcaaatggaaaacaaaaaaaggcaggggttgcaatcctagtctctgataaaacagactttaaaccaacaaagatcaaaagagacaaagaaggccattacatgatggtaaagggatcaattcaacaagaggagctaactatcctaaatatgtatgcacccaatacaggagcacccagattcataaagcaagtcctgagtgacctacaaagagacttagactcccacacattaataatgggagactttaacaccccactgtcaacattagacagatcaacgagacagaaagtcaacaaggatacccaggaattgaactcagctctgcaccaagcagacctaatagacatctacagaactctccaccccaaatcaacagaatatacatttttttcagcaccacaccacagctattccaaaattgaccacatacttggaagtgaagctctcctcagcaaatgtaaaagaacagaaattataacaaactatctctcagaccacagtgcaatcaaactagaactcaggattaagaatctcactcaaagccgctcaactacatggaaactgaacaacctgctcctgaatgactactgggtacataacgaaatgaaggcagaaataaagatgttctttgaaaccaacgagaacaaagacacaacataccagaatctctaggacgcattcaaagcagtgtgtagagggaaatttatagcactaaatgcccacaagagaaagcaggaaaagatccaaaattgacactctaacatcacaattaaaagaactagaaaagcaagagcaaacacattcaaaagctagcagaaggcaagaaataactaaaatcagagcagaactgaaggaaatagagacaacaaaaaaaaaaacccttcaaaaaattaacgaatccaggagctggtttttttgaaaggatcaacaaaattgatagaccgctagcaagactaacaaagagaaaaagagagaagaatcaaatacacgcaataaaaaatgataaaggggatatcaccaccaccgatccccacagaaatacaaactacccatccagagattactacaaacacctctacgccaaataaacttgaaaatctaggagaaataaggattaattcctcgacacatacactctcccaagactaaaccaggaagaagttgaatctctgaacagaccaataacaggagctgaaattgtggcaataatcaatagcttaccaaccaaaaagagtccaggaccagatggattcacagccgaattctaccagaggtacaaggaggaactggtaccattccttctgaaactattccaatcaatagaaaaagagggaatcctccctaactcatttgatgagacgagcatcatcctgataccaaagccgagcagagacacaaccaaaagagagaattttagaccaaggtgcgttgatgaacattgatgcaaaaatcctcaataaaatactggcaaaacgaatccagcagcacatcaaaaaagcttattcaccatgatcaagtgggcttcatccctgggatgcaaggttggttcaacatacgaaaatcaatgaatgtaatccagcatataaacagaaccaaagacaaaaaccacatgattatctcaatagatgcagaaaaaggcctttgacaaaattcaacaacccttcatgctaaaaactctcaataaattaggtattgatgggacgtgtttcaaaataataagagctatctatgacaaacccacagccaatatcatactgaatgggcaaaaactggaagcattccctttgaaaactggcacaagacagggatgccctctttcaccacatactaccattaacatagtattctgccccatagtgttctggccagggcaatcaggcaagagaaggaaataaagggtattcaattaggaaaagaggaagtcaaattgtccctgtttgcagatgacatgattgtatatctagaaaaccccattgtctcagcccaaaatctccttaagctgataagcaacttcagcaaagtctcaggatacaaaatcaatgtacaaaaaatcacaagcattcttatacaccaacaacagacaaacagagaaccaaatcatgagtgaactcccattcacaattgcttcaaagagaataaaatatctaggaatccaatttacaagggatgtgaaggacctcttcaaggagaactacaaaccactgctcaacgaaataaaagaggatacaaacaaatggaagaacattccatgctcatgggtaggaagaatcaatatcgtgaaaatggccatactgcccaaggtaatttatagattcaatgccatccccatcaagctaccaatgactttcttcacagaattggataaaactactttaaagttcatatggaaccaaaaaagagccctcattgccaagtcaatcctaagccaaaagaacaaagctggaggcatcacgctacctgacttcaaactatactacaaggctacagtaaccaaaacagcatggtactttttaccaaaacagagatatagatcaatggaacacaacagagccctcagaaataacaccgcatatctacaactatctgatctttgacaaatctgacaaaaacaataaatggggaaaggattccctatttaatgaatggtgctgggaaaactggctagccatatggagaaagccgaaactagatcccttccttacaccttatacaaaaatcaattcaagatggattaaagacttaaatgttagacctaaaaccataaaaaccctagaagaaaacctaggcattaccattcaggacataggcgtgggcaaggacttcatgtccaaaacaccaaaagcaatggcaacaaaagccaaaattgacaaatgggatctaattaaactaaagagcttctgcacagcaaaagaaactaccatcagagtgaacaggcaacctacaacatgggagacaattttcacaacctactcatctgacaaagggctaatatccagaatctacaatgaactcaaacaaatttacaagaaaaaaacaaacaaccccatcaaaaagtgggcgaaggacatgaacagacacttctcaaaagaagacatttatgcagccaaaaaacacatgaaaaaatgctcatcatcactggccatcagagaaatgcaaatcaaaaccactatgagatatcatctcacaccagttagaatggcaatcattaaaaagtcaggaaacaacagaaccaatgacaaaaaccaagtgattatctcaatagatgcagcaaaggccttcgagaaaattcaacaccccttcatgccaaaaatactcaaaaaactaggtattgatggaacgtatctcaaaataataagagctatttatgacgaacccacagccaatatcatactgaatcggcaaaagctgaaagcattccctttgaaaaccagcacaagacaaggatgccttctcttaccactcctattcagcatagtattggaagttctgaccagggcaatcaggcaagagaaagaaataaagggaattcaaataggaagaaaagaagtcaaatcatctctgtttgcagatgatatgattgtatacctagaaaaccctaaagcctcatccaaaaagcttccagaactaaacaaagacacaatataccagaatctctgggatgcattcaaagcagtatgtagagggaaatttacagcactaaatgcccacaagagaaagcaggaaagatccaaaattgacaccctaacatcacaattaaaagaactagaaaagcaagagcaaacacattcaaaagctatcagaagacaagaaataactaaaatcagagcagaactgaaggaaatagagacacaaaaaacccttcaaaaaattaatgaatccaggagctggttttttgaaaggatcaacaaaattgatagaccgctagcaagactaataaagaagaaaagagagaagaatcaaatagacacaataaaaaatgataaaggggatatcaccaccaatcccacagaaatacaaaccaccatcagagaatactacaaacacctctacgcaaataaactagaaaatctagaagaaatggatacattcctggacacatacactctcccaagactaaaccaggaagaagttgaatctctgaatagaccaataacaggagctgaaattgtggcaataatcaatagcttaccaaccaaaaagagtccaggaccagatggatccatagctgaattctaccagaggtacaaggaggaactgctgataagcaacttcagcaaagtctcagcatacaaaatcaatgtacaaaaatcacaagcattcttatacaccaacaacagacaaacagagagccaaatcatgagtgaactcccattcacaattgcttcaaagagaataaaatacctaggaatccaacttacaagggatgtgaaggacttcttccaggagaattacaaaccactgctcaaggaaataaaagaggatacaaacaaacggaagaacattccatgctcatgggtaggaagaatcaatatcgtgaaaatggccatactgcccaaggtaatttttagattcaatgccatccccatcaagctaccaatgcctttcttcacagaattggaaaaaactactttaaagttcatatggaaccaaaaaagagcccgcatcgccaagtcaatcctaagccaaaagaacaaagctggaggcatcacactacctgacttcaaactatactacaaggctacagtaaccaaaacagcatggtactggtaccaaaacagggatatagatcaatggaacagaacagagccctcagaaataatgccgcatatctacaactatctgatctttgacaaacctgagaaaaacaagcaatggggaaaggattccctttttaattaa

SEQ ID NO: 12518 - DNA, 2614 bp, Homo sapiens
  SIMILAR (262)..(990): 461254mologous to Xenopus laevis ER1,accession number AF015454,Smith-Waterman Score=478.
  misc_feature (1)...(2614): n = a,t,c or g
atggacaaattccttgaaaaatacaccctcctaagactaaaccaggaagaagttgaatctctgaacagaccaatagcaggagctgaaattgtggcaataatcaatagcttactaaccaaaaagagttcaggatcagatggattcacagccgaattctaccagagaattggaaaaactactttaaagttcatacggaaccaaaaaagagcccacatcgccaagtcaatcctaagccaaaagaacactgctggaggcatcacgctacctgacttcaaactatactacaaggctacagtaaccaaaagagcatggctcagcgctgaagcccgagaggactgcggctggaaagcggccgagcacatggacgagctcctggcgcgcctgctgcagggtctgggttctcaggccgggggccgcgggcgtcctcggagcctcggcgggacgtgggggctcgggtgtactggccgggccgatgcaggaaagcgggagcgcgtaattcttcggcctgtggtggacacagatgtgtgcagggagatctttctccatatcagtaatggcagaaccctgggagtcacccttcagactcagtcacttaagagccctgtcaaagttatcttcaaagtgcttctgtcccatccactgccttctccactgtccttctgtccttgccacacccttgtcaccattacccctcccctggcccctctggccctctgccaaatgattcgctacacatcagaacacttaaggagttccgtgatcgaccgaaaggacttaataatcaaaaggattaagcccaaaccccagcaaggagatgacatcacagtggtagacgtagagaagcagattgaggccttccgcagccgcctgatccagatgctgggggagcctcttgtcccccaactccaagacaaagtgcacttgttgaagctcctgctcttctatgctgcggacttgaaccctgatgcagagccctttcaaaagggctggagcggctcctgagggcctgccaagcactgaatgccaagaatacctcctgaactctctctccaactgctcagaagctctaaaagcatgaaaagtggttaaaatcttacaggaccaaacctgcattatttaatcagtaggttgtaatttctaaactctagtaaatatctttttttaaaataatcctatcatagcctgttctcaaatatggcttaaatatacaaggtatatatattttttaataaattatttatctatacttttttgaaacaggttaatactctgtgcatcacatgtttaacattttcattcaagatgtggaaaaaatccctctgactgaacctagtctatacaccaatattatgtcattcaaggtaccgacaacctgtttcaggagagagacgttcatttttccctaatgaaatgcaagcattctgttagacctattatattgcctgttaatttgactgtaatgaatagggggtagaaacaaaaggatcaagtgtgttataaaacatttgatgttaaaaggagacaataaaaaggcaatggtttttcaaaataccaagttcagtgtgactctgggtgggcagagtggaataactattgttaaaaggacaaaaaaatagccacatttgagaatagttgtaaggattgggagttgtcaaaactgagatcataatagaagactacaaataaattaattgttctccataaattttagactccagggcctctctatggaaaggcccagcttcttatacagacaaggtactatccaaaaaaaaaagcaggtatttggagacagtgttcaagacaaccaagtgaacttgtaacacagtgaagagaaaataaaaaggtggctttccgtatttccctccctcaagtaaggtttatgtgttgccataaaggggatgaggcctcattttttggtggaaaaatgctttccataccaggaaaatttttgaattggagtgacctcccccgcacagggcgttcccgggggncctgaccctggaaccaaggaaatccaaagtaaggttaacacccactgggctttcaccatggaacctcaagactataatcctaacgggtatcctacccatctcctttactttaaaaaaagtttaatgtccatttacctatacccaattcagtagacttaattttctcttttagaaagtttttaaccaaattacagctaaagttaatctcactttaaagtgcaagaaaggctctgctagagtagtgtttgttctgtggcatagaaagaggagcatgccgtcctccggcacctgcctaagaggccccgacatgaagaactagctgcaagacagtgatccattaggtctgccaaaaagcagggggactcaaggttcagcctagaaagaggggtccctgccaagtctggcttttacctgtacccaggtcccaaacaaaccttgggtcccctaactgataaggctggagcacagcaccagtcatcaacagggccaaagtcgtcttagcgagtcagtgagcacctctaagccatgatttgtcaatgctcacatggatagtggtaaaggaataaagaagcctgggttttggaacagtacaaacattctttacctagtaagcagtgatc

SEQ ID NO: 12519 - DNA, 1380 bp, Homo sapiens
  SIMILAR (1054)..(1395): 991254mologous to Homo sapiens FLJ00044 protein,accession number AK024452,Smith-Waterman Score=593.
atgaataatgctaaagaaaactttcttggaaggttccaagatggccgaataggaacagctccagtctacagcccccagcatcagcgacgcagaagacgggtgatttctgcattaccaactgagcctccactggtgatacccaggcaaacagggtttggagtggacctccagcaaactccaacagacctgcagctgagggtcctgactgtgagaaggaaaactaccaaacaggaaggacattccaccaaaaccccatctgtacgttaccatcatcaaagaccaaaggaagataaaaccacaaagatggggagaaaccagagcagaaaagctgaaaattctaaaaatgagagcgcctcttctcctccaaaggaatgcagctcctcgccagcaacagaacaaagctggatggagaatgactttgacaagtacacagaagtaggcttcagacaactggtaataacaaacttctctgagctaaaggaagatgttcaaacccatcacaaagaagctaaaaatcttgaaaaaagattagacgaatggctaactagaataaacagcatagagaataccttaattgatctgatggagctgaaaaccatggcacgagaactacgtgactcatgcacaagcttcagtagacaattcgatcaagtggaggaaagggtatcagtgattgaagatcaaatgaacgaaatgaagcgagaagagaagtttagagaaaaaaagatgctggaagttctgcccagggcaatcaggcaggagaaagaaataaagggtattcaattaggaaaagaggaagtcaaattgtccctgtttgcagataacatgactgtatatttagaaaaccccatcatctcagcccaaaatctccctaagctgataagcaacttcagcaaagtctcaggatataaaatcaatgtgcaaaaatcacaagcattcctatacaccaataacagacaaacagagagccaaatcatgagtgaactctcattcacaattgcttcaaagagaataaaatacctaggaatccaacttaaaagggatgtgaaggaactcttcaagaactacaaaccactgctgaaggaaataaaggaagacacaaacaaatggaagaacatcccatgttcatgggtaggaagaaccaatatcgtgaaaatggccatactgcccaagataatttatagattcaatgctatccccatcaagccaccaatgactttctttacagaattggaaaaaactactttaaagttcataaggaaccaaaaaagagcccacattgccaagacaatcctaagcaaaaagaacaaagctggaggcatcatgctacctgacttcaaactatactacaaggctacagtaacaaaaacagcatggtaa

SEQ ID NO: 12520 - DNA, 2212 bp, Homo sapiens; identical to SEQ ID NO: 4874
  SIMILAR (1477)..(206): 1001254mologous to Homo sapiens uKATP-1,accession number D50312,Smith-Waterman Score=2151.

SEQ ID NO: 12521 - DNA, 1444 bp, Homo sapiens
  SIMILAR (694)..(1965): 1001254mologous to Homo sapiens uKATP-1,accession number D50312,Smith-Waterman Score=2151.
ttaagaagcatgacaatgcttcagacttgatgactttgaaatctgttgttcttcatggtgcactggcgcttggctgtctcgcttaatcattgtggcattaatgatgccactagtggcttgaggctttaactgggtactcagacccagtctgatggtagtttcttttgctgtgcagaagctctttagtttaatcagatcccatttgtcaattttggcttctgttgccattgcttttggtgttttagacatgaagtccttgcccatgcctatgtcctgaatggtattgcctaggttttcttctaggatttttatggttttaggtctaacatttaagtctttaatccatcttgaattaatttttgtataaagtgtaaggaggggatccagtttcagctttctccatatggctagccagttttccaagcaccatttattaaatagggaatcctttccccatttcttgtttttgtcaggtttgtcagagatcagatggttgtagatatgcagcattatttctgagggctctgttctgttccattgctctgtatctctgttttggtaccagtaccatgctgttttggttactgtagccttgtagtatagtttgaagtcaggtagagtgatgcctccagctttgttcttttggcttaggattttcttggcaatgcggtctcttttttggttccatatgaactttaaagtagttttttccaattctgtgaagaaagtcattggtagcttgatggggatggcattgaatctgtaaatttccttgggctgtatggccattttcacagtactgattcttcctacccatgagcatggaatgttcttccatttctttgtatcctcttttatttccttgagcagtggtttgtagttctccttgaagaggtccttcacgtcccttgtaagttggattcctaggtattttattctctttgaagcagttgtgaatgggagttcactcatgatttggctctctgtttgtctgctattggtgtataagaatgcttgtgatttttgcacattgattttgtatcctgagactttgctgaagttgcctatcagcttaaggagattttgggctgagactatggggtttcctacatatataatcatgtcatctgcaaacagggacactttgacttcatcttttcctaattgaataccctttatttccttctcctgcctgattgccctggccagaacttccaacacaatgttgaataggagtggtgagagagggcatccctgtcttgtgccagttttcaaagggaatgcttccaggttttgccattcagtatgatattggctctggtagaattcggctgtgaatccatctggtcctggactttttttgattggtcggctattaattattgcctcaatttcagagcctcttattggtctattcagggattcaacttcttcctggtttagt

SEQ ID NO: 12522 - DNA, 1413 bp, Homo sapiens
atggggagaaaccagagcagaaaagcggaaaattctaaaaaccagagcacctcttctcctccaaaggattgcaactcctcgccagcaacagaacaaaggtggatggagaatgactttgatgagctgacagaagtaggcttcagaagaaccaatgaaaaaaaccacatgattatattaatagttgcagaaaaggcctttgacaaaattcaacagcccttcatgctaaaaactctcaacaaactacgtattgatggaatgtacgtcaaaataataacagctatttatgacaaacccacagccaatatcatcctgaatgggcaaaaactggaaagattccctttgaaaactggcacaagacagggacaccctctctcaccactcctattcaacatagtgtcggaagttctggccagggcaatcaggcaagagaaagaaataaaggacaaacagagtcaaattatgagtgaactcccattcacaattgctacaaagagaataaaatacctaggaatccaacttatgagggatgtgaacgacctcttcaaggagaactacaaaccactgctcaacgaaataaaagaggacacaaacaaatggaggaacattctatgctcacggttaggaggaatcaatatcgtgaaaatggccatactgcccaagaattggaaaaaaactactttaaagtttatctggaaccaaaaaagagcccgcattgccaagacactcctaagcaaaaagaacaaagctggaagcatcatgctacctgacttcaaactatactacaaggctacagtaatcaaaacagcatgttactggtaccaaaacagatatatcaaccaatggaacagaatggaggcctcagaaataacaccacatatctacaaccatctgatctttgacaaacctgacaaaaacaagaaatggggaaaggattccctatttaataaatggtactggggaaactggctagccatgtgtagaaagctgaaactggatcccttccttacacctcatataaaaattaattcaagatggattaaagacttaaatattagacctaaaaccataaaaaccttagaagaaaacctaggcaataccattcaggacataggcatgggcaaggacttcatgactaaaacaccaaaatcaatggcagcaaaagccaaaattgataaatgggatctaattaaactaaagagcttcggcacagcaaaagaatctaccatcagagtgaacaggctacctacagaatgggagaaaatttttgcaatctactcatctgacaaagggctaatatccagaatctacaatgaattcaaacaaatttacgagaaaaaaatcaaacaaccccatcaaaaagtgggcaaaggatatgaacagacacttctcaaaagaagacatttatgcagctga

SEQ ID NO: 12523 - DNA, 1464 bp, Homo sapiens; identical to SEQ ID NO: 8951
  SIMILAR (526)..(2): 991254mologous to Homo sapiens hARPX,accession number AB038229,Smith-Waterman Score=911.

SEQ ID NO: 12524 - DNA, 1917 bp, Homo sapiens
  SIMILAR (1234)..(1788): 611254mologous to Homo sapiens HSPC281,accession number AF161399,Smith-Waterman Score=500.
atggataaattcttggacaaatccacccttccaagactaaaccaggaagaagatgaatctctgaatagacaagtaacaggctctgaaattgaggcaataattaatagcctaccaaccaaaaagagtccaggaccagatggattcacagacaaattctgccagaggtacaaagaggagctggtaccattccttctgaaactattccaatcaacagaaaaagagggaatcctccttaactcattttatgaggccggcatcatcttgataccaaagcctggcagagacacaacaaaaaaagagaattttagaccaatatccctgatgagcatcaatgcaaaaatcctcaataaaatactggcaaaccgaatcctgcagcacatcaaaaagcttatccatcacgatcaagtcggcttcatccttgggatgcaaggctggttcaacatatgcaaatcaataaacataatccattgcataaacagaaccaatgacaaaaaccacatgattatctcaatagatgcagaaaaggccttcaacaaaattcaacagcccttcatgctaaaaactctcaataaactggtgttggaagttctggccaaggcaatcaggcaagagaaagaaataaagggtattcaattaggaaaagaggaagtgaaattgtctctgtttgcagatgacatcattgtatatttagaaaaccccatcgtctcagccccaaatctccttaagctgataagcaacttcagaaaagtctcaggatacaaaatcaatgtgcaaaaatcacaagcattcctatacaccaataacagacaaacagagagccaaatcatgagtgaactcccattcacaattgctacaaagagaataaaataccaaggaatccaacttacaagggatgtgaaggacctcttccaggagaattacaaaccagtgctcaacgaaataaaagaggacacaaacaaatggaagaacattccgtgctcatggttaggaagaatgaacatcgtgaaaatggccatactgcccaaggtaatttatagattcaatgccatccccatcaagctatcaatgactttcctcacagaattggaaaaaactactttaaagttcgtatggaaacaaaaaggagcccacattgccaagacaatcctaagcaaaaacaacaaagctggaggcatcatgctacctgacttcaaactatactacaaggctacagtaaccaaaacagcatggtactggtaccaaaacagagagatagaccaatggaacagaacagagccctcagaaataataccacacatctacaaccatctgatctttgacaaacctgacaaaaacaagaaatggggaaaggattccctatttaataaatggtgctgggaacactggctagccatatgtagaaagctgaaactagatcccttccttacaccttatacaaaaattaattcaagatggattaaagacttaaatgttagacctaaaaccataaaaactctagcaggacacctaggcaataccattcgggacataggcttgggcaaggacttcatgactaaaacaccaaaagcaatggcaacaaaagccaaaatagacaaatgggatctaattaaactaaagagcttctgcacagcaaaagaaacggccatcagagtgaataggcaacctacagaatgggagaaaatttttacaatctacccatctgacacagggctaatacccagaatctacaaagaacttaaacaaatttacaagagaaaacaaacagcccatcaagaactgggcaaaggatatgaacagatgtttctcaaaagaagacatttatgcagccaacagacacatgaaaaaatgctcatcatcactggccatcagagaaatgcaaatcaaaaccacaatgagataccagctcacaccagttag

SEQ ID NO: 12525 - DNA, 1899 bp, Homo sapiens; identical to SEQ ID NO: 3489
  SIMILAR (1)..(2922): 961254mologous to Homo sapiens unknown,accession number AF148856,Smith-Waterman Score=4909.

SEQ ID NO: 12526 - DNA, 1719 bp, Homo sapiens
  SIMILAR (739)..(1368): 911254mologous to Homo sapiens putative p150,accession number U93572,Smith-Waterman Score=1061.
atggataaattcctcgacacatacaccctcccaagactaaaccaggaagaagttgaatccctgaatagaccaataacaggctctgaaattgaggcaataattaacagcctaccaacccagaaaagttcaggaccagatggattcacagccgaattctaccagaggtacaaggaggagctggtaccattccttctgaaactattccaatcaatagaaaaagagggaatcctccctaactcattttatgaggccagcatcatcctgataccaaagcctggcagatacacacacaaaaaaaacaattttagaccaatatccctgatgaacatcgatgcaaaaatcctcaataaaatactggcaaaccgaatccagcagcacatcaaaaagcttatccaccaggatcaagtgggcatcatccctgggatgcaaagctggttcaacatacacaaatcaataaatgtaatccagcatataaacagaaccaaagacaaaaaccacatgattatctcaatagatgcagaaaaggcctttgacaaaattcaacaaccattcatgctaaaaactctcaataaattagagaataaaatacctaagaatccaacttacaagggatgtgaaggacctcttcaaggagaactacaaatcactgctcaacgaaataaaggaagacacaaacaaatggaagaacatcccatgctcatggataggaagaatgaatatcataaaaatggccatactcccaaggtaatttatagattcaatgtcatccccatcaaactaccaatgactttcttctcagaattggaaaaatctacgttaaagttcatatggaaccaaaaaagagcccgcattgccaagacaatcctaagccaaaagaacaaagctggaggcatcatgctacctgacttcaaactatactacaaggctacagtaaccaaaacagcatggtactggtaccaaaacagagatatagaccaatggaacagaacagagccctcagaaatgacaccacacatctacaaccatctgatctttgacaaacctgacaaaaacaagcaatggggaaaggattccctatttaataaatggtgctgggaaaactggctagccataggtagacagctgaagctggatcccttccttacaccttatacaaaaattaattcaaggtggattaaagacttaaatgttagacctaaaaccatcaaaaccctagaggaaaacctaggcaataccattcaggacataagcatgggcaaggacttcatgtctaaaacaccaaaagcaatggcaacaaaagccaaaatggacaaatgggatctaattaaactaaagagcttctgcacagcaaaagaaactaccatcagacaaagttggcccgagatgaccaaattcacattctcaagcaacaccgacgtaaagaactggaaacacggcaaaaacaatatcgggagacataagacatcagtcaatacatgtaagatggacagtggtttggttttggaaagatggatggagtggaaccctggcttccccttgagcatcgatgccaaatgccacaaggatttaccccgtgatatccagtttgatagtgaaaaaggagtggactttgttctgaattactccaaagcgaatatgcgttgggcagggtctatgtttctcgtacctccaccccgtggtgaagatgaggaataccacactgtcttccacaatggttga

SEQ ID NO: 12527 - DNA, 1827 bp, Homo sapiens
  SIMILAR (1394)..(3028): 951254mologous to Homo sapiens putative p150,accession number U93563,Smith-Waterman Score=2707.
atgaaggcagaaatcaagatgttctttgaaaccaacgagaacaaagacacaacatgtcagaatctctgggacgcattcaaagcagtgtgtagagggaaatttatagcactaaatgcacacaagagaaagcaggaaagatccaaaattgacaccctaacatcacaattaaaagaactagaaaagcaagagcaaacacattcaaaagctagcagaaggcaagaaataactaaaatcagagcagaactgaaggaaatagagacacaaaaaacccttcaaaaaattaatgaatccaggagctggttttttgaaaggatcaacaaaattgatagaacgccagcaagactaataaagaaaaaaagggagaagaatcaaatagacgcagtcaaaaatgataaaggggatatcaccaccaatcccacagaaatacaaagtaccatcagagaatactacaaacacctctatgcaaataaactagaaaatctagaagaaatggataaattcctcgacacatacactctcccaagactaaaccaggaagaaattgaatctctgaatagaccaattacaggatctgaaattgtggcaataatcaatagcttaccaaccaaaaagagtccaggaccagatggattcacagccgaattctatcagaggtacaaggaggaactggtaccattccttctgaaactattccaatcagtagaaaaagagggaatcctccctaactcattttatgaggccagcatcattctgataccaaagccgggcagagacacaaccaaaaaagagaattttagaccaatatccttgatgaacattgatgcagaaatcctcaataaaatactggcaaaacaaatccagcagcacatcaaaaagcttacccaccataatcagagaataaaatacctaggaatccaacttacaagggatgtgaaggacctcttcgaggagaactacaaaccactgctcaaggaaataaaagaggatacaaacaaatggaagaacattccatgctcatgggtaggaagaatcaatatcgtgaaaatggccctactgcccaaggtaatttacagattcaatgccatccccatcaagctagcaatggctttcttcacagaattggaaaaaactactttaaagttcatatggaaccaaaaaagagcccacattgccaagtcaatcctaagccaaaagaacaaagctggaggcatcacgctacctgacttcaaactacactacaaggctacagtaaccaaaacagcatggtactggtaccaaaacagagatatagatcaatggaacagaacagagccctcagaaataacaccgcatatctacaactatctgatctttgacaaacctgagaaaaacaagcaatggggaaaggattccctctttaataaatggtgctgggaaaactggctagccatatgtagaaagctgaaactggatcccttccttacaccttatacaaaaattaattcaagatggattaaagacttaaacgttagacctaaaaccataaaaaccctagaagaaaacctaggcattaccattcaggacataggcatgggcaaggacttcatgtctaaaacaccaaaagcaatggcaacaaaagccaaaattgacaaatgggatctaattaaactcaagagcttctgcacagcaaaagaaactaccatcagagtgaacaggcaacctacaaaatgggagaaaattttcacaacctactcatctgacaaagggctaatatccagaatctacaatgaactcaaacaaatttacaagaaaaaaacaaccccatcaaaaagtgggcggaggacatga

SEQ ID NO: 12528 - DNA, 1377 bp, Homo sapiens
  SIMILAR (1009)..(2544): 921254mologous to Homo sapiens putative p150,accession number U93572,Smith-Waterman Score=2525.
cctctgctgctgatgcccaggcaaacaggatctggagtggacctccagcaaactccaacagacctgcagctgagggtcctgattcttagaaggaaaactaacaaacagaaaggacatccacaccaaaaccccatctgtacgtcaccttcatcaaagaccaaagtgttggaagttctggccagggcaatcaggcaggagaaggaaataaagggtattcaattaggaaaagaggaagtcaaattgtccctgtttgcagatgacatgattgtatatctagaaaaccccatcatctcagcccaaaatctccttaagctgataagcaacttcagcaaagtctcaggatacaaaatcaatgtgcaaaaatcacaagcattcttatactccaataacagacaaacagagagccaaatcatgagtgaactcccattcacaattgcttcaaagagaataaaatacctagcaatccaacttacaagggatgtgaaggacctcttcaaggagaactacaaaccactgctcaatgaaataaaagaggatacgaacaaatggaagaacattccatgctcatgggtaggaagaatcaatatcatgaaaatggatatactgcccaaggtaatttatagattcaatgccatccccatcaagctaccaatgactttcttcacagaattggaaaaaactactttaaagttcatatggaaccaaaaaagagcccgcattgccaagacaatcctaagccaaaagaacaaagccggaggcatcacgctacctgacttcaaactatactacaaggctacagtaaccaaaacagcatggtactggtaccaaaacagcgatatagaccattggaacagaacagagccctcagaaataatgccacacatctacaactatctgatctttgacaaatctgacaaaagcaggaaatggggaaaggatttcctatttaataaatggtgctgggaaaactggctagccgtatgtagaaagctgaaactggatctcttccttacaccttgtagaaaaattaattcaagatggattaaaaacttaaatgttagacctaaaaccataaaaaccctagaagaaaacctaggcaataccattcaggacataggcatgggaaaggacttcatgtctaaaacaccaaaagcaatggcaacaaaagccaaaattgacaaatgggatctaattaaactaaagagcttctgcacagcaaaagaaactaccgtcagagtgaataggcaacctacagaatgggagaacatttttgcaatctacttatctgacaaagggctaatatccagaatctacaaagaactcaaacaaatttacaagaacaaaacaaccccatcaacaagtggacaaaggatatga

SEQ ID NO: 12529 - DNA, 1542 bp, Homo sapiens; identical to SEQ ID NO: 3493
  SIMILAR (848)..(1300): 941254mologous to Homo sapiens putative p150,accession number U93574,Smith-Waterman Score=729.

SEQ ID NO: 12530 - DNA, 1869 bp, Homo sapiens
  SIMILAR (577)..(1866): 901254mologous to Homo sapiens putative p150,accession number U93564,Smith-Waterman Score=2064.
atggataaattcctggacaaatacaccctcccaagactaaaccaggaagaagttgaatctctgaatagaacaataacaggctccgaaattgaggcaataattaatagcctatcaaccaaaaaaagtccaggaccagacggattcacagccgaattctaccagaggtacaaagaagagctggtaccattccttctgaaacttttccaatcaatagaaaaagagggaatcttccctaacttattttatgaggccaacatcatcctgataccaaagcctggcagagacacaacaaaaaaagagaattttagaccaatatccctgatgaacgtcaatgcaaaaatcctcaataaattactggcaaaccaaatccagcagcacatcaaaaagcttatccaccacaatcaagttggcttcatccctgggatgcaaggctggttcaacatatgcaaatcaataaacgtaatccagcatataaacagaaccaaagacaaaaaccacaggagtatctcaatagatgcagaaaaggccttcaacaaaattcaacagccatttatgctaaaaactctcaataagctagatgacatgattgtatatttagaaaatcccatcgtctcagccaaaaatctccttaaactgataagcaacttcagcaaagtctcaggatacaaaatcaatgtgcaaaaatcacaagcattcttatacaccaataacagacaagcagagagccaaatcatgagtgcagtctcattcacaattgcttcaaagagaataaaatacctaggaatccaacttacaagggatgtgaaggacctcttcaaggagaactacaaaccagtgctcaacaaaataaaagaggacacaaacaaatggaagaacattccaagcttatggatagggagagtcaatatcatgaaaatggccatactgcccaaggtaatttatagattcaatgccatccccatcaagctaccaatgactttcttcacagaattggaaaaaactactttaaagttcatatggaaccaaaaaagagcccacattgccaagacaatcctaagcaaaaagaacaaagctggaggcatcacactacctgactttaaactatactacaaggctacagtaaccaaaacagcatggcactggtaccaaaacagagatatagaccaatggaacagaacagagccctcagaaataataccacacatctacaaccacctgatctttgacaaactggacaaaaacaagacattgggaaaggattacctatttaataaacggtgctgggaaaactggctagccatatgtagaaagctgaaactggatcccttccttacacgttatacaaaaattaattcaagatggattaaagacttaaatattagacctaaaaccataaaaaccctagaagaaaacctaggcgataccattcaggacataggcatgggcaaggacttcataactaaaacaccaaaagcaatggcaacaaaagccaaaattgacaaatgggatctaattaaactaaagagcttctgcacagcaaaagaaactaccatcagagtgaacaggcaacctacagaatgggagaacatttttgcaatctacccatctgacaaagggctcatatccagaatctacaaagaacttaaacaaatttacaagaaaaaatcaaacaaccccatcaaaaagtgggcgaaggatatgaacagatatttctcaaaagaagacatttatgcagccaacagacacatgaaaaaatgctcatcatcactggccctcagagaaatgcaaatcaaaaccacaatgagataccatctcataccagtaagaatggcgatcattaaaaagtcaggaaacaacaggtgctggtga

SEQ ID NO: 12531 - DNA, 1578 bp, Homo sapiens
  SIMILAR (1479)..(619): 911254mologous to Homo sapiens putative p150,accession number U93572,Smith-Waterman Score=1346.
tcatttcttgtttttgtcaggtttgtcaaagatcagatagttgtagatatgcggcattatttctgagggctctgttgtgttccattgatctatatctctgttttggtaccagtaccatgctgttttggttactgtagccttgtagtatagtttgaagtcaggtagcatgatgcctccagctttgttcttttggcttaggattgacttggcgatgtgggctcttttttggttccatatgaactttaaagtaattttttccaattctgtgaagaaagtcattggtagcttgatggggatggcattgaatccataaattatcttgggcagtagggccattttcaagatattgattcttcctacccatgagcatggaatgttcttccatttgtttgcatcctcttttatttcactgagcagtggtttgtagttctccttgaagaggtccttcacgtccctcgtaagttggattcctaggtattttattctctttgaagcaattgtgaatgggagttcactcatgatttggctctctgtttgtctgttactggtgtataagaatgcttgtgatttttgtgcattgattttgtatcctgagattttgctaaggttgcttatcagcttaaggagattttgggcttttatttccttctcctgtctaattgccctggccagaacttccaacactatgttgaataggagtggtgagagagggcatccctgtcttgtgccagttttcaaagggaatgcttccagtttttgcccattcagtatgatattggctgtgggtttgtcatagatagttcttattattttgagatacgtcccattaatacctaatttattgagagtttttagcatgaagcattgttgaattttgtcaaaggccttttctgcatctattgagataatcatgtggtttttgtctttggttctgtttatatgctggattacatttattgatttgtgtattttgaaccagccttgcatcccagggatgaagcccacttgattttggtggataaactttttgatgtgctgctggattcggtttgccagtattttactgaggatttttgcatcaatgttggtcaaggagattggtctaaaattctctttttttgttgtgtctctgccaggctttggtatctggacgatactggcctcataaaatgagttagggaggtttccctctttttctattgattggaatagtttcagaaggaatggtaccagctcctccttgtacctctggtagaattctgctgtgaatccatctggtcctggactctttttggttggtatgctattgattattgccacaatttcagagcctgttattggtctattcagagattcaacttcttcctggtttagtcttgggagggtgtatgtgtccaggaatctatccatttcttctagattttcccgtttatttgcgtagaggtttttgtagtattctctgatggtagtttgtatatctttgaacattcggcatatctttgcaaataacagctgcttttggttatgttggtggccactgctgttctttttctggctgggaaaggtttcagtcaacat

SEQ ID NO: 12532 - DNA, 1692 bp, Homo sapiens
  SIMILAR (2234)..(2875): 931254mologous to Homo sapiens unknown,accession number AF148856,Smith-Waterman Score=1113.
ttatttcttgtaaatttgtttaagttctttgtatattctggatattagccctttgtcagatggacagattacaaaaattttctcccattctgtaggtttcctgttcactctgatgatagtttcttttgctgtgcagaagctctttagtttaattagatcccatttgtcaattttggcttttgttgccattgcttttggtgttttaatcatgaagtctttacccatgcctatgtcttgaatgctattgcctaggttttcttctagggtttttatggttttaggtcttacatttaagtctttaatccatcttgagttaatttttgtataaggtgtaaggaaggggtccaatttcagctttctgcatatggctatccagttttccgaagaccattcatgaaatagggaatcctttccccatagctcgtttttgtcaggtttgtcaaagatcagatggttgtagacgtgtggtgttattttgcaggcctctgttctgttccattggtctatatatctgttttggtaccagtaccatgctgttttggttactgtagccttgtagtatagtttgaagtcaggtagtatgatgcctccagctttgttctttttgcttcggcttttcttggctatgtgggctcttttttggttccatataaaatttaaagtagtcttttccaattctgtgaagaaagtcaatggtagcttgatgtggatagcattgaatctataaattactttgggcagtacggccattttcatgatattgattcttcctatccatgagcatggaatgtttttccatttgtttatgtcctctcttatttcgttgagtagtggtttgtagttctccttgaagaggtccttcacatcccttgtaagttggattcctaggtattttattctctttgtagcaactgtgaatgggagttcactcatgatttggatctctgtctcttgtctattattggtgtataggaatgcttgtgatttttgcacattgattttgtatcctgagactttgctgaagttgcttatcagcgtaaggagatttggggctgagacaatggggttttctaaatatacaatcatgtcatctgcaaacaaagacaatttgactttctctctgcctatttgaatacgctttattgctttctcttgcctgattgacctggccaggacttccaacgctatgttgaataggagtggtgagagagggcatccttgtcttgtgccggttttcaaagggagtgcttcctggttttgcccattcagtataatattggctctgggtttgttgtaaatagctcttattattttgagataccttccatcgatacctagtttttgggagtttttagcataaaaggctgttgaattttgtcgaaggccttttctgcattttatttcattgagttgatcttcaatctctgatagcctttcttctgcttggtcaattcggctattgatacctctgcatacttcatgaagttctcgtgctgtgtttttcagcttcatcaggtcatttatgttcttctctacactggttattcttctgaagcctacttctgtcaattcatcaaactcattctttgtccagttttgttcccttgctggagaggagttgtgatcctttgcgggagaggaggcgttctggtttttggaattttcagcctttttgcgctggtttctccccat

SEQ ID NO: 12533 - DNA, 1551 bp, Homo sapiens
  SIMILAR (390)..(286): 401254mologous to Bacillus subtilis yhaY,accession number Z99109,Smith-Waterman Score=68.
ctaactggtgtgagatagtatctcattgtggttttgatttgcatttctctgatgaccagtgatgatgagcattttttcatgtgtctgttgactgcataaatgtcttcttttgagaagtgtctgttcatatccttcacccactttttgatggggttgtttttttttcttgtaaatttgtttgagttctttgtagattctggatattagccctttgtcagatgagtagattgcaaaaattttctccaattctgtaggttgcctgtttactccgatggtagtttcttttgctgtgcagaagctctttagtttaattagatcccatttgtcaattttggcttttgttgcgattgcttttggtgttttagacatgaagtccttgcccatgcctatgtcctgaatggtaatgcctaggttttcttctagggtttttatgggtttaggtctaacatttaagtctttaatccatcttgaattaatttttgtgtaaggtgtaaggaagggatccagtttcagctttctacatatggctagccagttttcccaacaccatttattaaatagggaatcctttccccatttcttgtttttgtcaggtttgtcaaacatcagatggttgtagatgtgtggtattatttctgagggctctgttctgttgcattggtctgtatatctgttttggtaccagtaccatgctgttttggttactgtagccttgtagtatagtttgaagtgaggtagcatgatgcctccagctttgttctttttgcttaggattgacttggcaatgtggactcccttttggttccatatgaactttaaagtagttttttccaattctgtgaagaaagtcattggtagcttgatgtggatggcattgaatctataaattaccttgggcaatatggccattttcacaatattgattcttcctatccatgagcatggaatgttcttccatttgtttgtgtcctcttttattttgttcagcagtggtttgtagttctccttgaagaggtccttcacatcccttgtaagttggattcctaggtattttattgtctttgaggcaattgtgaatgggagttcactcatgatttggctctctgtttgtttgttattggtgtataagaatgcttgtgatttttgcacattgattttgtatcctgagactctgctgaagttgcttattagcttaaggagattttgggctgagacggtggggttttctaaatatacaatcatgtcatctgcaaacagggacaatttgacttcttcttttcctaattgaataccctttatttctttctcctgcctgattgccctggccagaacttccaacactgagtcaacaccaacgacagcaacactgtgcacacagtcactagcaggggctctccacccacaccgcagctgcattacctctgccttgtatctaccctcatcaactatttttgccagatctgggtaacttgctacagctcctccatcagcacttgctgcttcactgggctcttttatgttatgaagatggattttttccttaaatctcat

SEQ ID NO: 12534 - DNA, 1995 bp, Homo sapiens
  SIMILAR (232)..(870): 991254mologous to Escherichia coli TEM-derived extended spectrum beta-lactamase,accession number AF308742,Smith-Waterman Score=1085.
tcatgtgtcttttgagaagtgtctgttcatatcctttgcccactttttgatggggttgtttgtttttttcttgtaaattagtttgagttctttgtagattctggatattagccttttgtcagatgagtagattgcaaaaattttctcccattctgtaggttgcctgttcactctgacagtagtttcttttgctgtgcagaagctctttagtttaattagatcccatttgtcaattttggctttggttaccattgcttttggtgttttacacatgaagtccttgcccatgcctatgtcctgaatggtattgcctaggttttcttctagggtttttatggttttaggtctaacgtttaagtctttaatccatcttgaattaatttttgtgtaaggtgtaaggaagggatccagtttcagttttctacatatggctagccagttttcccagcaccatttattaaataggaaatcctttccccatttcttgtttttgtcaggtttgtcaaagatcagatggctgtagatgtgtggtattgtttctgagggctctgttctgttccattggtctatatctctgttttggtaccagtaccatgctgctttggttactgtagccttgtagtatagtttgaagtcaggtagcatgatgcctccagctttgttcttttggcttaggattgacttggcaatgcaggctcttttttggttccatatgaactttaaagtagttttttccaattctgtgaagaaaatcattggtagcttgatggggatggcactgagtctataaattaccttgggcagtatggccattttcacgatattgattcttcctatccatgaccatggaatgttcttccatttgcttgtgtcctcttttatttccttgagcattagtttgtagttctccttgaagagaggtccttcacatcccttgtaagttggattcctaggtattttattctctaatttattgagagtttttagaatgaagggctgttgaattttgtagaaggccttttctgcatctattgagataatcatgtggtttttgtctttggttctgtttatatgctggattacatttattgatttgcgtatgttgaaccagcattgcatcccaggaatgaagccagcttgatcatggcggataaggtttttgatgttctgctgcatttggtttgccagtattttattgaggatttttgcatcgatgttcatcagggatattggtctaaaattctctttttttgttgtgtctctgcccagctttggtatcaggatgatgctggcctcataaaatgagttagggaggattccctctttttctattgattggaatagtttcagaaggaatggtaccagctcctccttgtacctctggtagaattcggctgtgaatccgtctggtcttggactttttttggttggtaagctattaattattgcctcaatttcagagcctgttattggtctattcagagattcaacttcttcctggtttagtcttgggagggtgtatgtgtcgaggaatttatccatttcttctagattttctagtttatttgcatagaggtgtttataatattctctgatggtagtttgtatttctttggtgaatctgacaattatgtgtcttggagttgctcttctcgaggagtatctttgtggcattctctgtatttcctgaatctgaatgttggcttgccttcctaggttggggaagtccttctggataatatcctgcagagtgtcttccaacttgattccattctccccgtcactttcaggtacaccaatcagacatagatttggtctttccatatagtcccatatttcttggaggctttgttcacttctttttattcctttttctctaaacttctcttcttgcttcatttcattcatttgatcttcaatcactgataccctttcttccagttgatggaattggctactgaagcttgtgcattcgtcacgtagttctcgtgccat

SEQ ID NO: 12535 - DNA, 3033 bp, Homo sapiens; identical to SEQ ID NO: 7866
  SIMILAR (272)..(520): 661254mologous to Canis familiaris cyclophilin A,accession number AF243140,Smith-Waterman Score=222.

SEQ ID NO: 12536 - DNA, 3750 bp, Homo sapiens; identical to SEQ ID NO: 4879
  SIMILAR (1)..(648): 991254mologous to Homo sapiens Human tumour-associated protein PRO344,accession number Y06481,Smith-Waterman Score=1183.

SEQ ID NO: 12537 - DNA, 2227 bp, Homo sapiens
  SIMILAR (1651)..(1595): 711254mologous to Homo sapiens Fragment of human secreted protein encoded by gene 8,accession number Y36421,Smith-Waterman Score=69.
gacgacctgtctcgccgagcgcacgcttgccgccgccccgcagaaatgcttcggttacccacagtctttcgccagatgagaccggtgtccagggtactggctcctcatctcactcgggcttatgccaaagatgtaaaatttggtgcagatgcccgagccttaatgcttcaaggtgtagaccttttagccgatgctgtggccgttacaatggggccaaagggaagaacagtgattattgagcagagttggggaagtcccaaagtaacaaaagatggtgtgactgttgcaaagtcaattgacttaaaagataaatacaagaacattggagctaaacttgttcaagatgttgccaataacacaaatgaagaagctggggatggcactaccactgctactgtactggcacgctctatagccaaggaaggcttcgagaagattagcaaaggtgctaatccagtggaaatcaggagaggtgtgatgttagctgttgatgctgtaattgctgaacttaaaaagcagtctaaacctgtgaccacccctgaagaaattgcacaggttgctacgatttctgcaaacggagacaaagaaattggcaatatcatctctgatgcaatgaaaaaagttggaagaaagggtgtcatcacagtaaaggatggaaaaacactgaatgatgaattagaaattattgaaggcatgaagtttgatcgaggctatatttctccatactttattaatacatcaaaaggtcagaaatgtgaattccaggatgcctatgttctgttgagtgaaaagaaaatttctagtatccagtccattgtacctgctcttgaaattgccaatgctcaccgtaagcctttggtcataatcgctgaagatgttgatggagaagctctaagtacactcgtcttgaataggctaaaggttggtcttcaggttgtggcagtcaaggctccagggtttggtgacaatagaaagaaccagcttaaagatatggctattgctactggtggtgcagtgtttggagaagagggattgaccctgaatcttgaagacgttcagcctcatgacttaggaaaagttggagaggtcattgtgaccaaagacgatgccatgctcttaaaaggaaaaggtgacaaggctcaaattgaaaaacgtattcaagaaatcattgagcagttagatgtcacaactagtgaatatgaaaaggaaaaactgaatgaacggcttgcaaaactttcagatggagtggctgtgctgaaggttggtgggacaagtgatgttgaagtgaatgaaaagaaagacagagttacagatgcccttaatgctacaagagctgctgttgaagaaggcattgttttgggagggggttgtgccctccttcgatgcattccagccttggactcattgactccagctaatgaagatcaaaaaattggtatagaaattattaaaagaacactcaaaattccagcaatgaccattgctaagaatgcaggtgttgaaggatctttgatagttgagaaaattatgcaaagttcctcagaagttggttatgatgctatggctggagattttgtgaatatggtggaaaaaggaatcattgacccaacaaaggttgtgagaactgctttattggatgctgctggtgtggcctctctgttaactacagcagaagttgtagtcacagaaattcctaaagaagagaaggaccctggaatgggtgcaatgggtggaatgggaggtggtatgggaggtggcatgttctaactcctagactagtgctttacctttattaatgaactgtgacaggaagcccaaggcagtgttcctcaccaataacttcagagaagtcagttggagaaaatgaagaaaaaggctggctgaaaatcactataaccatcagttactggtttcagttgacaaaatatataatggtttactgctgtcattgtccatgcctacagataatttattttgtatttttgaataaaaaacatttgtacattcctgatactgggtacaagagccatgtaccagtgtactgctttcaacttaaatcactgaggcatttttactactattctgttaaaatcaggattttagtgcttgccaccaccagatgagaagttaagcagcctttctgtggagagtgagaataattgtgtacaaagtagagaagtatccaattatgtgacaacctttgtgtaataaaaatttgtttaaagtt

SEQ ID NO: 12538 - DNA, 2313 bp, Homo sapiens
  SIMILAR (76)..(204): 511254mologous to Nicotiana tabacum Pistil extensin like protein, partial CDS only,accession number Z14014,Smith-Waterman Score=101.
atgccaggtgaagaaaagtgtgcttctgaactgaaacagtcagcacagagaggaggagacagactaaaccaggaggaaggtgaatctctgaatagaccaataacaggctctgaaattgaggcaataattaatagcttaccaaccaaaaagagtccaggaccagatggaatcacagccgaattctaccagaggtacaaggaggaactggtaccattccttgtaaaactattccaatcaacagaaaaagagggaatcctccctaactcattttatgaggccagcatcatcctgataccaaagcctggcagagacacaacaaaaaaagagaattttagaccaatatccctgatgaacatcgatgcaaaaatcctcaataaaatactggcaaaccgaatccagcagcacatcaaaaagcttatccacaatggtcaacatataaacagaaccaacgacaaaagccatataattatctcaatagatgcagaaaagacctttggcaaaattcaacagcccttcatgctaaaaactctcaataaattaggtattgatgggacatatctcaaaataataagagctatttatgacaaacccacagccaatatcatactgactgggcaaaaactggaagcattccctatgaaaactggcacaagagagggatgccctctctcaccactcttattcaacatagtgttggaagttctggccagggcaattaggcaggagaaagaaataaagggtattcaattaggaaaagaggaagtcaaattgtccctgtttgcagatgacatgattgtatacctagaaaaccccatcgtctcagcccaaaatctccttaggcttataagcacctttagcaaagtctctggatacaaaatcaatgtgcaaaaatcacaagcattcttatacaccaataacagacaaacagagagccaaatcctgagtgaactcccattcacaattgcttcaaagagaataaaatacctaggaatccaacttacaagggatgtgaaggacctcttcaaggagaactacaaagcactgctcaatgaaataaaagaggatataaacaaatggaaaaacattccatgctcatgggtaggaagaatcaatatcgtgaaaatggccatactgcccaaggtaatttatagattcaatgccatccccatcaagctaccaatgactttcttcacagaattggaaaaaactactttaaagtttatatggaaccaaaaaagtgcccgcatcgccaagtcaatcctaagccaaaagaacaaagctggaggcatcatgctacctgacttcaaactatactacaaggctacagtaaccaaaacagcatggtactggtaccaaaacagagatatagatcaatggaacacaacagagccctcagaaataatgttgcatatctacgaccacctgatctttgacaaacctgacaaaaacaagaaatggggaaacaattccctatttaataaatggtgctgggaaaactggctagccatatggagaaagctgaaactggatcccttccttacaccttatacaaaaattaattcaagatggattaaagacttacatgttagacctaaaatcataaaaaccctagaagaaaacctaggcaataccattcaggacatagtcatgggcaaggacttcatgtctaaaacaccaaaagcaatggcaacaaaagccaaaattgacaaatgggatctaattaaactaaagagcttctgcacagcaaaagaaactaccatcagagtgaacaggcaacctacaaaatgggagaaaatttttggtatctactcatctgacaaaggtctaatatcaagaatctacaatgaactccaacaaatttacaagaaaaaaacaaacaaccccatcaaaaagtgggtgaaggacatgaacagatacttctcaaaagaagacatttatgcagccaaaagacacatgaaaaaatgctcatcatcactggccatcagagaaatgcaaatcaaaaccacaatgagatactatctcacaccactcagaatggcgatcattaaaaagttcggaaacaacagacaggagacagtaagagaaatggcctgtctcctcagcggcacaatggactttagacatcgcgcctgttttgtactctccaagccggacttctctactcgctggcctggcgctgatgcccagaggccccctgtgcttgtggttgtggccttagacagttccctgccctttcctcaggcatcagggcagaggcctccgagcctggaggatgtggacggaggggccggtgccctcgtggctccctgctag

SEQ ID NO: 12539 - DNA, 3556 bp, Homo sapiens
  SIMILAR (13)..(1422): 1001254mologous to Homo sapiens bA371L19.1 (novel protein),accession number AL118502,Smith-Waterman Score=2452.
atggagaatgagtttgatgaattgacggaagtacacttcagaaggtgggtaataacaaactcctctgagctaaaggagcatgttctaacccaatgcgaggaagctaaaaaccttgcaagaagaaataaactagaaaatctagaagaaatggataaattcctggccacatacacctttccaagtctaaaccaggaagaagttgaatccctgaatagaccaataacaagttctgaaattgaggcagcaattaatagcctaccaaccaaaaaacatccaggaccagatggattcacagccaaattctaccagaggtacaaagaggagctgcatataaacagagccaaagacaaaaaccacatgattatctcaatagatgcagaaaaggcctttgacaaaattcaacaccccgtcaaactaaaaattctcaataaattaggtattgatgggacgtatctcaaaataataagagctatctatgacaaacccacagccaatctcatactgaatgggcaaaaactggaagcattccctttgaaaactggcacaagacagggatgccctctctcaccactcctattcaacatagtgttggaagttctggccagggcaattaggcaggagaaggaaataaagggtattcaattaggaaaagaggaagtcaaattgtccctgtttgcagacgacatgattgtatatctagggaaccccattatctcagcccaaaatctccttaagctgataagcaacttcagcaaagtctcaggatacaaaatcaatgtacaaaaatcacaagcattcttatacaccaacaacagacaaacagagagccaaatcatgagtgaactcccattcacaattgcttccaagagaataaaatacctaggaatccaacttacaagggatgtgaaggacctcttcaaggagaactacaaaccactgctcaaggaaataaaagaagatacaaacaaatggaagaataatccatgttcatgggtaggaagaatcaatattgtgaaaatggccatactgcccaaggtaatttacagattcaatgccatccccatcaagctaccaatgcctttcttcacagaattggaaaaaaactactttaaagttcatatggaaccaaaaaagagcccgcattgccaagtcaatcctaagccaaaagaacaaagctggaggcatcacgctacctgacttcaaactatactacaaggctacagtaaccaaaacagcatggtactggtaccaaaacagagatatagatcaatggaacagaacagagccctcaaaaataacgccgcacatctacaactatctgatctttgacaaacctgagaaaaacaagcaatggggaaaggattccctatttaataaatggtgctgggaaaactggctagccatatggagaaagctgaaactggatcccttccttacaccttacacaaaaattaattcaagatggattaaagacttaaacgttagacctaaaaccataaaaaccctagaagaaaacctaggcattaccattcaggacataggcatgggcaaggacttcatgtctaaaacaccaaaagcaatggcaactaaagccaaaattgacaaatgggatctaattaaactaaagagcttctgcacagcaaaagaaactaccatcagagtgaacaggcaacctacaaaatgggagaaaatttttgcaacctactcatctgacaaagggctaatatccagaatctacaatgaactgaaacaaatttacaagaaaaaaacaaacaaccccatcagaaagtgggcaaaggacatgaacagacacttttcaaaagaagacatttatgcagccaaaaaatacatgaaaaaatgctcatcatcactggccatcagagaaatgcaaatcaaaaccacgatgagataccatctcacaccagttagaatggcgatcattaaaaagtcaggaaacaacagaaccaaagacaaaaaccacatgattatctcaatagatgcagaaaaggcctttgacaaaattcaacagcccttcatgctaaaaactctcaataaactaggtattgatgggatgtatctcaaaataataagaattattcatggcaaacccacagccaatatcatactgaatgggaaaaaactggaagcattccctttgaaaactggcacaagacagggatgccctctctcaccactcctattcaacatagtgttggaagttctggccagggcaatcaggcagaaaaaagaaataaaaggtattcaattaggaaaagaagaagtcaaattgtccctgtttgcagatgacatgattgtatatttggaaaaccccatcgtctcagcccaaaatctcctgatattgcaactgataagcaacttcagcaaagtctcaggatacaaaatcaatgtgcaaaaatcacaagcattcttatacaccaataacagacaaacagagagccaaatgaggagtgaactcccattcacagttgctacaaagagaataaaatacttaggaatccaacttacaagggatgtgaaggacctcttcaaggagaactacaaactactgctcaatgaaataaaagaggacacacacaaatggaagaacattccacgctcatggataggaagaatcaatatcgtgaaaatggccatactgcccaacgtaatttatagatacaatgccatacccatcgagctaccaatgactttcttcacagaattggaaaaaactactttaaagttcatatggaaccaaaaaagggcccgcattgccaagacaatcctaagcaaaaagaacaaagctggaggcatcatgctacctgacttcaaactatactacaaggctacagtaaccaaaacagcatggtactggtaccaaaacagagatatagaccaatggaacagaacagagccctcagaaataataccacacatctacaaccatctgatctttgacaaacctgagaaaaacaagcaatggggaaaggatttcctatttaataaatggtgctgggaaaactggctagccatatgtagaaagctgaaactggatcccttccttacaccttatacaaaaattaattcaagatggattaaagacttaaatgttagacctaaaaccataaaaaccctggaagaaaacctaggcaataccattcaggacataggcatgggcaaggtcttcatgactaaaacaccaaaaacaatggtaacaaaagacaaaattgacaaatgggatctaattcaactaaagagcttctgcacagcaaaagaaactaccatcagagtgaacaggcaacctacagaatgggagaaaatttttgcaatctacccatctgacaaagggctaatattcagaatgtatgaagaacttaaacaaatttacaagaaaaaatcaaacaaccccatcaaaaggtgggcaaaggatttaaacagacacttctcaaaagaagacattgatgcagccaacagacatgaaaaaatgctcatcatcattggccatcagagaaatgcaaatcaaaaccacaatgagataccacctcacaccagttag

SEQ ID NO: 12540 - DNA, 7804 bp, Homo sapiens
  SIMILAR (25)..(546): 841254mologous to Homo sapiens makorin 1,accession number AF192784,Smith-Waterman Score=751.
cctccggtctacagctcccagcgtgagcgacgcagaagacgggtgatttctgcatttccatctgaggtaccgggttcatctcactagggagtgccagacagtgggcgcaggccagtgggtgcgcgcaccgtgcggagccgaagcagggcgaggcattgcctcacctgggaagcgcaaggggtcagggagttccctttccgagtcaaagaaaggggtgacggacgcacctggaaaatcgggtcactcccacccgaatattgcgcttttcagaccggcttaaaaaacggcgcaccacgagactatatcccacacctggccttcggagggtcctacgcccacggaatctcgctgattgctagcacagcggtctgagatcaaactgcaaggccgcagcaaggctgggggaggggcgcccgccattgcccaggcttgcttaggtaaacaaagcagccggggaagctcgaactgggtgcagcccaccacagctcaaggaggcctgcctgcctctgtaggctccacctctgggggcagggcacagacaaacaaaaagacagcagtaacctctgcagacttaaatgtccctgtctgacagctttgaagagagcagtggttctcccagcacgcagctggagatctgagaacgggcagactgcctcctcaagtgggtccctgacccctgacccccgagcagcctaactgggaggcaccccccagcaggggcacactgacacctcacacggcagggtattccaacagacctgcagctgagggtcctgtctgttagaaggaaaactaacaaacagaaaggacatccacaccgaaaacgcatctgtacatcaccatcatcaaagaccaaaagtagataaaaccacaaagatggggaaaaaacagaacagaaaaactggaaactctaaaacgcagagcacctctcctcctccaaaggaacgcagttcctcaccagcaacggaccaaagctggatggagaatgattttgacgagctgagagaagaaggcttcagacgctcaaattactctgagctacgggaggacattcaaaccaaaggcaaagaagttgaaaactttgaaaaaaatttagaagaatgtataactagaataaccaatacagagaagtgcttaaaggagctgatggagctgaaaaccaaggctcgagaactacgtgaagaatgcagaagcctcaggagccaatgcgatcaactggaagaaagggtatcagcaatggaagatgaaatgaatgaaatgaagcaagaagggaagtttagagaaaaaagaataaaaagaaacgagcaaagcctccaagaaatatgggactatgtgaaaagaccaaatctacgtctgattggtgtacctgaaagtgatgcggagaatggaaccaagttggaaaacactctgcaggatattatccaggagactttccccaatctagcaaggcaggccaacgttcagattcaggaaatacagagaacgccacaaagatactcctcgagaagagcaactccaagacacataattgtcagattcaccaaagttgaaatgaaggaaaaaatgttaagggcagccagagagaaaggtcgagttaccctcaaagggaagcccatcagactaacagcggatctctcggcagaaaccctacaagccagaagagagtgggggccaatattgaacattcttaaagaaaagaattttcaacccagaatttcatatccagccaaactaagcttcataagtgaaggagaaataaaatactttacagacaagcaaatgctgaccgattttgtcaccagcaggcctgccctaaaagagctcctgaaggaagcgctaaacatggaaaggaacaaccggtaccagccactgcaaaatcatgccaaaatgtaaagaccatcgagactaggaagaaactgcatcaactaacgagcaaaatcaccagctaacatcataatgacaggatcaaattcacacataacaatattaactttaaatgtaaatggactaaattctccaattaaaagacacagactggcaagttggataaagagtcaagacccatcagtgtgctgtattcaggaaacccatctcatgtgcagagacacacataggctcaaaataaaaggatggaggaagatctaccaagcaaatggaaaacaaaaaaaggcaggggttgcaatcctagtctctgataaaacagactttaaaccaacaaagatcaaaagagacaaagaaggccattacatgatggtaaagggatcaattcaacaagaggagctaactatcctaaatatgtatgcacccaatacaggagcacccagattcataaagcaagtcctgagtgacctacaaagagacttagactcccacacattaataatgggagactttaacaccccactgtcaacattagacagatcaacgagacagaaagtcaacaaggatacccaggaattgaactcagctctgcaccaagcagacctaatagacatctacagaactctccaccccaaatcaacagaatatacatttttttcagcaccacaccacagctattccaaaattgaccacatacttggaagtgaagctctcctcagcaaatgtaaaagaacagaaattataacaaactatctctcagaccacagtgcaatcaaactagaactcaggattaagaatctcactcaaagccgctcaactacatggaaactgaacaacctgctcctgaatgactactgggtacataacgaaatgaaggcagaaataaagatgttctttgaaaccaacgagaacaaagacacaacataccagaatctctaggacgcattcaaagcagtgtgtagagggaaatttatagcactaaatgcccacaagagaaagcaggaaagatccaaaattgacaccctaacatcacaattaaaagaactagaaaagcaagagcaaacacattcaaaagctagcagaaggcaagaaataactaaaatcagagcagaactgaaggaaatagagacacaaaaaacccttcaaaaaatcaatgaatccaggagctggttttttgaaaggatcaacaaaattgatagaccgctagcaagactaataaagaaaaaaagagagaagaatcaaatagacacaataaaaaatgataaaggggatatcaccaccgatcccacagaaatacaaactaccatcagagaatactacaaacacctctacgcaaataaactagaaaatctagaagaaatggatacattccttgacacatacactctcccaagactaaaccaggaagaagttgaatctctgaatagaccaataacaggagctgaaattgtggcaataatcaatagtttatcaaccaaaaagagtccaggaccagatggattcacagccgaattctaccagaggtacaaggaggaactggtaccattctttctgaaactattccaatcaatagaaaaagagggaatcctccctaactcattttatgaggccagcatcattctgataccaaagccgggcagagacacaaccaaaaaagagaattttagaccaatatccttgatgaacattgatgcaaaaatcctcaataaaatactggcaaaccaaatccagcagcacatcaaaaagcttatccaccatgatcaagtgggcttcatccctgggatgcaaggctggttcaatatacgcaaatcaataaatgtaatccagcatataaacagagccaaagacaaaaaccacatgattgtctcaatagatgcagaaaaagcctttgacaaaattcaacaacccttcatgctaaaaactatcaataaaataggtattgatgggatgtatttcaaaataataagagctatctatgacaaaaccacagccaatatcatactgaatgggcaaaaactggaagcattccctttgaaaaccggcacaagacagggatgccctctctcaccgctcctattcaacatagtgttggaatttctggccagggcaatcaggcaggagaaggaaataaagggtattcaattaggaaaagaggaagtcaaattgtccctgtttgcagatgacatgattgttgatctagaaaaccccatcgtctcagcccaaaatctccttaagctgataagcaacttcagcaaagtcccaggatacaaaatatacaaaatcgatgtgcaaaaatcacaagcattcctatacaccaataatagacaaacagagagccaaatcatgagtgaactcccattcacaattgcttcaaagagaataaaatacccaggaatccaacttacaaggaatgtgaaggacctcttcaaggagaactacaaaccactgctcaatgaaataaaagaggacacaaacaaatggaagaacattccatgctcatggataggaagaatcaatattgtgaaaatggccatactgcccaaggtaatttatagattcaatgccatccccatcaagctaccaatgacttccttcacagaattggaaaaaactactttaaagttcatatggaaccaaaaaagagcccgcattgccaagacaatcctaagccaaaagaacaaagctggaggcatcacactacctgacttcaaactatactacaaggctacagtaaccaaaacagcatggtactgggtaccaaaacagatatatagaccaatggaacagaacagagacctcagaaataataccacacatctacaaccatctgatctttcacaaacccgacaaaaacaagcaacgaggaaaggattccctatttaataaatggtgctgggaaaactggctagccatatggagaaaaatgaaactggatccttatacaaaatttacaccttacacaaaaattaattcaagatggattaaaggcttaaatgttagacctaaaaccataaaaaccctagaagaaaacctaggcaataccattcaggacataggcatgggcaaggacttcatgactaaaacaccaaaagcaatggcaacaaaagccaaaattgacaaatgggatctaattaaactaaagagcttctgcacagcaaaagaaactaccatcagagtgaacacgcaacctacagaatggaagaaaatttttgcaatctactcatctgacaaagggctaatatccagaatctacaaagaactcaaacaaatttacaagaaaaaaacaaacaaccccctcatcaaaaagtgggcaaaggatatgaacagacacttctcaaaagaagacattttatgcagccaaaagacacatgaaaaaatgctcatcatcactggccatcagagaaatgcaaatcaaaaccacaatgagatagcatctcacaccagttagaatggcgatcattaaaaagtcaggaaacaacaggtgctggagaggatgtggagaaataggaacacttttacactgttggtgggactgtaaactagttcaaccatttgtggaagacagtgtggcaattcctcagggatctagaactagaaataccattttacccagccatcccattactgggtatatacccaaaggattataaaccatgccgctataaagacacatgcacacgtatgtttattgcggcactattcacaatagcaaagacttggaaccaacccaaatgtccaacaatgatagacgggattaagaaaatgtggcacatatacaccatggaatactatgcagccataaaaaaggatgagttcatgtcctttgtagggacatggatgaagctggaaaccatcattctcagcaaactatcgcaaggacagaaaaccaaacaccgcatgttctcactcatagtcaggaccctcagctgcaggtctgttggagtttactcgaagtccactccagaccctgtttgcctgagtatcagcagcagtggctgcagaacagcagatattagtgtatcacaaatgctactgcctgattgttcctctggaagttttgtctcagaggagtacccggccgtgtgaggtgtcagtctgcccctactggaagggatctccttcaaggcagggccatttctggtttcctccagctcccagggctccttcctgcaacagaaaatgttcctgccttcacaaagcttacattttatttcagagaaaatatccttataaacacaaatcagagacctctgtcagacttgacccatggtttctgagtgcaaatgaggattcccgattacggggagaactgcgaggaaacttcaagatgacatctttattctcacatctccaagaacatgcagaaagaagttactgctcttatactgaggaaatacaaactaccatcagagaatactacaaacacctctacgcaaataaactagaaaatctagaagaaatggataaattccttgacacatacaccctcccacgactaaaccaggaagaagttgaatctctgaatagaccaacaacaggctctgaaattgaggcaataatcaatagcttaccaaccaaaaagagtccaggaccagatggattcacagccaaattctaccagaggtacaaggaggaactggtaccattccttctgaaactattccaatcaatagaaaaagagggaatcctcactaactcattttatgaggccagcatcatcctgataccaaagccgggcagagacacaaccaaaaaagagaattttagaccaatatccttgatgaacattgatgcaaaaatcctcaataaaatactggcaaaccaaatccagcagcacatcaaaaagcttacccaccatgatcaagtgggcttcatccctgggatgcaaggctggttcaatatacgcaaatcaataaatgtaatccagcatataaacagaatcaaagacaaaaaccacatgattatctcaatagatgcagaaaaggcctttgacaaaattcaacaatgcttcatgctaaaaactctcaataaactagcccaaaatctccttaagctgataagcaacttcagcaaagtctcaggatacaaaatcaatgtgcaaaaatcacaagcattcttatacaccaataacagacaaacagagagccaaatcatgagtgaactcccattcacaattgtttcaaagagaataaaatacctaggaatccaacttacaagggacgtgaaagacctcttcaaggagaactacaaaccactgctcaatgaaataagagaggatacaaacaaatggaagaacattccatgctcatgggtaggaagaatcaatatcgtgaaaatggccatactgcccaaggtaatttatagattcaatgccatccacataaagctaccaatgactttcttcacagaattggaaaaaactactttaaagttcatatggaaccaaaaaagagcccacatcgccaagccaatcctaagccaaaagaacaaagctggaggcatcatgctacctgacttcaaactatactacaaggctacagtaaccaaaacagcatggtactggtaccaaaacagagagatagatcaatggaacagaacagtggcctcagaaataacaccacacaactacaaccatgtgatctttgacaaacctgacaaaaacaagaaatggggaaacgattccctatttaataaatggtgctgggaaaactggctagccatatatagaaagctgaaactggatcccttccttacaccttatacaaaaattaatttaagatggattaaagacttaaacattagacctaaaaccataaaaaccctagaagaaaacctaggcattaccattcaggacataggcatgggcaaggacttcatgtctaaaacaccaaaagcaatggcaacaaaagccaaaattgactaa

SEQ ID NO: 12541 - DNA, 652 bp, Homo sapiens
  SIMILAR (325)..(396): 751254mologous to Homo sapiens Human secreted protein, SEQ ID NO: 6834,accession number G02753,Smith-Waterman Score=114.
atgcagaaggaagactgtgtcattgttttggtgaagttggcagtagaaggaatggcaccaactcaacaaatccacctctttgtggccattacctttagtgggtggcctaggcaatgcacaggctcatcattcaaggctattgacctctttttggatccagattctgttatgcagcaaatttattctttccactttggtatcatgtgtaattttgacaatcatgccttccagaacttgatggcagtgattgacaatattaagcaggacagggacatggatgaagctggaagtcatcattctcagcaaaccaacacaggaacaggaaatcaaacaccacatgttctcactcataaatgggagttgagcaatgagaacacatggacccagggaggggaacatcatacaccagggccctgggttctttggtctcgctgacttcaagaatgaagtcgtggaccctcacggagtgaagccacagaccttcactgtgagtgttacagctcttaaagatgatgtgtctggaattcattcattcctcctggtgggttcctggtctgccaacttcaggaatgaagccgcagaacctagtgcactattcacaatagcaaagatatggatcaacctaagtattcatcaacagatgaatggataa

SEQ ID NO: 12542 - DNA, 731 bp, Homo sapiens
  SIMILAR (75)..(197): 361254mologous to Hepatitis B virus 18 bp and 108 bp deletion,accession number X98075,Smith-Waterman Score=71.
ccgcctcgcttggcacgagggacttgtcaggaagcaaaagaatgaattaaagaaaactccagagaatgagctgtctacctactccctgggtcagtggctctccatgcctacctgtggtctcttggacacccttgcagaagatgacttcctggggaactcttctgggagtgaatgttatcagcaaattcccaaaacaacaccccttagacaaaaagccctcctcaccctatgcattgcctagacccacccactaaaaggtgatggccacaaaagaggtggatttgttgagttggtgccattccttctacttgccagctttcaccaaaacaatgacacagtcttccttccgcatgggaggactcttctctttccctgtgttggcagtgggatgcctccgtgcagataagaaatgcttaactgagaaatgctcatgttgggatatcatcgatgagactttaatttgggcatggtgactgtttcccttgctgccacttgactcaatcccaggagcctcagtagaggatataatattacacaagatgctcaaaatggtggaattgctcagtgctcccataaatatacatttataattttcatttgccacacggtaaactgaaaaatacagactatattaaaaagaaactgcatgatttttttttcaaaaattcaaagcatatttaaataatatataaattaaatgccctcctctcttccaattctgtccctatagt

SEQ ID NO: 12543 - DNA, 743 bp, Homo sapiens
  SIMILAR (3918)..(3184): 1001254mologous to Plasmid F Protein A,accession number M12987,Smith-Waterman Score=1287.
atggcttccgcaaagaagggtggccaaaagaaaaagggccgttctgctatcaacgaggtggtgacccaagaatacaccatcaacattcacaagcgcacccatggagtgcgcttcaagaagtgtgccccttgggcactcaaagagattcggaaatttgccatgaaggagatggtagctccagacattgctagccctgcaaggcctacgaccatgtcatgccagcataacctgatagctgtgatttgggccttcaactgtcaccttggcgctttcctgtggacactgacatgggacctgctcagcggccacacagtgcaacttgcaagtgctgcaggggaattcactccctgtgaggtaacactgaccaatgggacacaggaaccaaagaagaaggaggaggaggaggaagaggaagaggaagaagaagaagaagaagatagaagaaggacaaggaggagaggaggagaggagggggagggggaggaggaggagaaaagaagaaaaaagaaagaagaagaagaagaaaagtggccctacagcaaaattggccgctggatggtacatcccaaacctaagaatattcctacagctttccatcccccaagtcatcagacatgtggccacatttgcccaagagcctgaacaaacaagacctaaagatcaagccagacagcagtaacagaagccttgccctagagccctttatttcctttgggtcaaggaactacagggtctgggactaa

SEQ ID NO: 12544 - DNA, 455 bp, Homo sapiens
  SIMILAR (434)..(84): 941254mologous to Homo sapiens ribosomal protein L31 (AA 1- 125),accession number X15940,Smith-Waterman Score=569.
tttttttttttttgaaggcaattttataactttatttgatctgacgatcagcgattagttctcatccacattgactgtctgtagatttttgaaaaggggttaacaggtacataggtaaccaaagtatatagcttatttggtgaatcttcatcctcattacgttttctggtcagccgcactcggattcggtatggcacattccttattcctttggcccagtcagctttgttgagcctggtgtcaatgcgcacatctggagttcccatctccttcatggcaaatttccgaatctctttgagtgcccgaggtgctcgcttcttgaagcccactccatggatgcgcttgtgaatgttgatggtgtattctcgggttaccacttcgttgatggcagatcggccctttttcttctcgccacccttctttgcgggagccattctgcagcgtccaagtgaatt

SEQ ID NO: 12545 - DNA, 410 bp, Homo sapiens
  SIMILAR (94)..(249): 981254mologous to Homo sapiens MLN 70, S100 C,accession number X80201,Smith-Waterman Score=259.
tttcgtggagaggctccagacccgcacgccgcgcgcacagagctctcagcgccgctcccagccacagcctcccgcgcctcgctcagctccaacatggcaaaaatctccagccctacagagactgagcggtgcatcgagtccctgattgctgtcttccagaagtatgctggaaaggatggttataactacactctctccaagacagagttcctaagcttcatgaatacagaactagctgccttcacagaggtactggtccctgtctcccccacttccccaaactacccacaacatgaaacaagaccctggcagaatggccaggaatgaaggagcagcaactgacaccccacactcttgcttcattttaactcactctaagccaggagtttttccatttaggaagagagaac

SEQ ID NO: 12546 - DNA, 602 bp, Homo sapiens
  SIMILAR (121)..(384): 851254mologous to Homo sapiens MLN 70, S100 C,accession number X80201,Smith-Waterman Score=355.
  misc_feature (1)...(602): n = a,t,c or g
cccggttcgacccacgcgtccgcccacgcgtgcgagaggctccagacccgcacgcttcgcgcatttagctctcagcgccgcttcccagccacagcctcccgcgcctcgctcagctccaacatggcaaaaatctccagccctacagagactgagcggtgcatcgagtccctgattgctgtcttccagaagtatgctggaaaggatggttataactacactctctccaagacagagttcctaagcttcatgaatacagaactagctgccttcacaaagaaccagaaggaccctgggtgtccttgaccgcatgatggaaggaaactgggacaaccaacagtggatggtcagctagatttctcagaatttcttaatctgattggtgggccaagntatggcttgccatgactccttcctcaaggctgtcccttcccagaagcggacctgaggaccccttgggcctagccttcaaacccacccccttttcctttcagcctttctgtcatcatctccacagcccacccatcccctgagcacactaaccacctcaatgcaggccccacctgccaatagtaataaagcaatgtcacttttttaaaacatga

SEQ ID NO: 12547 - DNA, 6010 bp, Homo sapiens
  SIMILAR (277)..(1107): 841254mologous to Cloning vector pZC320 SopB,accession number U26464,Smith-Waterman Score=1126.
ggtgaaggtacgctcgagcgtggtcattgaggacaagtcgacgagagatcccgagtacatctacagtcagccttacgaacaaggaacttcagatctaaaagattggaaaagaattggtaaggaactaaaacaagcaggtaggaagggtaatatcattccacttacagtatggaatgattgggccattattaaagcagctttagaaccatttcaaacagaagaagatagcatttcagtttctgatgcccctggaagctgtttaatagattgtaatgaaaacacaaggaaaaaatcccagaaagaaaccgaaagtttacattgcgaatatgtagcagagccggtaatggctcagtcaacgcaaaatgttgactataatcaattacaggaggtgatatatcctgaaacgttaaaattagaaggaaaaggtccagaattaatggggccatcagagtctaaaccacgaggcacaagtcctcttccagcaggtcaggtgctcgtaagattacaacctcaaaagcaggttaaagaaaataagacccaaccgcaagtagcctatcaatactggccgctggctgaacttcagtatcggccacccccagaaagtcagtatggatatccaggaatgcccccagcaccacagggcagggcgccataccatcagccgcccactaggagacttaatcctatggcaccacctagtagacagggtagtgaattacatgaaattattgataaatcaagaaaggaaggagatactgaggcatggcaattcccagtaacgttagaaccgatgccacctggagaaggagcccaagagggagagcctcccacagttgaggccagatacaagtctttttcgataaaaatgctaaaagatatgaaagagggagtaaaacagtatggacccaactccccttatatgaggacattattagattccattgcttatggacatagactcattccttatgattgggagattctggcaaaatcgtctctctcaccctctcaatttttacaatttaagacttggtggattgatggggtacaagaacaggtccgaagaaatagggctgccaatcctccagttaacatagatgcagatcaactattaggaataggtcaaaattggagtactattagtcaacaagcattaatgcaaaatgaggccattgagcaagttagagctatctgccttagagcctgggaaaaaatccaagacccaggaagtacctgcccctcatttaatacagtaagacaaggttcaaaagagccctaccctgattttgtggcaaggctccaagatgttgctcaaaagtcaattgccgatgaaaaagccggtaaggtcatagtggagttgatggcatatgaaaacgccaatcctgagtgtcaatcagccattaagccattaaaaggaaaggttcctgcaggatcagatgtaatctcagaatatgtaaaagcctgtgatggaatcggaggagctatgcataaagctatgcttatggctcaagcaataacaggagttgttttaggaggacaagttagaacatttggaggaaaatgttataattgtggtcaaattggtcacttaaaaaagaattgcccagtcttaaacaaacagaatataactattcaagcaactacaacagggttttcagggacaacaacccccactgtcccaagtgtttcagggaataagccagttaccacaatacaacaattgtccctcaccacaagcggcagtgcagcagtagatttatgtactatacaagcagtctctctgcttccaggggagcccccacaaaaaatccctacaggggtatatggcccactgcctgaggggactgtaggactaatcttgggaagatcaagtctaaatctaaaaggagttcaaattcatactagtgtggttgattcagactataaaggcgaaattcaattggttattagctcttcaattccttggagtgccagtccaagagacaggattgctcaattattactcctgccatatattaagggtggaaatagtgaaataaaaagaataggagggcttgtaagcactgatccaacaggaaaggctgcatattgggcaagtcaggtctcagagaacagacctgtgtgtaaggccattattcaaggaaaacagtttgaagggttggtagacactggagcagatgtctctattattgctttaaatcagtggccaaaaaactggcttaaacaaaaggctgttacaggacttgtcggcataggcacagcctcagaagtgtatcaaagtatggagattttacattgcttagggccagataatcaagaaagtactgttcagccaatgattacttcaattcctcttaatctgtggggtcgagatttattacaacaatgggaaaaaccggtgtgggtaaatcagtggccgctaccaaaacaaaaactggaggctttacatttattagcaaatgaacagttagaaaagggtcacattgagccttcgttctcaccttggaattctcctgtgtttgtaattcagaagaaatcaggcaaatggcatacgttaactgacttaagggctgtaaacgccgtaattcaacccatggggcctctccaacccgggttgccctctccggccatgatcccaaaagattggcctttaattataattgatctaaaggattgcttttttaccatccctctggcagagcaggattgtgaaaaatttgcctttactataccagccataaataataaagaaccagccaccaggtttcagtggaaagtgttacctcagggaatgcttaatagtccaactatttgtcagacttttgtaggtcgagctcttcaaccagtgagagaaaagttttcagactgttatattattcattatattgatgatattttatgtgctgcagaaacgaaagataaattaattgactgttatacatttctgcaagcagaggttgccaatgctggactggcaatagcatctgataagatccaaacctctactccttttcattatttagggatgcagatagaaaatagaaaaattaagccacaaaaaatagaaataagaaaagacacattaaaaacactaaatgattttcaaaaattactaggagatattaattggattcggccaactctaggcattcctacttatgccatgtcaaatttgttctctatcttaagaggagactcagacttaaatagtcaaagaatattaaccccagaggcaacaaaagaaattaaattagtggaagaaaaaattcagtcagcgcaaataaatagaatagatcccttagccccactccaacttttgatttttgccactgcacattctccaacaggcatcattattcaaaatactgatcttgtggagtggtcattccttcctcacagtacagttaagacttttacattgtacttggatcaaatagctacattaatcggtcagacaagattacgaataacaaaattatgtggaaatgacccagacaaaatagttgtccctttaaccaaggaacaagttagacaagcctttatcaattctggtgcatggcagattggtcttgctaattttgtgggacttattgataatcattacccaaaaacaaagatcttccagttcttaaaattgactacttggattctacctaaaattaccagacgtgaacctttagaaaatgctctaacagtatttactgatggttccagcaatggaaaagcagcttacacagggccgaaagaacgagtaatcaaaactccatatcaatcggctcaaagagcagagttggttgcagtcattacagtgttacaagattttgaccaacctatcaatattatatcagattctgcatatgtagtacaggctacaagggatgttgagacagctctaattaaatatagcatggatgatcagttaaaccagctattcaatttattacaacaaactgtaagaaaaagaaatttcccattttatattacttatattcgagcacacactaatttaccagggcctttgactaaagcaaatgaacaagctgacttactggtatcatctgcactcataaaagcacaagaacttcatgctttgactcatgtaaatgcagcaggattaaaaaacaaatttgatgtcacatggaaacaggcaaaagatattgtacaacattgcacccagtgtcaagtcttacacctgcccactcaagaggcaggagttaatcccagaggtctgtgtcctaatgcattatggcaaatggatgtcacgcatgtaccttcatttggaagattatcatatgttcatgtaacagttgatacttattcacatttcatatgggcaacttgccaaacaggagaaagtacttcccatgttaaaaaacatttattgtcttgttttgctgtaatgggagttccagaaaaaatcaaaactgacaatggaccaggatattgtagtaaagctttccaaaaattcttaagtcagtggaaaatttcacatacaacaggaattccttataattcccaaggacaggccatagttgaaagaactaatagaacactcaaaactcaattagttaaacaaaaagaagggggagacagtaaggagtgtaccactcctcagatgcaacttaatctagcactctatactttaaattttttaaacatttatagaaatcagactactacttctgcagaacaacatcttactggtaaaaagaacagcccacatgaaggaaaactaatttggtggaaagataataaaaataagacatgggaaatagggaaggtgataacgtgggggagaggttttgcttgtgtttcaccaggagaaaatcagcttcctgtttggttacccactagacatttgaagttctacaatgaacccatcggagatgcaaagaaaagggcctccacggagatggtaacaccagtcacatggatggataatcctatagaagtatatgttaatgatagtatatgggtacctggccccatagatgatcgctgccctgccaaacctgaggaagaagggatgatgataaatatttccattgggtatcgttatcctcctatttgcctagggagagcaccaggatgtttaatgcctgcagtccaaaattggttggtagaagtacctactgtcagtcccatcagtagattcacttatcacatggtaagcgggatgtcactcaggccacgggtaaattatttacaagacttttcttatcaaagatcattaaaatttagacctaaagggaaaccttgccccaaggaaattcccaaagaatcaaaaaatacagaagttttagtttgggaagaatgtgtggccaatatgattatgggattaattgcagtcacagctacggctgctgtagcaggagttgcattgcactcttctgttcagtcagtaaactttgttaatgattggcaaaagaattctacaagattgtggaattcacaatctagtattgatcaaaaattggcaaatcaaattaatgatcttagacaaactgtcatttggatgggagacagactcatgagcttagaacatcgtttccagttacaatgtgactggaatacgtcagatttttgtattacaccccaaatttataatgagtctgagcatcactgggacatggttagacgccatctacagggaagagaagataatctcactttagacatttccaaattaaaagaacaaattttcgaagcatcaaaagcccatttaaatttggtgccaggaactgaggcaattgcaggagttgctgatggcctcgcaaatcttaaccctgtcacttgggttaagaccattggaagtactacgattataaatctcatattaatccttgtgtgcctgttttgtctgttgttagtctgcaggtgtacccaacagctccgaagagacagcgaccatcgagaacgggccatgatgacgatggcggttttgtcgaaaagaaaagggggaaatgtggggaaaagcaagagagatcaaattgttactgtgtctgtgtag

SEQ ID NO: 12548 - DNA, 1680 bp, Homo sapiens
  SIMILAR (1680)..(109): 991254mologous to Human endogenous retrovirus K env protein,accession number Y18890,Smith-Waterman Score=2806.
tcatctctcttgcttttccccacatttcccccttttcttttcgacaaaaccgccatcgtcatcatggcccgttctcgatgtcactgtctcttcggagctgttgggtacacttctgatggtcttaatccaagtgacagggttaagatttgcgaggccatcagcaactcctgcaattgcctcagttcctggcaccaaatttaaatgggcttttgatgcttcgaaaatttgttcttttaatttggaaatgtctaaagtgagattatcttctcttccctgtagatggcgtctaaccatgtcccagtgatgctcagactcattataaatttggggtgtaatacaaaaatctgacgtattccagtcacactgtaactggaaatgatgttctaaggtcatgagcctgtctcccatccaaatgacagtttgtctaagatcattaatttgacttgccaatttttgatcaatactagattgtgaattccacaatcttgtagaattcttttgccaataattaacaaagtttactgactgaacagaagagtgcaatgcaactcctgccacagcagccgtagctgtgactgcaattaatcccataatcactgcaattaaagtaaaaatgaatcttttggatctatttaaaatgccttttaatatttcagtcaaaatatggatggatggcgaggcctcccacggtcggtccgtggacacagggatccacatgccttctcttgctctcaccagcagaatacggtgctgccaattaaaagttgaatcaatgcaagtaaacaatctacaattttcacaggttatagtttgggaggctggtttaataactatatttcctacaactagcatataagggggctttatgcaactttgtaaaggaaccgttagaatggaatttaggtcgatagtataaaatggcttacgatatcttgtttctaaagtttgatttccagaccaaattctaatgtggtgtgaggccacagtaagcctccacaattctggatgttcaggaccagaaacaggacttattatttttggtcttggggtagagattcctttttcttcccattcccaaaggtagaaagactgtaattttttatgcttatgtttgtctagactttctgttaagtcgctatcaacagctggactcacttgtgcacttggacacgactgagtttgtcctgagcaattgtggtagaattgacctcgaggtgcccaatctataatagtttcgaattcattgttttgtaatatcaccacactattggccacacattcttcccaaactaaaacttctgtattctttgatcctttaggaatttccttggggcaagttttccctttaggtctaaattttaatgatctttgataagaaaagtcttgtaaataatttacccgtggcctgagtgacatcccgcttaccatgtgataagtgaatctactgttaggactgacagtaggtacttctaccaaccaattttggactgcaggcattaaacatcctggtgctctccctaggcaaataggaggataatgatacccaatggaaatatttatcatcatcccttcttcctcaggtttggcagggcagcgatcatctgtggggccaggtacccatacactatcattaacatatacttctataggattatccatccatgtgactggtgttaccat

SEQ ID NO: 12549 - DNA, 1083 bp, Homo sapiens
  SIMILAR (916)..(215): 571254mologous to Plasmodium lophurae histidine-rich protein,accession number X01469,Smith-Waterman Score=915.
atggctgcccggggaacaggagacaaagtgaagcccgggtgtgaggaagctggggccgcctttgagctgcctccttcagtctacgctgctgccctgcacgagagccaccagcatcaaccctgtcctgcaggaggagcacgggcacagagagtgcctggtgggattgtgacggagcccctgacctgcacaccaccgaaggatatggtcttccttagtgatgatggtgatgatgatgatgatgatgataatgatgatggtggtggtgatgatgataatgatggtaatgataatgatggtgacaatgataatggtgatgatgatgatggtgatgataatgatgatgatggtggtgatgatgataatgatggtaatggtaatgatggtgacaatgataatgatgatggtgataatgatgatagtaatggtaatgatgatggtgatggtgatgatgatggtgttgatgatgatgatgacaatagtgatggtaatgatggtgatgatgatgatagtgatgacgatgatggtgatagtaatggttatgatgatgatggtgatggtaatgatgatgatgatggtgatagcgatgatgatgatagtgataatggtgatggtgataatggtgatggtgatgatgatggtggtggtggtgatgatgatgataatggtcatgatgatgatggtgatatgatgatgatgatagtgatgatggtgatggtgatgatggtggtgatgatggtgatggtgatgatggtggtggtggtgcaattgaggaagagagcagaggccagtgtttctgaagcaaagtgctcaattaatgtcagtgatgataatgatgatggtgatggtaatgatggtgatgatgatgatagtgatggtgatgatgacgatggtggtggtgatggtggtgatagtgaactcaccaatcaattcccgactaatcactcaggcatgaaggcttcaaagctccgaaaagacagtgaccatcgagaatgggccatgatgacgatggcggttttgtcgaaaagaaaagggggaaatgtggggaaaagaaagagagatcagattgttactgtgtctgtgtag

SEQ ID NO: 12550 - DNA, 380 bp, Homo sapiens
  SIMILAR (113)..(3): 971254mologous to Homo sapiens Human secreted protein, SEQ ID NO: 7681,accession number G03600,Smith-Waterman Score=196.
gtgaggagcgcctctgcctggccgctgtgcaatcttccaagtgtgaagtgacagcctttctgcaggtgtacccaacagctccgaagagacagcaaccatcgagaacgggccatgatgacgatggcggttttgtcgaaaagaaaagagggaagcgtggggaaaagaaagagagatcagattgttactgtgtctgtgtagaaagaagcccacacatggctgcccatggaacaatcagcaggcacttcctcacttctgagcccataaaaaccccagactcagccagactccaacaaatgggactaccagctgtgggaaaaagctacccacttcaggtctcctggactcatcaggatgacctgcccttagaaaggagctacccg

SEQ ID NO: 12551 - DNA, 768 bp, Homo sapiens; identical to SEQ ID NO: 7679
  SIMILAR (727)..(852): 1001254mologous to Rattus norvegicus fibrillin-2,accession number AF135060,Smith-Waterman Score=239.

SEQ ID NO: 12552 - DNA, 2802 bp, Homo sapiens
  SIMILAR (637)..(1182): 871254mologous to Escherichia coli No definition line found,accession number U00039,Smith-Waterman Score=833.
atgaagccagaaataaagatgttctttgaaaccaacgagaacaaagacacaacataccagaatctctgggacacattcaaagcagtgtgtagagggaaatttatagcactaaatgcccacaagagaaagcaggaaagatctaaaatcaacaccctaacatcacaattcaaagaactagagaagcaagagcaaacaaattcaaaagctagcagaaggcaagaaataactaagatcagagcagaactgaaggaaatagagacacaaaaaccccttcaaaaaatcaatgaatccaggagctggttttttgaaaagatcaacaaaattgatagaccgctagcaagactaataaagaagaaaagagagaagaatcaaatagacgcaataaaaaatgacaaaggggatatcaccactgatcccacagaaatacaaactaccatcagagaatactataaacacctctacgcaaataaactagaaaatctagaagaaatggataaattcctggacatgtacactctcccaagactaaaccaggaagaagttgaatctctgaatagaccaataacaggctcagaaattgaggcaataattaacagcttaccaaccaaaaaaagtccaggaccagatggattcacagctgaattctaccagaggtacaaggaggagctggtatcattccttctgaaactattccaatcaataaaaaaagagggaatcctcctgaacttattttatgaggacagcatcatcctgaaaccaaagcctggcagagacacaacaaaaaaagagaattttagaccaatatccttgatgaacattgatgcaaaaatcctcattaaaatactggcaaaccgaatccagcaacacatcaaaaagcttatccaccatgatcaagtgggcttcatccctgggatgcaaggctggttcaacatacgaaaatcaataaatgtaatccagcatataaacagaaccaaagacaaaaaccacatgattatctcaatagatgcagaaaaggcctttgacaaaattcaacaacccttcatgttaaaaactctcaataaattaggtattcatgggacatatctcaaaataataagagctatctatgacaaacccacagccaatatcatactgaatgggcaaaaactgaaagcattccctttgaaaactggcacaagacagggatgccctctctcaccactcgtattcaacatagtgttggaagttctggcctgggcaatcaggcaggagaaggaaataaagggcatccaattaggaaaagaggaagtcaaattatccctgtttgcagatgacatgactgtatatctagaaaacccgatcatctcagcccaaaatctccttaagctgataagcaacttcagcaaagtctcaggatacaaaatcaatgtacaaaaatcacaagcattcttatacaccaataacggacaaacagagagcctaatcatgagtgaactcccattcacaattgcttcaaagagaataaaatacctaggaatccaacttacaagggatgtgaaggacctcttcaaggagaactacaaaccactgctcaatgaaataaaagaggattacaaacaaatggaagaacattccatgctcatgggtaggaagaatcaatatcgtgaaaatggccatactgcccaagtgaggagcgcctctgcccggccgcccatcgtctgggaagtgaggagcgcctctgcccggccgcccatcatctgggaagtgaggagcgcctctgcccggccgcccatcgtctgggaagtgaggagcgcctctgcccggccgccctgtctgggaagtgaggagcacctctgcccggccgctgtgcaatcttccaagtgtgaaggacagccattctgcaggtgtacccaacagctccaaagagacagcgaccatcgagaaggggccatgatgacgatggcggttttgtcgaaaagaaaagggggaaatgcaaagaagttgaaaactttgaaaaaaaatttagaagaatgtataactagaataaccaatacagagaagtgcttaaaggagctgatggagctgaaaaccaaggctcgagaactacgtgaagaatgcagaagcctcaggagccgatgcgatcaactggaagaaagggtatcagcgatggaagatgaaatgaatgaaatgaagcgagaagggaagtttagagaaaaaagaataaaaagaaatgagcaaagcctccaagaaatatgggactatgtgaaaagaccaaatctatgtctgattagtgtacctgaaagtgatggagagaatggaaccaagttggaaaacactctgcaggatattatccaggagaacttccccaatctaccaaggcaggccaatgttgagattcaggaaatacagagaacgccacaaagatactcctcgagaagagcaactccaagacacataattgtcagattcaccaaagttgaaatgaaggaaaaaatgttaagggcagccagagagaaaggtcgggttaccctcaaagggaagcccatcagactaactgcggatctctcggcagaaatcctacaagccagaagagagtgggggccgatattcaacattcttaaagacaagaattttcaacccagaatttcatatccagccaaactaagcttcataagcgaaggagaaataaaatcctttacagacaagcaaatgctgagagattttgtcaccaccaggcctgccctaaaagagctcctgaaggaagtgctaaacatggaaaggaacaactggtaccagccactgcaaaatcatgccaaaatgtaa

SEQ ID NO: 12553 - DNA, 1080 bp, Homo sapiens
  SIMILAR (436)..(705): 621254mologous to Escherichia coli HyfC,accession number M63654,Smith-Waterman Score=237.
agtatttattgttcattcttgggtgtttctcgtagatggggatgtggcagggtcacaggataatagtggagagaaggtcagcagataaacatgtgaacaaaggtctctggttttcctaggcagaggtccctgccagccttccacagtgtttgtgtcccctgggtacttgagattagggagtggtgatgactcttaacgagcatgctgccttcaagtatctgtttaacaaagcacatcttgcaccacccttaatccatttaaccctgagttgacacagcacacgtttcagagagcacggggttgggggtaaggttatagattaacagcatcccaaggcagaagaattttacttagtacagaacaaaatggagtctcctatgtctacttctttctacacagacacagtaacaatctgatctctctttcttttccccacatttcccccttttctttttgacaaaaccgccatcgtcatcatggcccgttctcgatggtcgctgtctcttcacagctgttggatacacctgcagaaaggctgtcacttcacacttggaagattgcacagcggccaggcagaggcactcctcacttcccagacggggcggtggccaggcagagacgcttccccagacggggcggccgggcagaggcactcctcacttcccagatggggcggcatcctcttttggttactgtagccttgtagcatagtttgaagtcaggtggtgtgatgcatccagctttgttcttttggcttacgattgtcttggcaatgcaggctcttttttggttccatatgaaatttaaagaagttttttctaattctgtgaagaaagtcaatggtatcttgatagggataccattgaatctataaattactttgggcagtatggccattttcacgatattgattcttcctatccatgagcctggaatgtttttccatttgtttgtgccctctcttatttccttgagcagtgctttgtagttctcctcgaagaggtccttcacatcccttgtaagttggattcctaggtattttattctctttgtagtaattgtgaatgggagttcactcat

SEQ ID NO: 12554 - DNA, 6800 bp, Homo sapiens
  SIMILAR (133)..(297): 941254mologous to Homo sapiens Human secreted protein, SEQ ID NO: 5210,accession number G01129,Smith-Waterman Score=278.
tatggggcaaactaaaagtaaaattaaaagtaaatatgcctcttatctcagctttattaaaattcttttaaaaagagggggagttaaagtatctacaaaaaatctaatcaagctatttcaaataatagaacaattttgcccatggtttccagaacaaggaacttcagatctaaaagattggaaaagaattggtaaggaactaaaacaagcaggtaggaagggtaatatcattccacttacagtatggaatgattgggccattattaaagcagctttagaaccatttcaaacagaagaagatagcatttcagtttctgatgcccctggaagctgtttaatagattgtaatgaaaacacaaggaaaaaatcccagaaagaaaccgaaagtttacattgcgaatatgtagcagagccggtaatggctcagtcaacgcaaaatgttgactataatcaattacaggaggtgatatatcctgaaacgttaaaattagaaggaaaaggtccagaattaatggggccatcagagtctaaaccacgaggcacaagtcctcttccagcaggtcaggtgctcgtaagattacaacctcaaaagcaggttaaagaaaataagacccaaccgcaagtagcctatcaatactggccgctggctgaacttcagtatcggccacccccagaaagtcagtatggatatccaggaatgcccccagcaccacagggcagggcgccataccatcagccgcccactaggagacttaatcctatggcaccacctagtagacagggtagtgaattacatgaaattattgataaatcaagaaaggaaggagatactgaggcatggcaattcccagtaacgttagaaccgatgccacctggagaaggagcccaagagggagagcctcccacagttgaggccagatacaagtctttttcgataaaaatgctaaaagatatgaaagagggagtaaaacagtatggacccaactccccttatatgaggacattattagattccattgcttatggacatagactcattccttatgattgggagattctggcaaaatcgtctctctcaccctctcaatttttacaatttaagacttggtggattgatggggtacaagaacaggtccgaagaaatagggctgccaatcctccagttaacatagatgcagatcaactattaggaataggtcaaaattggagtactattagtcaacaagcattaatgcaaaatgaggccattgagcaagttagagctatctgccttagagcctgggaaaaaatccaagacccaggaagtacctgcccctcatttaatacagtaagacaaggttcaaaagagccctaccctgattttgtggcaaggctccaagatgttgctcaaaagtcaattgccgatgaaaaagccggtaaggtcatagtggagttgatggcatatgaaaacgccaatcctgagtgtcaatcagccattaagccattaaaaggaaaggttcctgcaggatcagatgtaatctcagaatatgtaaaagcctgtgatggaatcggaggagctatgcataaagctatgcttatggctcaagcaataacaggagttgttttaggaggacaagttagaacatttggaggaaaatgttataattgtggtcaaattggtcacttaaaaaagaattgcccagtcttaaacaaacagaatataactattcaagcaactacaacaggtagagagccacctgacttatgtccaagatgtaaaaaaggaaaacattgggctagtcaatgtcgttctaaatttgataaaaatgggcaaccattgtcgggaaacgagcaaaggggccagcctcaggccccacaacaaactggggcattcccaattcagccatttgttcctcagggttttcagggacaacaacccccactgtcccaagtgtttcagggaataagccagttaccacaatacaacaattgtccctcaccacaagcggcagtgcagcaggtagatttatgtactatacaagcagtctctctgcttccaggggagcccccacaaaaaatccctacaggggtatatggcccactgcctgaggggactgtaggactaatcttgggaagatcaagtctaaatctaaaaggagttcaaattcaaattaagtgtgtttgatccagactataaaggcgaaattcagttggttattagcttttcaattccttggagtgtcagtccaggaagacaggagtgctcaatatttactcctgccatatataaagggtggaaatagtgaactaaaaaaaataggagggcttggaagcactgatccaccaggaaaggctgtcatattgggcaaatcaagtctcagaggacagacctgtgtgtaaggccattattcaaggaaaacagtttgaagggttggtagacactggagcagatgtctctattattgctttaaatcagtggccaaaaaactggcctaaacaaaaggctgttacaggacttgtcggcataggcacagcctcagaagtgtatcaaagtatggagattttacattgcttagggccagataatcaagaaagtactgttcagccaatgattacttcaattcctcttaatctgtggggtcgagatttattacaacaatggggtgcggaaatcaccatgcccgctccattatatagccccacgagtcaaaaaatcatgaccaagatgggatatataccaggaaagggactaggaataaaatgaagatggcattaaagttccagttgaggctaaaataaatcaagaaagagaaggaattagggtatccttttttaggggcggtcactgtagagcctcctaaacccataccactaacttggaaaacagaaaaaccggtgtgggtaaatcagtggccgctaccaaaacaaaaactggaggctttacatttattagcaaatgaacagttagaaaagggtcacattgagccttcgttctcaccttggaattctcctgtgtttgtaattcagaagaaatcaggcaaatggcatacgttaactgacttaagggctgtaaacgccgtaattcaacccatggggcctctccaacccgggttgccctctccggccatgatcccaaaagattggcctttaattataattgatctaaaggattgcttttttaccatccctctggcagagcaggattgtgaaaaatttgcctttactataccagccataaataataaagaaccagccaccaggtttcagtggaaagtgttacctcagggaatgcttaatagtccaactatttgtcagacttttgtaggtcgagctcttcaaccagtgagagaaaagttttcagactgttatattattcattatattgatgatattttatgtgctgcagaaacgaaagataaattaattgactgttatacatttctgcaagcagaggttgccaatgctggactggcaatagcatctgataagatccaaacctctactccttttcattatttagggatgcagatagaaaatagaaaaattaagccacaaaaaatagaaataagaaaagacacattaaaaacactaaatgattttcaaaaattactaggagatattaattggattcggccaactctaggcattcctacttatgccatgtcaaatttgttctctatcttaagaggagactcagacttaaatagtcaaagaatattaaccccagaggcaacaaaagaaattaaattagtggaagaaaaaattcagtcagcgcaaataaatagaatagatcccttagccccactccaacttttgatttttgccactgcacattctccaacaggcatcattattcaaaatactgatcttgtggagtggtcattccttcctcacagtacagttaagacttttacattgtacttggatcaaatagctacattaatcggtcagacaagattacgaataacaaaattatgtggaaatgacccagacaaaatagttgtccctttaaccaaggaacaagttagacaagcctttatcaattctggtgcatggcagattggtcttgctaattttgtgggacttattgataatcattacccaaaaacaaagatcttccagttcttaaaattgactacttggattctacctaaaattaccagacgtgaacctttagaaaatgctctaacagtatttactgatggttccagcaatggaaaagcagcttacacagggccgaaagaacgagtaatcaaaactccatatcaatcggctcaaagagcagagttggttgcagtcattacagtgttacaagattttgaccaacctatcaatattatatcagattctgcatatgtagtacaggctacaagggatgttgagacagctctaattaaatatagcatggatgatcagttaaaccagctattcaatttattacaacaaactgtaagaaaaagaaatttcccattttatattactcatattcgagcacacactaatttaccagggcctttgactaaagcaaatgaacaagctgacttactggtatcatctgcactcataaaagcacaagaacttcatgctttgactcatgtaaatgcagcaggattaaaaaacaaatttgatgtcacatggaaacaggcaaaagatattgtacaacattgcacccagtgtcaagtcttacacctgcccactcaagaggcaggagttaatcccagaggtctgtgtcctaatgcattatggcaaatggatgtcacgcatgtaccttcatttggaagattatcatatgttcatgtaacagttgatacttattcttattcacatttcatatgggcaacttgccaaacaggagaaagtacttcccatgttaaaaaacatttattgtcttgttttgctgtaatgggagttccagaaaaaatcaaaactgacaatggaccaggatattgtagtaaagctttccaaaaattcttaagtcagtggaaaatttcacatacaacaggaattccttataattcccaaggacaggccatagttgaaagaactaatagaacactcaaaactcaattagttaaacaaaaagaagggggagacagtaaggagtgtaccactcctcagatgcaacttaatctagcactctatactttaaattttttaaacatttatagaaatcagactactacttctgcagaacaacatcttactggtaaaaagaacagcccacatgaaggaaaactaatttggtggaaagataataaaaataagacatgggaaatagggaaggtgataacgtgggggagaggttttgcttgtgtttcaccaggagaaaatcagcttcctgtttggttacccactagacatttgaagttctacaatgaacccatcggagatgcaaagaaaagggcctccacggagatggtaacaccagtcacatggatggataatcctatagaagtatatgttaatgatagtatatgggtacctggccccatagatgatcgctgccctgccaaacctgaggaagaagggatgatgataaatatttccattgggtatcgttatcctcctatttgcctagggagagcaccaggatgtttaatgcctgcagtccaaaattggttggtagaagtacctactgtcagtcccatcagtagattcacttatcacatggtaagcgggatgtcactcaggccacgggtaaattatttacaagacttttcttatcaaagatcattaaaatttagacctaaagggaaaccttgccccaaggaaattcccaaagaatcaaaaaatacagaagttttagtttgggaagaatgtgtggccaatatgattatgggattaattgcagtcacagctacggctgctgtagcaggagttgcattgcactcttctgttcagtcagtaaactttgttaatgattggcaaaagaattctacaagattgtggaattcacaatctagtattgatcaaaaattggcaaatcaaattaatgatcttagacaaactgtcatttggatgggagacagactcatgagcttagaacatcgtttccagttacaatgtgactggaatacgtcagatttttgtattacaccccaaatttataatgagtctgagcatcactgggacatggttagacgccatctacagggaagagaagataatctcactttagacatttccaaattaaaagaacaaattttcgaagcatcaaaagcccatttaaatttggtgccaggaactgaggcaattgcaggagttgctgatggcctcgcaaatcttaaccctgtcacttgggttaagaccattggaagtactacgattataaatctcatattaatccttgtgtgcctgttttgtctgttgttagtctgcaggtgtacccaacagctccgaagagacagcgaccatcgagaacgggccatgatgacgatggcggttttgtcgaaaagaaaagggggaaatgtggggaaaagcaagagagatcaaattgttactgtgtctgtgtagaaagccaaaagcttcttaagctgataagccacttcatcaaagactcaggatacaaaataaacgtgcaaaagtccctaagattcctatataccaacaacagtcaagcagagagccaaatcatcaatgaacttccatttgcaattgccacaaagaagataatacctaggaatacagataacaaaccctggagacaagagcatatagtttgcattggaccatatgctagaatggaaatggggataaaagaatcagcaaccccattcaaagataaggagcaccagagactgatgactggggaatcactgtga

SEQ ID NO: 12555 - DNA, 462 bp, Homo sapiens; identical to SEQ ID NO: 11354
  SIMILAR (205)..(390): 901254mologous to Homo sapiens v-fos transformation effector protein,accession number M84711,Smith-Waterman Score=292.

SEQ ID NO: 12556 - DNA, 645 bp, Homo sapiens; identical to SEQ ID NO: 11312
  SIMILAR (931)..(1155): 771254mologous to Homo sapiens reverse transcriptase homolog= pol {retroviral element},accession number S61070,Smith-Waterman Score=283.

SEQ ID NO: 12557 - DNA, 587 bp, Homo sapiens; identical to SEQ ID NO: 11356
  SIMILAR (305)..(532): 1001254mologous to Homo sapiens v-fos transformation effector protein,accession number M84711,Smith-Waterman Score=394.

SEQ ID NO: 12558 - DNA, 441 bp, Homo sapiens; identical to SEQ ID NO: 11357
  SIMILAR (1)..(90): 961254mologous to Homo sapiens ribosomal protein S3a,accession number AB007148,Smith-Waterman Score=151.

SEQ ID NO: 12559 - DNA, 1139 bp, Homo sapiens; identical to SEQ ID NO: 11358
  SIMILAR (901)..(1623): 1001254mologous to Homo sapiens DM-20,accession number M17085,Smith-Waterman Score=1273.

SEQ ID NO: 12560 - DNA, 451 bp, Homo sapiens
  SIMILAR (208)..(438): 581254mologous to Caenorhabditis elegans coded for by C. elegans cDNAs GenBank: CE5D1 (Z14791), CEL01F1 (M88817), CEL04B5(M88849), and CEL04C1(M75812); putative,accession number L14331,Smith-Waterman Score=270.
  misc_feature (1)...(451): n = a,t,c or g
caatgagcaaacagttttaaacaaggcagtctactgttaaataatatgcttaccttatttttataggcttttgatgaattaccacattatgctttgttaaaagaactcttaattcaggtaaatatctttaaaattagctatccaaaatatacatgatatatcttggaataaggaactaacatacacttttttaactagatctttagtacaccacggtatcatcccaaaagccaaccatttgtggaccacgtgtttactttcaccattttggataataggatatggtttcggaactttcagatcatagaagaagatgctgctcttgtagaaataggacctcgttttgtcttaaatctcataaagattttccagggaagttttggaggaccaactttatatgaaaatcctcactaccagtcaccaaacatgcatcggcgtgtcataagatccn

SEQ ID NO: 12561 - DNA, 992 bp, Homo sapiens
  SIMILAR (86)..(229): 371254mologous to Homo sapiens unnamed protein product,accession number AK001345,Smith-Waterman Score=75.
ccaagaggacacgtagtgtaggctttgcaggtcaggctaagaagccataaataaacgaaatagatgcggagccgccagctaagcggcacgccacaacaaaggaggtggaggaagaatagagggaccggatcccaggccccgtttgcaagggaaagtggaaaaataaggaacggattctcatcttttcttccagaggaataaattttagaacaagacatttaatgcaggacttgagaatgttgatgcctcattctaaagcatgatactaatatggctcgcagcgataatctatctgtgataaacgagggttgtgaaatgaacaactggcttagatgcatctattttgaagctaagaaaaaacaggatctctatatgtggctttcaaattcacctgacggaccatctgctaaattccttgttcaaaatattcataccctcgctgaactgaagatgactggaaactgtttgaaaggttctcggccccttttgtcttttgaccctgcttttgatgaattaccacattatgctttgttaaaagaactcttaattcagatctttagtacaccacggtatcatcccaaaagccaaccatttgtggaccacgtgtttactttcaccattttggataataggatatggtttcggaactttcagatcatagaagaagatgctgctcttgtagaaataggacctcgttttgtcttaaatctcataaagattttccagggaagttttggaggaccaactttatatgaaaatcctcactaccagtcaccaaacatgcatcggcgtgtcataagatccatcacagctgcaaaatacagagagaaacagcaagtgaaagatgtgcaaaaactgagaaagaaagagccgaagactcttcttccacatgatcccgctgcagatgtttttgtaacaccagctgaggagaaaccaatagaaatacagtgggtaaaaccagagacaaaagttgatttgaaagcaagtgtatt

SEQ ID NO: 12562 - DNA, 345 bp, Homo sapiens
  SIMILAR (142)..(234): 671254mologous to Homo sapiens Human secreted protein, SEQ ID NO: 5576,accession number G01495,Smith-Waterman Score=98.
atgaggcaaagaaagtccaacgagggagagaggagacactcccggcaggccacaggcacggccgatcgcctgcagccacgagtccggaccaacctcggccacatgccaggccatgccggcaccgagcctgccggcccacctactcaaacggctgacgtgcgacgtcgcccgcaaccggcgcgccagccgccggcccgcccccaccccccccgcaggcaccccccacccacccccagtcagatgcagaagccatttgaagacgcctcgtttgcgctgcggacgggggagatgagcgggcccgtgttcacggattccggcatccacatcatcctccgcactgagtga

SEQ ID NO: 12563 - DNA, 1034 bp, Homo sapiens
  SIMILAR (579)..(466): 811254mologous to Homo sapiens Human secreted protein, SEQ ID NO: 5576,accession number G01495,Smith-Waterman Score=157.
  misc_feature (1)...(1034): n = a,t,c or g
cccggctgggagaagcgcatgagccgcagctcagagtaaacactcaggaagcgttacccactgctgccattcccanagatgcaaaagtccgagtgtactacttcaaccacatcactaacgccagccagtgggagcggcccatcggcaacagcagcagtggtggcaaaaacgggcagggggagcctgccagggtccgctgctcgcacctgctggtgaagcacagccagtcacggcggccctcgtcctggcggcaggagaagatcacccggaccaaggaggagggccctggagctgatcaacggctacatccagaagatcaagtcgggagaggaggactttgaagtctctggcctcacagttcagcgactgcagctcagccaaggccaaggggagacctgggttgccttcagcagaggtcagatgcagaagccattttgaagaacgcctcgttttgcgcttgcggacggggggagatgagcggggcccgtgtttcacggatttccggcatccacatcatccttccgcacttgagtgagggtgggaagcccaggcctggcctcggggcagggcagggcggctaggccggccagctcccccttgcccgccagccagtggccgaacccccccactccctgccaccgtcacacagtatttattgttcccacaatggctgggagggggcccttccagattgggggccctggggtccccactccctgtccatccccagttggggctgcgaccgccagattctcccttaaggaaattgacttcagcaggggtgggaggctcccagacccagggcagtgtggtgggaggggtgttccaaagagaaggcctggtcagcagagccgccccgtgtccccccaggtgctggaggcagactcgagggccgaattgtttctagttaggccacgctcctctgttcagtcgcaaaggtgaacactcatgcggcccagccatgggccctttgagcaactgtgcagcaccctttcacccccaattaaacccagatccaaataaaaaaaaaaaaa

SEQ ID NO: 12564 - DNA, 651 bp, Homo sapiens
  SIMILAR (3)..(47): 1001254mologous to Homo sapiens Ku70-binding protein,accession number AF078528,Smith-Waterman Score=106.
atggatggatggatggatggatggatggatggatggatggatggacaggtggacgcaaagacaaatggatggatgaatggatggatggatgtactgatttctgccatgggaaatgatgctttctcatctggggatggccaggacaggtgctacaaggactccatgagccagagcttctggggccatctcacccatgtgcagagaaatccacctacagtgacgtggacgcagcagaaggcaggagctgacagcctgcggggcaaggtgttggctgcacctgttgagtgcctggatacacctgttgagtgcctggatgcagccgtgcctgaaggcatggctcctcctggacttttcactgactggagccagtacattccttcttcgctgaagttgcccctccaggaccagtgcttgagtggaggaggcctccctaaaggtcaaacggtccaggaggacacctgccaccacaacacagccctgggcctgcagtgtagcatcatcagtgaacacaccaccacgcacatcaccgtcacctcttgcaggcatctccgagccacagccacagcaatcgagactccctctcctctccgagctctctccgtacacctcgtctcactaacttcacacaaccctgggacatctgtgctctga

SEQ ID NO: 12565 - DNA, 462 bp, Homo sapiens
  SIMILAR (772)..(1200): 761254mologous to Cloning vector pBACe3.6 levansucrase,accession number U80929,Smith-Waterman Score=524.
cctgaatggacaggaggaaacagctggggtcgtgtccaccaacctaatccttaatggagactggaccttccagatcgtggtgatgctggaaatgaccccccagcagggagacgtttacatatcccaagtggagcacaccagcctggacagtcctgtcaccgtggagtggaaggcacaggaggagcaagaaagttcaacgaggatctgcataaacagggttcctgacctcaccgaaaagactaatgtgccttagaacaagcatttgctgtgttttgttagcacctggttccaggacagaccctcagcttcccaagaggatactcctcccaagaagttgctctgaagtcagtttcgatcgttctgctgtttgattcaaagcactgtttctctcactgggcctccaaccatgttcccttgttcttagcaccacaaataatcaaaacccaaaaaaaaaaaaaaaaa

SEQ ID NO: 12566 - DNA, 743 bp, Homo sapiens
  SIMILAR (297)..(512): 611254mologous to Homo sapiens DQB2,accession number X87344,Smith-Waterman Score=237.
cagaagactatctggagagaaagcggcaggcccgacagaatgtcagacccactcgaagctgggcgggcccatgaccctcaagcgcgaagtcaagcctaggttgatgtttccccttccaagaaggggccccttgcagcaccacaccctgctttgtctgccacgtgcggattttctacccaggcagcattcaagtcgatggttcctgaatggcaggaagaaaacagctggggtcgtgtcacccaacctgatccgtaatggagactggaccttcagatcctggtgatgctggaaatgacccccagcagggagatgtctacacctgccaagtggagcacaccagcctggatagtcctgtcaccgtggagtggaaggcacagtctgattctgcccggagtaagacattgacgggagctgggggcttcgtgctggggctcatcatctgtggagtgggcatcttcatgcacaggaggagcaagaaagttcaacgaggatctgcataaacagggttcctgagctcactgaaaagactattgtgccttaggaaaagcatttgctgtgtttcgttagcatctggctccaggacagaccttcaacttccaaattggatactgctgccaagaagttgctctgaagtcagtttctatcattctgctctttgattcaaagcactgtttctctcactgggcctccaaccatgttcccttcttcttagcaccacaaataatcaaaacccaacaaaaaaa

SEQ ID NO: 12567 - DNA, 366 bp, Homo sapiens
  SIMILAR (1)..(240): 971254mologous to Homo sapiens MHC HLA-SB beta chain,accession number L29173,Smith-Waterman Score=414.
atgctggaaatgaccccccagcagggagacgtctacatctgccaagtggagcacaccagcctggacagtcctgtcaccgtggagtggaaggcacagtctgattctgcccggagtaagacattgacgggagctgggggcttcgtgctggggctcatcatctgtggagtgggcaccttcatgcacaggaggagcaagaaaggtgagaaagcctgcaagttcaacgaggatctgcataaacaggaactggaagctttatttctggtcctcaaagggcaaagtgacaagcgacattcaatagctcatggcctgaggcttcctgatgcccagggtcttacactcgtagccaggactgatgtgttgtcatag

SEQ ID NO: 12568 - DNA, 1568 bp, Homo sapiens
  SIMILAR (70)..(798): 711254mologous to Homo sapiens HLA DP4 beta-chain,accession number J03041,Smith-Waterman Score=762.
agctccctttagcgagtccttcttttcctgactgcagctcttttcattttgccatccttttccagcaccatgatggttctgcaggtttctgcggccccccggacagtggctctgacggcgttactgatggtgctgctcacatctgtggtccagggcagggccactccagagaattaccttttccagggacggcaggaatgctacgcgtttaatgggacacagcgcttcctggagagatacatctacaaccgggaggagttcgcgcgcttcgacagcgacgtgggggagttccgggcggtgacggagctggggcggcctgctgcggagtactggaacagccagaaggacatcctggaggagaagcgggcagtgccggacaggatgtgcagacacaactacgagctgggcgggcccatgaccctcgaagcgcgaagtcccagcctagggtgaatgtttccccctccaaagaaggggccctttcaagcacacatacctgcttggtctgccacgtgacaagatttctacccaggcagccatccaagtccgatggttcctgaatggacaggaggaaacagctgggggtcgtgtccaccaacctgatccgtaaatggagactggaccttccagaatcctggttgatgctggaaaatgacccccccagcaagggagatgtctaaacctgcccaagtggagcacacccagccctggataagtcctgtcacccgtgggagtggacaggcacagtctgattctgcccggagtaagacattgacgggagctggggggcttcgtgctggggctcaatcatctgtggagtgggcatcttcatgcacaggaggagcaagaaaggtgagaaagcctgcaagttcaacgaggatctgcataaacaggggttcctgagcttccttgaaaaagcctattgtgccttagaacaagcatttgctgtgttttgttagcacctggttccaggacagaccctcaagcttcccaaagaggatactgctgcccaagaagttgcccctgaagtcagtttctatcgttctgctcctttgatttcaaaagcacttgtttctcctcactgggggcctccaaaccatgttcccttcttcttaagcaccacaaataatcaaaacccaacataagtgtttgttttcctttaaaaaatatgcatcaaatcgtctctcattacttttctctgagggttttagtaaacagtaggagttaataaagaagttcattttggtttacacgtaggaaagaagagaagcatcaaagtggagatatgttaactattgtataatgtggcctgttatacatgacactcttctgaattgactgtatttcagtgagctgcccccaaatcaagtttagtgccctcatccatttatgtctcagaccgctattcttaactattcaatggtgagcagactgcaaatctgcctgataggacccatattcccacagcactaattcaacatatatcttactgagagcatgttttatcattaccattaagaagttaaatgaacatcagaatttaaaatcataaatataatctaatacacttt

SEQ ID NO: 12569 - DNA, 577 bp, Homo sapiens
  SIMILAR (1)..(183): 401254mologous to Mus musculus nuclear localization signal binding protein,accession number S79410,Smith-Waterman Score=111.
atgagcccgcccggttcctctctgtgcacctcatgcctggggctccgtcccgtcctgggtgggttttcacctgcaccgctggcccctcccccgggagcgttggtggagccggctttctcagccaggagcctgttgcggggtcagcggctggagctcaaggtcggctcaggggactttctcgtgctggaggttggctgcggagcagcctgcatttctcggaaaacagggcccagggcctgctccacgccgctgtccacgtcttcaccatcccctcgttgcaggttcgaggccgagctcagacctgtggagcagaagctgagtgcgctgcagtccccgctggcccagaggcccttcttcgaggtgccctcacccctgggcgccgtggacctgtacgagtatgcatgcggggatgaggacctggagccactgtgacgccacccatgagaacgccgctgcggggccgctccacacgtgccacggccaccactgggacaccgccgcttgtgtaaaaactgttgtcttttgtggaaaatgagtgtgtttgcatggaatgataaatttttatttattcacaaaa

SEQ ID NO: 12570 - DNA, 1387 bp, Homo sapiens
  SIMILAR (118)..(852): 921254mologous to Homo sapiens putative p150,accession number U93563,Smith-Waterman Score=1167.
atggatgacatgggcctggtggccaaggcctgcggctgccccctctactggaaggggccgctcttctatggcgccggcggggagcgcacgggctccgtgtccgtccacaagttcgtcgccatgtggagaaaaatcctccagaactgccacgacgacgcggccaagttcgtccatctgctcatgagccccggctgcaactacctggtgcaggaggactttgtccccttcttgcaggacgtggtgaacacgcacccggggctgtcgttcctgaaggaggcgtccgagttccactcgcgctacatcaccacggtcatccagcggatcttctacgccgtgaaccggtcctggtccggcaggatcacctgcgccgagctgcggaggagctccttcctgcagaatgtggcgctgctggaggaggaggcggacatcaaccagctgaccgaattcttctcgtacgagcatttctacgtcatctactgcaagttctgggagctggacacggaccacgacctgctcatcgacgcggacgacctggcgcggcacaatgaccacgccctttctaccaagatgatagacaggatcttctcaggagcagtcacacgaggcagaaaagtgcagaaggaagggaagatcagctatgccgactttgtctggtttttgatctctgaggaagacaaaaaaacaccgaccagcatcgagtactggttccgctgcatggacctggacggggacggcgccctgtccatgttcgagctcgagtacttctacgaggagcagtgccgaaggctggacagcatggccatcgaggccctgcccttccaggactgcctctgccagatgctggacctggtcaagccgaggactgaagggaagatcacgctgccagaacttgaagcgctgcaagctggccaacgtcttcttcgacaccttcttcaacatcgagaagtacctcgaccacgagcagaaagagcagatctccctgctcagggacggtgacagcggcggccccgagctctcggactgggagaagtacgcggccgaggagtacgacatcctggtggccgaggagaccgcgggagagccctgggaggacgggttcgaggccgagctcagccctgtggagcagaagctgagtgcgctgcggttccccgctggcccagaggcccttcttcgaggcgccctcaccgctgggcgccgtggacctgtacgagtacgcgtgcggggacgaggacctggagccgctgtgacgccacccgcgagaacgccgccgcggggccgccccccacgtgccaccaaccggggccaaccgcggctcgtgtaaaaaacttgtttgttgaaaatgagtgcgtttgtacggaatgataaacttttaatttaattcacagaa

SEQ ID NO: 12571 - DNA, 446 bp, Homo sapiens
  SIMILAR (739)..(1554): 961254mologous to Homo sapiens putative p150,accession number U93563,Smith-Waterman Score=1326.
ccgggttggaattaccgggccgagataaacagactgtggcttatcggctgcttttgggggcccttgctctggcttatggggagaagaatttgacctttgaaggaccactgcctgaaaagataaaactcttggctcacaaggggctgctcaatctcacatattaccagcaaatccaggtgcagaaaaaggacaacaagatatttgagatctcctgttgcagcgaccatcgatgcaagtggcttccagcttctatgaacaccgtctgcacccagtccctgaccctggcgatcgattcttgtcatggcactgtggttgctctccgctatgcttggaccacatggccttgtgaatataagcagtgtcccctataccaccccagtagtgccctgccagcccctcccttcattgctttcattacagaccagggtcctggaaaaaaaaaaaaa

SEQ ID NO: 12572 - DNA, 420 bp, Homo sapiens
  SIMILAR (49)..(243): 1001254mologous to Homo sapiens sialic acid-specific 9-O- acetylesterase I,accession number AF300796,Smith-Waterman Score= 338.
atgagagggactgttgcagctgtctttggagagacactgccacaacacatccaccctcgagataaacagactgtggcttatcggctgcatttgggggcccgtgctctggcttatggtgagaagaatttgacctttgaaggaccactgcctgagaagatagaactcttggctcacaaggggctgctcaatctcacatattaccagcaaatccaggtgcagaaaaaggacaacaagatatttgaggctcagagaataggggtccttagaggagacttcaaggctggaagtggagagtggcacaatcttccaatgcctgttggtatcacgttgcttcttcctcattcccaagcagcaattcagtccaggaacagtggaatccagtgtcccagcacttgcgttcggcctcatcatgctccctga

SEQ ID NO: 12573 - DNA, 595 bp, Homo sapiens
  SIMILAR (282)..(383): 381254mologous to Homo sapiens Human normal bladder tissue EST encoded protein 65,accession number Y60393,Smith-Waterman Score =65.
tgtttatcaatactctggttctgactaaagtgaattttgacatggacatgtcatgtcatgtcatacccacacaagggtctaggtctaatgctaagcctttgctctgtaaagcattccaccttgagagacgttttcactctgtaatgtttggcacaacttttgtaaaaatattagctgtgaaatttttctgtgatcgctttttattttctcctcagtaagcataatatttatccttctaaaaaagtatccaaagctccttaggatggttcacctttctctttctctctagtcctggtgttactttgcatccaacactttttcctctcaataatacaggtgcttccactggaagaccacaccccagcaagcgactggctcttgaatgacacctggattctatggcctttccctccactttgggaagctctttagttagacaggtactgtaagcggcaggagaaaaaaagctaattattacttgctggagtcttgtctcaggcatgctgcggggctgtgcaagattcgctgctctgctgctgtcgtcattatgatgctacaattacagagaggcgggtcagcacccagccgatcggtg

SEQ ID NO: 12574 - DNA, 1387 bp, Homo sapiens
  SIMILAR (143)..(268): 801254mologous to Homo sapiens Human GTPase regulator GRAF,accession number W97809,Smith-Waterman Score=165.
cactgccatctggctgccttgccaggcacttcccacgagaggggactaggtagcttacagggaaagggaagaagagagatgaaatgtctggggctttctaagggttttttcaaaaatgttaaataaactcctgttttcacacagcacaccgttccggaaggcaaaagccttgtatgcctgcaaagctgaacatgactcagaactttcgttcacagcaggcacggtcttcgataacgctggtgcttgcaggccccagcagactgcaggtgcagtgggtctgctgaaggctgtccaaagccatttcactgcctcatgccttcttcatgttctcaagcaaggtcggcaaactatgacctgcccgtcaaatccaacctgccacctgtcacctaacaattctgtaactgctcccacatacaacatggtcgtcatcataaatcctataggtattgttgagagcaggaggaaagtttggttgagaaactttagggcagatgaggagaatgaattggttatcagagtggaagaccatggcccaggatccctgagctttcccagtagcctccagtttccttttacctgtctaactaaagagcttcccaaagtggagggaaaggccatagaatccaggtgtcattcagagccagtccttgctgaaatgtggtcttccagtggaagcacctgtattattgagaggaaaaagtgttggatgcaaagtaacaccaggactagagagaaagagaaagtggggagtaactggccatggcccattgagagcaatcaccctcgattttttatgtttccattcagccatcagttattgaccacctcttccatgccggagctgctacaaccaggaagttctcaggtattcatttacagcagtgcaagaattaatacaacacccaagccagaggccatcaaaatgccagtggtctggcttaaacacatgatgcaggccaatcagatttttgctcctctcccgcctctggctcctctgcatgttaagagcaaagtcgccccaaagcaggaaatgggattactctcctatcgtgatgaagcctgtgttgcctctcccagtgactcagggatggagtgtggactcttgagttgccatagcccatggactgaaactgtgtccagagattctagaaccttcctgaggcttgagcacagtgtttggagcagcactgagaggataagagatatggcagtcatggacaggaaaggaggaaattaccataggaaagttggagattctgttgccgtcatcccattgggcggtcggaagctggggtcagtccagaagcctctggataaacctgggggtagtcccagccagaaatcctcagttgccccaggacttcttccaaccccaagtgatggctaa

SEQ ID NO: 12575 - DNA, 1200 bp, Homo sapiens
  SIMILAR (280)..(1077): 551254mologous to Mus musculus h2-calponin,accession number Z19543,Smith-Waterman Score=664.
atgaacccattggagtgtgtggacagatcatcccagccctggggaaatcctacttggaccagctctgggatgaggtctgtcaccttcctcgtaggattcaaacttacttttcttgcccttgcccagactctcaacgctgcagcttcactgacaggacaagagctgcttgctggctttcctcccggggtcatcaatattttgccaggatatgggccaacggctggggcagcaatagcttctcacattggcatagacaagattgcattcacagggtctactgagaaggaggcagagcttcacagctggatcaagggactcacctgcatctccattgagcctgacttccagaagagcctgaaggacgggattatcttatgcatactcatgaacaagctgcagccggcctcattccccaagatcaaccactccatgcagaagtggcaccagctggaaaacctctccaacttcatcaaggctgtagtcagctatgacatgaaccccatggacctgttcaaggccaacaacctgtttgagagtgggaacatgaggcacatgcaggtgtctctttttgccctagcagggaaggtcaagactaagaggccgcagagcggggtggacattggcatcaaatactcagagaagcaggagcagaacttcagtgacgccgccatgaaggctggccagtgcgtcatcgggctgcaaatgggcaccaacaaatgtaccagccagttgggcatgaccgtgtatggcatgggtacaaataactgtgccagccaggtgagcatgacagctcctgggacgcggcagcacatctgtgacaccaagctgggaaccgacaagtgtggtaattcctccatgtccctgcagatgggctacacccaggtgctgccaatcaaccgagggtctgtgagtggcaacgtggaatcaggcagcagggctttcttcccccttgccttggtccttcgcaggaatgagccaccaggctgtggaggagaaggggtcaaggccatatcccaatatgtgtatggtgagggtccctgctggcacgtccaggctgccagcagagctgtgccggggagaagagacctgggcttggagggaaccagtacccggaggtttccagttgccttgcctcttcccacttttgtcagccgatcagtttgtggtttctatacccgcaaaagtttcaggatgcattaa

SEQ ID NO: 12576 - DNA, 1329 bp, Homo sapiens
  SIMILAR (3025)..(4347): 1001254mologous to Homo sapiens erbb2-interacting protein ERBIN,accession number AF263744,Smith-Waterman Score=2293.
atgaacccattggagtgtgtggacagatcatcccagccctggggaaatcctacttggaccagctctgggatgaggtctgtcaccttcctcgtaggattcaaacttacttttcttgcccttgcccagactctcaacgctgcagcttcactgacaggacaagagctgctttggaacttccccctgctgatgtttgcctggaaaatagctccagctttgtgctgtggcaatacagtagttattaagccagcagagcaaacaccactcagtgcactctacatgggagccctcatcaaggaggctggctttcctcccggggtcatcaatattttgccaggatatgggccaacggctggggcagcaatagcttctcacattggcatagacaagattgcattcacagggtctactgagaaggaggcagagcttcacagctggatcaagggactcacctgcatctccattgagcctgacttccagaagagcctgaaggacgggattatcttatgcatactcatgaacaagctgcagccggcctcattccccaagatcaaccactccatgcagaagtggcaccagctggaaaacctctccaacttcatcaaggctgtagtcagctatgacatgaaccccatggacctgttcaaggccaacaacctgtttgagagtgggaacatgaggcacatgcaggtgtctctttttgccctagcagggaaggtcaagactaagaggccgcagagcggggtggacattggcatcaaatactcagagaagcaggagcagaacttcagtgacgccgccatgaaggctggccagtgcgtcatcgggctgcaaatgggcaccaacaaatgtaccagccagttgggcatgaccgtgtatggcatgggtacaaataactgtgccagccaggtgagcatgacagctcctgggacgcggcagcacatctgtgacaccaagctgggaaccgacaagtgtggtaattcctccatgtccctgcagatgggctacacccaggtgctgccaatcaaccgagggtctgtgagtggcaacgtggaatcaggcagcagggctttcttcccccttgccttggtccttcgcaggaatgagccaccaggctgtggaggagaaggggtcaaggccatatcccaatatgtgtatggtgagggtccctgctggcacgtccaggctgccagcagagctgtgccggggagaagagacctgggcttggagggaaccagtacccggaggtttccagttgccttgcctcttcccacttttgtcagccgatcagtttgtggtttctatacccgcaaaagtttcaggatgcattaa

SEQ ID NO: 12577 - DNA, 732 bp, Homo sapiens
  SIMILAR (1)..(465): 671254mologous to Homo sapiens neutral calponin,accession number D83735,Smith-Waterman Score=527.
atgaacaagctgcagccggcctcattccccaagatcaaccactccatgcagaagtggcaccagctggaaaacctctccaacttcatcaaggctgtagtcagctatgacatgaaccccatggacctgttcaaggccaacaacctgtttgagagtgggaacatgaggcacatgcaggtgtctctttttgccctagcagggaaggtcaagactaagaggccgcagagcggggtggacattggcatcaaatactcagagaagcaggagcagaacttcagtgacgccgccatgaaggctggccagtgcgtcatcgggctgcaaatgggcaccaacaaatgtaccagccagttgggcatgaccgtgtatggcatgggtacaaataactgtgccagccaggtgagcatgacagctcctgggacgcggcagcacatctgtgacaccaagctgggaaccgacaagtgtggtaattcctccatgtccctgcagatgggctacacccagggaatgagccaccaggctgtggaggagaaggggtcaaggccatatcccaatatgtgtatggtgagggtccctgctggcacgtccaggctgccagcagagctgtggccggggagaagagacctgggcttggagggaaccagtacccggaggtttccagttgccttgcctcttcccacttttgtcagccgatcagtttgtggtttctatacccgcaaaagtttcaggatgcattaa

SEQ ID NO: 12578 - DNA, 417 bp, Homo sapiens
gctctccactctccaccccttttctttaaaaaaaaaaaaaaagctacaggaagtgggattggcacgttttcttttcaataatttataactgtttttctaccttctaaggtcatggcgaatacgtaatagagtcttttaagggttacttgattcaaatatgtcttaagtaactgcttcctttacatttacagtgttctcgcagtctttgccttataaaactcatgcattcaatgaagagcggctgcaagagtgagctaatccttttgttcggcgaactttgaagtttttcgccttactgcacagcagtgatttgttaggtagcatgccctctctcacatcttttaaggttaggtgtaaagtttcccaaaaagcaccaagagagttaacttctaagggtgaaacgaaatccgattcagt

SEQ ID NO: 12579 - DNA, 770 bp, Homo sapiens
  SIMILAR (125)..(769): 991254mologous to Homo sapiens Human membrane channel protein -2 (MECHP-2),accession number Y70452,Smith-Waterman Score=1122.
  misc_feature (1)...(770): n = a,t,c or g
acgcacgaccccctgcctcttcttccagaagccaatgggcacagaagcaccaattctcccacaataggttcacctgctattgtttcccccacccaggacagtcggcccaatatgtcaagactctctgatcactagatcccctgcatctccactgaacaaccaaggcatccctactccagcacaactcacaaaatccaatgcgcctgtccacattgatgtgggcggccacatgtacaccagcagcctggccaccctcaccaaataccctgaatccagaatcggaagactttttgatggtacagagcccattgttttggacagtctcaaacagcactatttcattgacagagatggacagatgttcagatatatcttgaattttctacgaacatccaaactcctcattcctgatgatttcaaggactacactttgttatatgaagaggcaaaatattttcagcttcagcccatgttgttggagatggaaagatggaagcaggacagagaaactggtcgattttcaaggccctgtgagtgcctcgtcgtgcgtgtggccccagacctcggagaaaggatcacgctaagcggtgacaaatccttgatagaagaagtatttccagagatcggcgacgtgatgtgtaactctgtcaatgcaggctggaatcacgactcgacgcacgtcatcaggtttccactaaatggctactgtcacctcaactcagtccaggtcctctagaggttgcagcanagaggatttgaaatcgtgggct

SEQ ID NO: 12580 - DNA, 828 bp, Homo sapiens
  SIMILAR (88)..(246): 921254mologous to Homo sapiens Human potassium channel K+ Hnov27,accession number Y34125,Smith-Waterman Score=253.
atgaaacgatactcctatggttctgttttatttactgcattcgatcttggttatttagaccctgatgaggttcagcagggacacgaaatcggaagactttttgatggtacagagcccattgttttggacagtctcaaacagcactatttcattgacagagatggacagatgttcagatatatcttgaattttctacgaacatccaaactcctcattcctgatgatttcaagagaactttggtgtttatattaccactcgcagcccctttctcagttggccttgaggcttgcccattagctggtaaacgtttgaaagggtcagtgtgtccagaactggaatttccactttggaaaaagcacagagtgttctcgcagtctttgccttataaaactcatgcattcaatgaagagcggctgcaagataacaaatcctacattcactcagttcttcaggagccaagagaagatactgatcctgagggggctggagcagctccagaccacagatcaacatacaagcttctgtctcccgcattatccctcaaccttggagaaaaaaataagtggttgcgacgctatattgaacttttaatttctgaaagggagatggcagctgcaggtagcagcatcccatcctggacttcagtgtccatccaggtgaagttgagaaagtgtcagctccagctactggccaaggaagaggttgccacaattgtgttagatgaaacatctggagtcaatgggatacatattgagcatcaacttcagtgtctaatacaagtgcccaaactctcagccccaaatatcgcccccccaaccccagcctaa

SEQ ID NO: 12581 - DNA, 470 bp, Homo sapiens
  SIMILAR (3)..(470): 811254mologous to Gallus gallus poly(A) polymerase II,accession number AF061758,Smith-Waterman Score=684.
aatggccaaatcctgtgctgctgaagcaaccagaagaatgcaatttgaatttgcctgtctgggatcctcgggtaaatccatcagataggtatcatctcatgcccataatcacccctgcctacccacaacagaattctacgtataatgtgtccacatcaactcgaacagtaatggtagaagaatttaaacaaggtcttgcagtcacagatgaaattcttcaaggaaagtcagattggtccaaactacttgagccaccgaatttctttcaaaagtatagacattatatagtattgactgccagcgcatcaacagaagaaaaccatctagagtgggttggattagcagaatctaaaatccgtgtacttgttggaaacttggaacggaatgaatctattactcttgcccatgtgaatccccagtcattcccagggaataaggaacatcataaagacaacaattacgtatcaatg

SEQ ID NO: 12582 - DNA, 1686 bp, Homo sapiens
  SIMILAR (2893)..(3855): 591254mologous to Homo sapiens bA145E8.1 (KIAA1074),accession number AL162272,Smith-Waterman Score=910.
atgctgctcaacaggaatgtggcagaggaaagaagccagagccaaaactggccaggtgtgagtgtgggctgtggggggagggggaagatcgaggactgtgtctgggtgctgctgaaagtgcctctaggtggtggggggacagggctgtcttcgggagggaaggaaggcaacaggaatggcccacacctccacacctctgaaaccaacccgattcatcttgctgcaatcaaacctgtaccagtgtttctcaaccctggctggggagctcttaaaaatgcctgtgcccaggtgtctctccaggccaatctaatcacaccctctgtggatgggtcccgggcatccagactctgtgaagcagaactcgggcctctagcgtctgctagtctagatctaaaggtgtttcctgagggacagtttggcctggcatgcaggtacctctgcagaccacaacagtgcaccgaaaacaccccctcccagcacgcacacaagtctggctcctcagccaaacatcaaacaccaacactgctgcccatgccagatgccaaggaatggccaaatcctgtgctgctgaagcaaccagaagaaagcaatttgaatttgcctgtctgggatcctcgggtaaatccatcagataggtatcatctcatgcccataatcacccctgcctacccacaacagaattctacgtataatgtgtccacatcaactcgaacagtaatggtagaagaatttaaacaaggtcttgcagtcacagatgaaattcttcaaggaaagtcagattggtccaaactacttgagccaccgaatttctttcaaaagtatagggttggattagtagaatctaaaatccgtgtacttgttggaaacttggaacggaatgaatttattactcttgcccatgtgaatccccagtcattcccagggaataaggaacatcataaagaacaggcaaacaatataaatatgctaaaggagggaatgaaaattgaagcaactcatgtaaagaaaaaacaacttcaccactaccttcctgcagaaattcttcaaaagaagaaaaagcaaagtctctctgatgtcaatcgaagctcgggcggacttcaatccaaaagattgtctctggatagcagttgtctggatagctccagagacactgataatggaacaccttttaattctccagcgtccaagtctgatagcccttctgtaggagaaacagaaaggaatagtgctgagcctgctgctgtaattgtggagaagccactgagtgtaccaccagcccaaggactttccattccagtgattggcgcaaaagttgactctacagtaaaaactgtatcaccccccactgtgtgtaccattcctaccgtagtaggacgaaatgtcattcctagaatcacaacacctcacaaccctgcccagggacaaccgcatctgaatggaatgtcaaatataactaagactgttacacctaagagatcccattccccatccatagatgggactcctaagaggttgaaagacgtagaaaaggatgccattggaggagaatctatgcctattccaactattgatacatcacgcaaaaagagactacccagtaaagaactaccagattcatcatctccagttccagcaaacaacatccgtgtcatcaaaaattccattcgactgacccttaatcggtaa

SEQ ID NO: 12583 - DNA, 1985 bp, Homo sapiens
  SIMILAR (164)..(3): 791254mologous to Homo sapiens Human secreted protein HLYES38, SEQ ID NO:220,accession number Y86305,Smith-Waterman Score =211.
atgaacaaaccgtatatcagaaacctcagcgagaacgccgcccccttggacctagaaggtatcttgaaggacgccaagatccccgtgtcgggacccttcctggtgaagattggctacgcgttcgtggactgcccagacgagatctgggccctcaaggccattgaggcgctttcaggtaaaatagaactgcacgggaaacccatagaagttgagcactcggtcccaaaaaggcaaaggattcggaaacttcagatacgaaatatccctcctcacttacagtgggaggtgctggatagttgactagtccagtatggagtggtggagagctgtcagcaagtgaacactgactcggaaactgcagttgtaaatgtaacctattccagtaaggaccaagctagacaagcgctagacaagcactagacaaactgaatggatttcagttagagaatttcaccttgaaagtagcctatatccctgatgaaatggccacccagcaaaacccctttctgcagccccgaggtcgccgggggcttgggcagaggggctcctcaaggcaggggtctccaggatccgtgtccaagcagaaaccatgtgatttgcctctgtgcctgctggttcccacccaatttgttggagccattataggaaaagaaggtgccaccattcggaacatcaccaaacagacccagtctaaaatcgatgtccaccgtaaagaaaatgcaggggctgctgagaagtcgattactatcctctctactcctgaaggcacctctgcggcttgtaagtctattctggagattatgcgtaaggaaactcaagatgtaaaattcacagaagagatccccttgaagattttagctcaaaataactttgttggccgtcttattggtaaagaaggaagaaatcttaaaaaaattgagcaagacacagacactaaaatcacgatatctccattgcaggaactgatgcagtataatccagaacacaccattacagctaaaggcaatgttgagacatgtgccaaagctgaggaagagatcatgaagaaaatcagggagcgttaggaaaatgatatcacttctatgatttcaagcacatttaattcctggattaaatctgaacgccttgggtctgttcccacccacttcagggatgccacctcccacctcagggcccccttcagccatgactcctccctccccgcagtctgagcaatcagaatccgagactgttcatctgtttatcccggctctatcagtcagagccctcatcagcaagcagggccagcacatcaagcagctttctcgctttgctggagcttcaagtaagattgctccagtggaagcaccagatgctaaggtgaggatggtgatgatcgctggatcaccagaggctcggttcaaggctcagggaagaatttatggaaaaattaaagaagaaaactttgttagtcctaaagaagaggtgaaacttgaagctcatatcagagtgccatcctttgctgctggcagagttattggaaaaggaggcaaaacggtgaatgaacttcagaatttbtcaagtgcagaagttgttgtccctcgtgaccagacacctgatgagaatgaccaagtggttgtcaaaataactggtcacttctatgcttgccaggttgcccagagaaaaattcaggaaattctgactcaggtaaagcagcaccaacaacagaaggctctgcaaagtggaccacctcagtcaagacggaagtaaaggctcaggaaacagcccaccacagaggcagatgccaaaccaaagacagattgcttaaccaacagatgggcgctgaccccctatccagaatcacatgcacaagtttttacctagccagttgtttctgaggaccaggcaacttttgaactccctgtctctgtgagaatgtatactttatgctctctgaaatgtatgacacccagctttaaaacaaacgaacaaacaaacaaaaaaag

SEQ ID NO: 12584 - DNA, 1998 bp, Homo sapiens
  SIMILAR (3)..(1469): 311254mologous to Herpesvirus papio NTR,accession number AF200364,Smith-Waterman Score=247.
gtatcttgaaggacgccaagatccccgtgtcgggacccttcctggtgaagattggctacgcgttcgtggactgcccagacgagatctgggccctcaaggccattgaggcgctttcaggtaaaatagaactgcacgggaaacccatagaagttgagcactcggtcccaaaaaggcaccaccgtaaagaaaatgcaggggctgctgagaagtcgattactatcctctctactcctgaaggcacctctgcggcttgtaagtctattctggagattatgcgtaaggaaactcaagatgtaaaattcacagaagatgttcatctgtttatcccggctctatcagtcagagccctcatcagcaagcagggccagcacatcaagcagctttctcgctttgctggagcttcaagtaagattgctccagtggaagcaccagatgctaaggtgaggatggtgatgatcgctggtgttgtcccttgtgaccagacacctgatgagaatgaccaagtggttgtcaaaataactggtcacttctatgcttgccaggttgcccagagaaaaattcaggaaattctgactcaggtaaagcagcagcaacaacagaaggctctgcaaagtggaccacctcagtcaagacggagtttcgtggaagacaatgtttccgtggaagaggggggagtgcagggagggaaaatgtttggggatgaagctgttccacctcagatcatcagccattggattctcataaggagtgtgcaacctggattcccgcatgcgcagttcacagtagggttccagctcctatgagaatctagtgctcctgtgagaatctagtgctcctatgattggaagaccgtgaatggagagatgggtgaacagaaagagactacagagtcttctaaacaatatgggatgttcccagcaagttcacctaaaggaggagaagtgccagccaggccgtccaactcccgctcctctgtggcccaggtgagtgcttcaacaggaaataaagcagccggttcctgtgttggtcaagtgatctgccggtgtcagaggacgcctggagttccgacgcgtgtcttcgagctcatagagggagttcttctccctttgaagaatcccgagaactgtgtaaagctgtttggcaccttgagacataattctagccacgcaggtggctcagactgtctgatcttgtgatagacacttgatgggaatcctgttgcctttctatgggttcatgtggacatgaaggtgtggaaagagggctcccaggctgcccccatgcggggtttctgttgtttggctaaccgagttaaaagcagtgatgtagataccatggagatagaggcacagacccagcttagccggggagcaaggcagcaaggaggtggtaggagatgtggtgggagaaagggcaccaagtacctggctgtgtgaacccagcttgaaaaagtgggcaccagcaagatttactacaaagagcaaaaaaacaaaccttccacaacgtggaaggggaccagagcaggtaggtctcctggctggggcggcctgcttttattcccttatctggccccacccacatcctcactggcactgccgagggactttgcggcacctagtccaggtactcctgcagcccagagggagctcgtcccccatcaagcccagcaggcgctggccaaccgcgctgagtgcggggcttgccgagccgcgctcacctggaacccgcgccagccagtgagcaccactcgcaaccccagctcccgcccgcgccgctccctccacacctccccaccagcagagagagccggctccggcctcggccagccccagagatgggcccccacagcacagcagcgggctgaagggctcctcgagcgcggccagatcgaggagcgccgccaggttgaggaggtgccgagagcgagccagggctgctagcacgttgttacctctcactttcacgttcaagctctttttggctatgtcctacacatta

SEQ ID NO: 12585 - DNA, 371 bp, Homo sapiens
  SIMILAR (67)..(357): 781254mologous to Homo sapiens putative dienoyl-CoA isomerase,accession number AF030249,Smith-Waterman Score=361.
atggacaaactggaaatcataacacagtgtgacaaattccagggagcagaggactcccagaaaggactgacaggctccaactacccgggactcagtattagccttcgcctcactggctcctctgcacaagaggaggcttccggagtagccctcggtgaagccccagaccacagctatgagtcccttcgtgtgacgtctgcgcagaaacatgttctgcatgtccagctcaaccggcccaacaagaggaatgccatgaacaaggtcttctggaggtctgacctgcagatcctggaggcctgcctgcggggggaggcggggctgcgggactgggtgaaagtggaacgttgtgggaagatggacatgagggcagg

SEQ ID NO: 12586 - DNA, 547 bp, Homo sapiens
  SIMILAR (17)..(151): 441254mologous to Homo sapiens DBC2,accession number AY009093,Smith-Waterman Score=99.
  misc_feature (1)...(547): n = a,t,c or g
tcaacactctgattgcctttcaacctggctacttcatttcattgctactaactacctcatcttcagtcaaaagcctgaatttcaggatctttcagtggaagaacgcagttttgttgaaaagcacagatggccgtcgaatatgtacttgaagccagcttgcggaattncagggaggtatattcactcccggaaatgtcgttgcttagtaatgtaaccctggagcttttatacactacattttcttttttattatttatgaagaatgggatacctccaggttccagtaaaattcttctgaccgaaaccaatgtgggtgttagaaaaattacccatatagcttaatatgtttattagttctctttggaaaaaaactaccactgtggtcttaaaagggagcaaaatataccataggctaaaactaaggctttcactctagaatgcaaagctgttttgcagctgttttcccttaaaagatgtcctgttgctttagtgatatttagacccctctcgagttaagaaatgcttaggttaaaaaaaaaaaaaaaaa

SEQ ID NO: 12587 - DNA, 561 bp, Homo sapiens
  SIMILAR (324)..(431): 911254mologous to Homo sapiens KIAA0878 protein,accession number AB020685,Smith-Waterman Score=180.
atggacaaactggaaatcataacacagtgtgacaaattccagggagcagaggactcccagaaaggtgaacttgttttaacattgctcaccatcatctactacacagatacaggtgcagttattgaagtccgtggcttcagattaaaagctcaaattaaatcttcaagaacctcagatgcagccatgcattgcttaaagacgtttggccactccggcagccgtagattgttattcgctgttggcctggcttcttccgagaatgtacttttaacgttatttgctaatagtgctccctcatcctgtctgctgtcacagtatactgaaagctgcatcagtttcaccactctgattgcctttcaacctggctacttcatttcattgctactaactacctcatcttcagtcaaaagcctgaatttcaggatctttcgagtagtttcaagggtacatcgaacggttcgtctagttttcaaagcaatttcaggcagtgaaagcaacctgaggccctcacaaggagcagatgttggcaccatgcttcttatacagcccacagaaccatga

SEQ ID NO: 12588 - DNA, 894 bp, Homo sapiens
  SIMILAR (4827)..(2485): 871254mologous to Homo sapiens putative p150,accession number U93572,Smith-Waterman Score=3431.
aaagccagctgttttcaacccacagataaggggattcttttgttcctggctcagtatcaaaggatgtctaaaaaggtgaatcttcagaagaaaggattgtctgaaattattaaatgttatgaggcactgccagctgtaatttctccctctcttcttcccacagactttcagaaagttttggtatcctacattggattaaagggtctttacttcacgggatatttgctgtttggcctggggacgggatttattgggctcttcccgaatgtctactccaccctggtcctgtgcagcctgtttggtgtaatgtccagcaccctgtacactgtgccctttaacctcattactgagtaccaccgcgaggaagaaaaggagaggtacaatgaaccccccaccaaacatgaaggtgcctctgacccttccaagtccaataaactgctgactgttaggcttaaaagaataaaacaacaacaacaaattgtccaccagaacgcttccaatgcttcctacaataacatgagttcagaaattcataaagagaagcagccagctgtggtcagtgagacaggacaggaaaaaggtgtatcccgttatccttccctggtgatgcttgattgttgccgttggcactacactgaccggtttacctggttctacctgggggaaataggccacctgcgatacccggaaggtgtgccgcgggtaaacactcaaaacagcacaccacaaaacacaatacacccaaacatgaacgccacacaacttaagacgccaccacacgcgaacacagtattcttaacccctctgcgttccgggttcaacacccccgtggccgcgactacccgactgatacttcggcttggtattgccgctcagattgttagggttgtatga

SEQ ID NO: 12589 - DNA, 1869 bp, Homo sapiens
  SIMILAR (1180)..(368): 321254mologous to Leishmania major L8453.1,accession number AC008054,Smith-Waterman Score=245.
atgttcacgtccaagtccaactcggtgtcgccctcgccgtccctggagcaggctgactcggacgccctggatatcagcaccaaagtgcagctctacggcgtgctgtggaagaggcctttcggcaggccgtcggccaagtggtcccggcggtttttcatcatcaaagagagctttctgctttactactctgagagcgaaaaaaagagctttgaaaccaataaatacttcaatatacatcctaagggcgtcatccctctggggggctgcctggtggagcccaaggaagagcctagcatgccctatgccatgaagatctcccaccaggacttccatgggaacatcttgcttgctgctgagtcggagtttgagcagacccagtggctggagatgctgcaggagtctgggaaggtgacctggaagaatgcccagctgggagaagccatgatcaaaagcctggaggcccaggggctgcagttggctaaggaaaagcaggagtatttagacaaactgatggaagagaccgaagaactctgccttcagagggagcagagagaggagcttgagcgccttaaccaggtgctggaggccgagaagcagcagttcgaggaggtggtgcaggagctgagaatggagcaggagcagatcaagagggagctggaactgactgcaagatgccttaagggtgtagaacaagagaaaaaggaactgaggcacctcacggagtccttgcagcagacactggaggaactctccatagagaagaagaaaaccctggaaatgctggaggagaacgagaaccacctgcagacactggccaatcagagtgagcagccccctcccagtgggggcctccatagcaacctccggcagatcgaggagaagatgcagcagctcttagaggagaagctcctggcagagaagcggatgaaggagaacgaggagcgctcacgggccctggaggaggagcgtgagttctactccagccagtcccaggcactgcagaactcgctgcaggagctgacggcagagaagcagcaggctgagcgggagctcaaggctgaggtgaaggtccgcatggacctggagaggcgtctccgggaggcagaaggggccttgcgaagcctggaacaggggctgaattccaaggtgcggaataaggagaaggaggagaggatgcgggctgatgtgagccatctgaaaaggttctttgaggagtgcatccggaatgccgagctggaggccaagatgcctgtgatcatgaagaactccgtgtacatccataaggcagccactcgccgcatcaagagctgccgcttccaccgacgccggtccagcacctcctggaatgacatgaagccgtcccagtccttcatgacctcccagctggatgccaacaacatggaggagctaaaggaggtggccaagcggctcagcagggaccagcgcttccgggaatccatctaccacatcatggccacccagcctggagccccctcggcactctcccggggtggaaattgcaagatgttcagccatcacatcggcactgatggcaggaagaagtggctgctgctgtctgcgcccgaggacctcatctcctcgcagaggctggctccccgcgccccgcatcccacgctgggacacgcgtgtggccttgccagggtgggcgagacacggccgccttccttcacatccaacgccgcacagacaaagccttgcgggctccacgggataatcaacagcgagaacgcccccagggacctccggaaagagacaccattggttgcaggcctccaggttctcgtctgcctgtgccccactgatgacaccattctgccagtgacgcctggatctcccatggcatcgtag

SEQ ID NO: 12590 - DNA, 372 bp, Homo sapiens
  SIMILAR (2)..(133): 1001254mologous to Homo sapiens SPF31,accession number AF083190,Smith-Waterman Score=235.
  misc_feature (1)...(372): n = a,t,c or g
gaaaaactttgaggaaagtcgagatggtcgtgtggacagctggcgaaacttccaagccaatacgaaggggaagaaagagaagaaaaatcggaccttcctgagaccaccgaaagtaaaaatggagcaacgtgagtgaccgcccaaggtcacaggcacagaacctttcccctgctatctcccttcctgcttcgaaggactcattctttccaaagagctagccgtcctccacccagtaccatgtcctagcctgtctgcatttgttagtggtaatattctttatgtataataaatttttatacccnnnnnnnnnnnnnnnnnnnnntttttttaaaggggccggaacttttttccttttagggggggttattttat

SEQ ID NO: 12591 - DNA, 470 bp, Homo sapiens
  SIMILAR (108)..(353): 1001254mologous to Homo sapiens SPF31,accession number AF083190,Smith-Waterman Score=428.
  misc_feature (1)...(470): n = a,t,c or g
gaggaattcggcacgagctgngccgnggaaatggcggcttcaggagagagcgggacttcaggcggcggaggcagcaccgaggaagcatttatgaccttctacagtgagagctggaaattaaaaggaaagagagagaagccaaagagatgcatgaaaggaaacgacaaagggaagaagagattgaagctcaagaaaaagccaaacgggaaagagagtggcagaaaaactttgaggaaagtcgagatggtcgtgtggacagctggcgaaacttccaagccaatacgaaggggaagaaagagaagaaaaatcggaccttcctgagaccaccgaaagtaaaaatggagcaacgtgagtgaccgcccaaggtcacaggcacagaacctttcccctgctatctcccttcctgcttcgaaggactcattctttccttccacttccaccccaacatagagtagtatttgctttttagg

SEQ ID NO: 12592 - DNA, 1522 bp, Homo sapiens
  SIMILAR (2384)..(3091): 981254mologous to Cloning vector pSacBII SacB,accession number U09128,Smith-Waterman Score=1257.
attcggcatgagggggtcacgtggtggctgggccggggaaatggcggcttcaggagagagcgggacttcaggcggcggaggcagcaccgaggaagcatttatgaccttctacagtgaggtgaaacaaatagagaagagagactcggttctaacttcgaaaaatcagattgaaagactgacccgtcctggttcctcttacttcaatttgaacccatttgaggttcttcagatagatcctgaagttacagatgaagaaataaaaaagaggtttcggcagttatccatcttggtgcatcctgacaaaaatcaagatgatgctgacagagcgcgaaaaggcttttgaagctgtggacaaagcttacaagttgctactggatcaggagcaaaagaagagggccctggatgtaattcaggcaggaaaagaatacgtggaacacactgtgaaagagcgaaaaaaacaattaaagaaggaaggaaaacctacaattgtagaggaggatgatcctgagctgttcaaacaagctgtatataaacagacaatgaaactctttgcagagctggaaattaaaaggaaagagagagaagccaaagagatgcatgaaaggaaacgacaaagggaagaagagattgaagctcaagaaaaagccaaacgcgggaaagagagtggcagaaaaactttgaggaaagtccgagatggtcgtgtggacagctggcgaaacttcccaagcccaattccgaagggggaagaaagagaagaaaaatcggaccttcctgagaccacccgaaagtaaaaatgggagcaacgttgagtgacccgcccaaggtcaccaggcacagaaccttttcccctgctatctcccttcctgcttcgaaggacttcattctttcctcccactttccaccccaacatagggttagtatttgctttttagtccattttgttttcaatacgatttaatatcgatcagagtaattctttttgtacatttgaaatgaggggcttggttttaaaaaaagacctttccctctccctgcccctaggaacaaccagtattaggaaggtgccaccattgggggctggcctttctctttcccaaaggcctggtaactcagtgtttttgtactttcactggatttgtgatggttagaaacttcgtggatagtttgtggaaatcatccaattaaacatactgcttaaaacagtgttgctgtgacttcagagacaagcctggaaggggcaccttaggaagccccttcgcttcagttgctcgcttctgggtgtgctcccttcgaaggcccagataagacagggaacacttgtgagcacacagagcagcatctgatgccctgtggtgtttggcatgtgccccctgtctactgaccaatcagtgtggcatgaggcccacgccacccaaacctttcactttccaaagagctagccgtcctccacccagtaccatgtcctagcctgtctgcatttgttagtggtaatattctttatgtataataaatttttataccc

SEQ ID NO: 12593 - DNA, 1404 bp, Homo sapiens
  SIMILAR (805)..(1041): 551254mologous to Rattus norvegicus nucleoporin p58,accession number U63839,Smith-Waterman Score=222.
atggactgggaaggcagccttcccttggtgtttaattattgcagggatgcctctctgattattcacccacgtttcaaaggtgtcagaccacgcagggacgcctgccttggtccttcacccttagcggcaagtcccgcttttctgggaaaggggcaaaccatcacggacgccgagcttcgggtaactctcacagtggaggactcagcccgcctgcacccaggtgaaataaacagccatgttgctcacacaaagcctgtttggtggtctcttcacacggatgcacgtgaaaccacacacctgcaacgaactcattttcaacaaagctggctagtagtatcaggcccagaatccagcaaagtccacagtcagctcagtcaggacccagacataggctccactaccatagccattcatgtgatgggcacaactaggacagaggtggttgccaatacctcttctccaaaaccctcgctggccaacacacaagcagctgatcatccagaggagcacgctggcagaagagcacaccgacaggcacgggcacgctggcaggccatccaccggtgggatgaggcggagatttccagggcagtcggaggagagccggggctgccaagcacgggggtggcccgactccaggtgaaaaccatctcccctctggcttccccatcttctgagagctacttccactcaataaaaccttgcactcattctccaagcccacgtgtgatcggattctcccagtacaccaaggcaagaaaccctgagatacagaaagcctttctgtccttgcgacaagctattggcagaaaaagtaccagcaaggccacatttggatttggaaaaataaataaaccttcagaaatcttagtgcaagctttggcagctcaaataacatctgcatttaacttcagcaattctggcatcacagtacccgttggttggacatacaggatgtctaatcctgtctctgtaggttttggaacaggagggcagctctttcagttgaagaaacctccaactggaaacaaaacaagaaaaatgatggcctgccagtgtctgcgaatgtctgctggtgtattcttccgctggtgtgttcttccgctgggagacttcaggaagcttacactcatggtggaaggtgaagagggagcaggcacattccatgatgaaagaagcaatgggtggaatgtagtcagtttgaatgagtggagttcactcttacaggcgaaggagtggccagctgattctggccttcacacactccagtttccaccttgttcgttcatgcaccacctcccacaaagagttgagagctgcggactgagtaagccaggcacccctgttgtgagtcccacgagagggtcagggaaatatcctgcttcactgatacagcaggattaa

SEQ ID NO: 12594 - DNA, 654 bp, Homo sapiens
  SIMILAR (9)..(131): 871254mologous to Homo sapiens calbindin D28K,accession number S46006,Smith-Waterman Score=193.
gatcaggggacctccctcgggagatcaatcccctgtcctcctgctctttactccatgagagagatccacctacgacctcgggtcctcagaccaaccagcccaaggaacatctcaccaattttaaatcgggtatacatccagatggcctgaagtaactgaagaatcacaaaagaagtgaaaatggcctgttcctgccttagctgatgacattaccttgtaaaattccttctcctggctcatcctggctcaaaatctcccccattgagcaccttatgacccccacccctgccagccagagaacaaccccctttgactgtaattttccattacctacccaaatcctataaaatggccccacccctatctcccttcactgactctcttttcggactcagcccgcctgcacccaggtgaaataaacagccatgttgctcacacaaagcctgtttggtggtctcttcacacggatgcacgtgaaaccacacacctgcaacgaactcattttcaacaaagctggctagtagtatcaggcccagaatccagcaaagtccacagtcagctcagtcaggacccagacataggctccactaccatagccattcatgtgatgggcacaactaggacagaggtggttgccaatacctcttctccaaa

SEQ ID NO: 12595 - DNA, 4275 bp, Homo sapiens
  SIMILAR (202)..(639): 1001254mologous to Homo sapiens dJ310O13.2.1 (novel protein similar to human putative proteins (isoform 1)),accession number AL031658,Smith-Waterman Score=774.
ctgcagtggatggtaaagtcacgggtcattagcgagctacaggaggcctgctgggacatggtatctgccatggcggcgactgcggcaaagcgagagcctcggagacgccgctgccgccagcacagccggagatctgagccgacactgggggcagtccgcgagccccgcactctctcgatgagtcggagaagtcccgttgtatcagagtaagatggacggtagctttgattgtgattgtggtgagctggagccacctgatcactaacaaaagacatcttctgttaaccaacagccgccaggcttcctgttgaaataaatatatagcaacaaaggaaaaaaagaagcaaaacggaaatagtgcttaccagcaccttagaatgatgctgctcaggaccagtccaacactgaatgtatctgcactgtgaggagaatgttcatagaagcctgttgtgtgcatatttattcacatttttgttaaatgttaaatcgtttagcacggtaatctgagtgcacagtatgtcatttcattccgtttgagtttcttgttttcgttaaatgtctgcagagttgctgcccctttcttgaactatgagtactgcaatctttttaattctcaatatgaatagagctttttgagctttaaatctaaggggaactcgacaggcctgtttggcatatgcaatgaacatcaagaaaccatcttgctgtggaagcataattatttttcttctccctttttgaaagatctttccttttgatgccagttttcttccttgtttacacaagttcaatttgaaaggaaaaggcaatagtaagggtttcaaaatggcagagaaatttgaaagtctcatgaacattcatggttttgatctgggttctaggtatatggacttaaaaccattgggttgtggaggcaatggcttggttttttctgctgtagacaatgactgtgacaaaagagtagccatcaagaaaattgtccttactgatccccagagtgtcaaacatgctctacgtgaaatcaaaattattagaagacttgaccatgataacattgtgaaagtgtttgagattcttggtcccagtggaagccaattaacagacgatgtgggctctcttacggaactgaacagtgtttacattgttcaggagtacatggagacagacttggctaatgtgctggagcagggccctttactggaagagcatgccaggcttttcatgtatcagctgctacgggggctcaagtatattcactctgcaaatgtactgcacagagatctcaaaccagctaatcttttcattaatacggaagacttggtgctgaagataggtgactttggtcttgcacggatcatggatcctcattattcccataagggtcatctttctgaaggattggttactaaatggtacagatctccacgtcttttactttctcctaataattatactaaagccattgacatgtgggctgcaggctgcatctttgctgaaatgctgactggtaaaaccctttttgcaggtgcacatgaacttgaacagatgcagctgattttagaatctattcctgttgtacatgaggaagatcgtcaggagcttctcagcgtaattccagtttacattagaaatgacatgactgagccacacaaacctttaactcagctgcttccaggaattagtcgagaagcactggatttcctggaacaaattttgacatttagccccatggatcggttaacagcagaagaagcactctcccatccttacatgagcatatattcttttccaatggatgagccaatttcaagccatccttttcatattgaagatgaagttgatgatattttgcttatggatgaaactcacagtcacatttataactgggaaaggtatcatgattgtcagttttcagagcatgattggcctgtacataacaactttgatattgatgaagttcagcttgatccaagagctctgtccgatgtcactgatgaagaagaagtacaagttgatccccgaaaatatttggatggagatcgggaaaagtatctggaggatcctgcttttgataccaattactctactgagccttgttggcaatactcagatcatcatgaaaacaaatattgtgatctggagtgtagccatacttgtaactacaaaacgaggtcatcatcatatttagataacttagtttggagagagagtgaagttaaccattactatgaacccaagcttattatagatctttccaattggaaagaacaaagcaaagaaaaatctgataagaaaggcaaatcaaaatgtgaaaggaatggattggttaaagcccagatagcgctagaggaagcatcacagcaactggctggaaaagaaagggaaaagaatcagggatttgattttgattcctttattgcaggaactattcatcttatgttcccagcatgagcctactgatgttggggagtaaattaaatgacttgaatagctcagtgtcccaactagaattgaaaagtttgatatcaaagtcagtaagccaagaaaaacaggaaaaaggaatggcaaatctggctcaattagaagccttgtaccagtcttcttgggacagccagtttgtgagtggtggggaggactgttttttcataaatcagttttgtgaggtaaggaaggatgaacaagttgagaaggaaaacacttacactagttacttggacaagttctttagcaggaaagaagatactgaaatgctagaaacttgagccagtagaggatgggaagcttggggagagaggacatgaggaaggatttctgaacaacagtggggagttcctctttaacaagcagctcgagtccataggcatcccacagtttcacagtccagttgggtcaccacttaagtcaatacaggccacattaacaccttctgctatgaaatcttcccctcaaattcctcatcagagcgataaacaggcagcattctaaacaaactgaattaaaacactcagcagacatttatctttgtattcttcatgaaatgtgttttgtcttttttttttattactagtgtttaagtcattttttacttgaatcagatggtgtcatttagtaaggattttatgagttcttgttttttaaaatccagactttctttttctacatgtgagatagttttcattttaactggcatgtcatttgcacacaaaaataaagactagagcaaaataatgcaacgcaggaggagaaaagaaatgcactaagacaagaacattctctcatagaacattgatctgttttacaggaaacaaaccttgccttgaaatttacacagtgagactgtacataattgcatgaaaatagctatttttttcctaagacatttttcattcatgaatattttcaagtttttcatactgtacacatttcttaaaacacatgataccagcagcaactgaaaatgaatgccgaatttggtacacatgtgttatctacctcaaggtaacaagagtatgtggcaaaacatataccacccatagtgcttcacaaaatgcacttctatttagccagcgtttattgtagtaaactattcttaataaaactcactcactgtttataaatgttctggtatgcattctttatagtgaagtgttaatacatcacatcttatttattttagcaaatcagtatattttctgtatttaattataaaaaattaacttagtttttaaaatttatttgcaaatatactttttccatttggcactatggtttgttgcctacctagctgcatctataatgtcagcttatcctaaggctgtccacgtacttaatttacttaagtgttcattttaagtaacgtgctcactgtgtataggaatttgtattttggaggtgcttgatctatctacaaaagaaaaaattaattaggaattactttattataaaatgctcctagaagtcttaattgtgtttattttttaaaaaaacaaatgttagacttgtgtgcatggaagtaattaaggtacatcattattgtagtttgaaagttgtacatgataagacattttgtttttactgtatgtttttactgaatgatctattccccatcccaaggcaagcatgaataaaattaggttaaacgtagcatgtggcatcgcagtctcttagaatttgtttcatctattttattttattgaatactgtctgtatctttggttatcctgtttgaagaaaaaggacaaataaaacatggccagcaaatacaaaaaaaaaaaa

SEQ ID NO: 12596 - DNA, 1560 bp, Homo sapiens
  SIMILAR (87)..(356): 941254mologous to Homo sapiens put. HMG-17 protein,accession number X13546,Smith-Waterman Score=444.
atgtggaatgctgtgaccctctggcagcagcgtgaatcatgcattgaagaggaatcagagataggaacactagagacaaaggagacacattttatccgtggacccaaaactctggctccggtcacggactgggaaggcagccttcccttggtgtttaatcaatgcagggacgcctctctgattatacacccacgtttcaagggtttcagaccacgcagggacgcctgccttggtccttcacccttagcagcaagtcctgcttttctggggaaggggcaagctgctcctcgccaggccgagctaggtcccaattcttcctcagcctctgctcctccaccctacaatccttttatcacctcccctcctcacacctggtcaggcttacagtttcattccatgactagccctccccctcctgcccagcaatttcctcttaaaaaggtggctggagctaaaggcatagtcaagcggctgaagactgacactgcccgattgccttggaagcccccagaccatcatagacgccgagcttcgggtaactctcacagtggaagggtacagcctccctcccggctgccttcgtgggctcatgttgagtgtctcaggcttttccaggagcacggtgcaagctgtcagtggatctaccgttctgggatctggaggacagtggttttcatgtgcgtccgtgtgaagagaccaccaaacaggctttgtgtgagcaatatgggctgtttatttcacctgggggcaggcgggctgagtccgaaaagagagtcagtgaagggagataggggtggggccgttttataggatttgggaaggtaatggaaaattacagtcaaagggggggtttttctctggtgggcaggggtgggggacacaaaggtgctcagtgggggtgctttttgagccaggatgagccaggaagaggactttcacaaggtaatgtcatcagttaaggcaaggaccggccatttacacttcttttgtggtggaatgtcatcagttaaggcggggcaggggcccttttcagttcttttgtgattcttcagttacattcaggccatcatggatgtatacatgcaagtcacaggggatgcagatggcttggcttgggctcagaggcatgacattactgaattattatattaataagaaaaataaaacaaaatagtgttgaagtgttggggtggcgaaaatttttggggggtggtatggagagagaatgggcgatgtttctcagggctgcttcaagcgggattaggggcagcgtgggaacctagagtgggagagattaagctgaagggaggtcttgtggtaaggggtgatattgtggggatgttagaagaaacatttgttgtatagaatgataggtgatggcctggatacagttttgtatgaattgaaaaactaaatggaataagagaaggagaaaaacaggtataaaaggactaagaattgggaggacctaggacatctaattagagagtgcctaaggagattcagcatagtcctgccagcaaagattatttatttacttcaagagttaagagggaattc

SEQ ID NO: 12597 - DNA, 1485 bp, Homo sapiens
  SIMILAR (550)..(723): 931254mologous to Homo sapiens put. HMG-17 protein,accession number X13546,Smith-Waterman Score=277.
ggagtaaactcacgaaatcctcgaagacctccgcctagttctgttaatacaggaggcatcacagagatcatggcagaaggaggtgaattagagtttgttaaaaggatcatccatgacagtctacaacttaaaaaaagattaaggattgatatggcagccttgttgattggtgtctgctctgaggtctcagggagaaaagattggatccagcagcttgcgccacgatggtatagctgcatgctgggaaagaaatgcagcctggcgcctctgaaggaggagcttcgcatacaaggggttcccaaagtaacgtacactgaattctgtcaaggtcggacaatgagatgggccttagcttggagtttttatgatgatgtcacagtaccagtacacgaaggacgtttagcagttggaggagttacatctgatagccagaacaaaggcagtgcgtcaccaccaagtaagcgaagaaaattagagaaaccgagaaaacccataacattcgtggtgctggcgtccgtgatgaaggaattatccctcaaagcatcacctctgcgctcggagacggcggaaggcatagtcgttgtcacgacatggattgaaaaaattctcactgatttgaaggtccagcataaacgagttccctgtggaaaagaggaagtcagccttttcctaacggccatagaaaactcctggattcatttaaggagaaagaaaagagagcgtgtgagacagctgagagaagttccccgagctcctgaggacgtcattcaggccttggaagagaaaaagcccacccccaaagagtctggcaatagccaagaactggccaggggcccccaggagaggaccccctgtgggcctgctctgcgggaaggcgaggctgccgctgtggagggcccgtgcccgagccaggagtccctgtcccaggaggaaaacccggaacccacggaggatgaaaggagtgaggaaaagggaggggtggaggttttggaaagttgtcaaggctctagcaacggagcccaggaccaagaggcttctgagcagttcggcagcccagtggctgaaagggggaaacgtctcccaggagtggccggacagtacctgtttaagtgtttgataaacgttaagaaggaggtggacgatgccttagtggagatgcactgggttgagggccagaacagggatctgatgaaccagctttgcacctacatacgggagcaagaggcaggaaagagcacagacttcgacgttcagacctgggttcccgtccagttccattccttgcacaggggtccttcccacctcttaagggaggagtccgaaggagtctacccatgggcctgcttgctctttctcccactgctggctgacctcatccacgccagtttcttcaaccactcctcatacattcattgtgcccagatccagacccatcctgaacttccagcatcctcattcctcacccgccggcccatggccgtgtga

SEQ ID NO: 12598 - DNA, 927 bp, Homo sapiens
  SIMILAR (1)..(669): 931254mologous to Homo sapiens putative p150,accession number U93563,Smith-Waterman Score=1068.
actgggacctcatctatgtgggccggaagcggatgcaggtggagcaccccgagaaggctgtgcctcgcgtgaggaacctggtggaggccgactattcctactggaccctggcctacgtgatctccctgcaaggcgcccgcaaactgctggctgctgagccgctctccaagatgctgcctgtggacgagttcctgcccgtcatgttcgacaaacacccagtgtccgagtacaaggcccacttctccctccgcaacctgcatgccttctctgtggagccgctgctcatctaccccacacactacacaggagacgatggctatgtgagtgacaccgagacctcagtcgtatggaacaatgagcacgtcaagaccgactgggaccgcgccaagtcccagaagatgcgggagcagcaggcactgagccgtgaggccaagaactcggacgtgctccagtccccactggacagtgctgcccgggatgaactctgagggttagcagccagaaagccaaagcagccatcggtggcccaggctccacgtgcttactgaggactatcagggccaacctctggacccccttggcaggccacagagggctctcgtgtggggtggtgtccagccagctcttgctaagcaatcacgtgcacacaggcagcattaatggagtgcctactgcatgccagcaatcagggcttggccctggggaattgggaggaaccaagccctcttcatctgttcatgtgcccagcatttattaagcacctgctgtatgcaaggttcccatgttacggcagtgaatgaggcataattgttccctccatcagcgattgattcagtcatcaagcagttactgatcagattaagaatcagggcactagtgatacacattcatttttaaaattcattcaaggatttaaaaaaaaaaaaa

SEQ ID NO: 12599 - DNA, 239 bp, Homo sapiens
  SIMILAR (2)..(112): 911254mologous to Homo sapiens CGI-27 protein,accession number AF132961,Smith-Waterman Score=173.
gaagaatggaatgaatatgagtttctcgttttcgaattatgcccagtcgagccagtttagaacctggcaagacagttcagtgagttatgcagctggagcactcacggtccactgaagctctgaatcctcatactctgtccggggccccagcctagcctttaccacgatactggccctggtttggggggattctgaacctcacactaatagacttctctcttcttctagtaggtgtagtc

SEQ ID NO: 12600 - DNA, 1259 bp, Homo sapiens
  SIMILAR (574)..(1395): 731254mologous to Homo sapiens putative p150,accession number U93564,Smith-Waterman Score=979.
atgtccaaccgagtggtctgccgagaagccagtcacgccgggagctggtacacagcctcaggaccgcagctgaatgcacagctagaaggttggctttcacaagtacagtctacaaaaagacctgctagagccattattgccccccatgcaggatatacgtactgtgggtcttgtgctgcccatgcttataaacaagtggatccgtctattacccggagaattttcatccttgggccttctcatcatgtgcccctctctcgatgtgcactttccagtgtggatatatataggacacctctgtatgaccttcgtattgaccaaaagatttacggagaactgtggaagacaggaatgtttgaacgcatgtctctgcagacagatgaagatgaacacagtattgaaatgcatttgccttatacagctaaagccatggaaagccataaggatgagtttaccattattcctgtactggttggagctctgagtgagtcaaaagaacaggaattcggaaaactcttcagtaaatatctagcggatcctagtaatctctttgtggtttcttctgatttctgccattggggtcaaaggttccgttacacgttactatgatgaatcccagggggagatttattgatccattgaacatctagataaaatgggtatgagtattatagaacaattagaccctgtatcttttagcaattacttgaagaaataccataatactatatgtggaagacatcccattgggggtgttattaaatgctatcacagagctccagaagaatggaatgaatatgagtttttccgtttttgaattatgcccagtcgagccagtgtaagaaactggcaagacagttcagtgagttatgcagctggagcactcacggtccactgaagctctgaatcctcagggatgccacctgcacattcttcatactctgtccgggggtcccagcctaggccttttaccacgatacttggtcctggtttggggggattctgaaaccctcaaactaaattagaacttttcttccctttttttttctaagtaggtgtaagtcccttcccctaatttcaactccattaaaaaaatggctttatagttttaggggccagttggaagggaagggctgggcatcaaaataattttggatccaaaaaaggatgacaatggtaaaggctccagttggtgggcagacagttttttgaaagtaacttgtaaagcatttaccatatcctaaatttggcactccttt

SEQ ID NO: 12601 - DNA, 239 bp, Homo sapiens; identical to SEQ ID NO: 12599
  SIMILAR (2)..(112): 911254mologous to Homo sapiens CGI-27 protein,accession number AF132961,Smith-Waterman Score=173.

SEQ ID NO: 12602 - DNA, 1259 bp, Homo sapiens; identical to SEQ ID NO: 12600
  SIMILAR (1)..(600): 991254mologous to Homo sapiens CGI-27 protein,accession number AF132961,Smith-Waterman Score=1064.

SEQ ID NO: 12603 - DNA, 915 bp, Homo sapiens
  SIMILAR (1238)..(2068): 871254mologous to Homo sapiens putative p150,accession number U93563,Smith-Waterman Score=1201.
atgcgaccgacgctgctgtggtcgctgctgctgctgctcggagtcttcgccgccgccgccgcggccccgccagtatttcttgaagagaacaatttcctggttatggctgaggaatcagaaaatgcctttttatttctcatctgcaaggtgatggagagatgggagatggtgaacaggcgtgtggagggcggaataatggtccccaaagatgtccacgccctcatcctcagagtccgtgaacctgggaatgtgctgcctgacgtacaaaagggactccgcagataccctctttcccagctgcccgctcctcagcacccgaagattcgcctgtacaacgcagagcaggtcctgagttgggagccagtggccctgagcaatagcacgaggcctgttgtctaccaagtgcagtttaaatacaccgacagtaaatggttcacggccgacatcatgtccataggggtgaattgtacacagatcacagcaacagagtgtgacttcactgccgccagtccctcagcaggcttcccaatggatttcaatgtcactctacgccttcgagctgagctgggagcactccattctgcctgggtgacaatgccttggtttcaacactatcggaatgcctccactgagcttcagcaagtcatcctgatctccgtgggaacattttcgttgctgtcggtgctggcaggagcctgtttcttcctggtcctgaaatatagaggcctgattaaatactggtttcacactccaccaagcatcccattacagatagaagagtatttaaaagacccaactcagcccatcttagaggccttggacaaggacagctcaccaaaggatgacgtctgggactctgtgtccattatctcgtttccggaaaaggagcaagaagatgttctccaaacgctttga

SEQ ID NO: 12604 - DNA, 156 bp, Homo sapiens
  SIMILAR (1)..(72): 1001254mologous to Homo sapiens interferon-gamma receptor chain 2,accession number U68755,Smith-Waterman Score=119.
atgcgaccgacgctgctgtggtcgctgctgctgctgctcggagtcttcgccgccgccgccgcggccccgccagtatttcttgaagagaacaatttcctggttatggctgaggaatcagaaaatgcctttttatttctcatctgcaaggtgatggag

SEQ ID NO: 12605 - DNA, 2215 bp, Homo sapiens
  SIMILAR (1396)..(3024): 951254mologous to Homo sapiens putative p150,accession number U93564,Smith-Waterman Score=2710.
gttgactggaggcggaggttgcagtgagccgagatcgccccactgcactccagcctggtgactccgtctcaaaaaaaaggggaggggggcgggggagagttgaaagcttaatatgtactttgggggctattaaagcaaacatttcgactaaaggggcgaatcctcgaattgtgcgatcaagcacccgagaggagagttggggggggtcaggaggggtgggggctccagggaacgcccgggggcctgggccggggtctcgcggggcccttccggaaggatcgcggcccccgaaggtgggcgtcccgcggggctccagtctccaggacgttccgggaggctccgcgctctgggaggccggctgcgtggggtccccgcgctgcagccgcagaggccccccagggccgcggttcccggagcgggaaagtcccgcgcgggggcggtggcctcgggggcgggacggggcgggggcgggggcgcgggcggccgagccgaatcccctccaccgggacgccccgctgccgctcgggaagaggcgggccctgcgcgccctgcgctcgccatggcggtttgggcggcgacgtgagcggctccgcggaccccgagcggggccccggccgcgacctgagccgccgccgagcgcccggggccatgcgaccgacgctgctgtggtcgctgctgctgctgctcggagtcttcgccgccgccgccgcggccccgccagaccctctttcccagctgcccgctcctcagcacccgaagattcgcctgtacaacgcagagcaggtcctgagttgggagccagtggccctgagcaatagcacgaggcctgttgtctaccgagtgcagtttaaatacaccgacagtaaatggttcacggccgacatcatgtccataggggtgaattgtacacagatcacagcaacagagtgtgacttcactgccgccagtccctcagcaggcttcccaatggatttcaatgtcactctacgccttcgagctgagctgggagcactccattctgcctgggtgacaatgccttggtttcaacacttatcggaatgtgactgtcgggcctccagaaaacaattgggtgaccccaggagaaggctccctcatcaataggttctcctcttcctttgacatcgctgatacctccacggcctttttttgttattatgtccattactgggaaaaaggaggaatccaacaggtcaaaggccctttcagaagcaactccatttcattggataacttaaaaccctccagagtgtactgtttacaagtccaggcacaactgctttggaacaaaagtaacatctttagagtcgggcatttaagcaacatatcttgctacgaaacaatggcagatgcctccactgagcttcagcaagtcatcctgatctccgtgggaacattttcgttgctgtcggtgctggcaggagcctgtttcttcctggtcctgaaatatagaggcctgattaaatactggtttcacactccaccaagcatcccattacagatagaagagtatttaaaagacccaactcagcccatcttagaggccttggacaaggacagctcaccaaaggatgacgtctgggactctgtgtccattatctcgtttccggaaaaggagcaagaagatgttctccaaacgctttgaaccaaagcatgggcctagcccactggctccctggaagagatcaagccatcggagctgctagagttctgtctggactttccagagaccagtattcccttttgctgcctctaaaaggcctgtccctgcagacatgagagacagcaggtctcatgggggtgacaagcttttttttttttttcttaaagaattttcaaaatcaaattccagaatgattttacggagatatcccaggaaaattaaggcttctcttaaacactaaaaaggcatgtaattgcttgttagcaaaatggatatgacacatctctgatacttttttcattattggttgggctgagcagtcagaagacctggtcgtcgtcttgactttggcaaatgagccggagccccttgggcaggtcacacaacctgtcccagcgagggacactgagtggcccttcatgtacatccatggtgtgctggcttaaaatgtaattaatcttgtaaatatactcctagtaatttaagattttgtttttaaactggaaataaaagattgtatagtgcatgtttttt

SEQ ID NO: 12606 - DNA, 415 bp, Homo sapiens
  SIMILAR (196)..(414): 1001254mologous to Homo sapiens putative protein kinase NY- REN-64 antigen,accession number AF155118,Smith-Waterman Score=381.
tttcgtagcagcccgcgcccgggcaggaatagaatatgaacaaacccataacaccatcaacatatgtgcgctgcctcaatgttggactaattaggaagctgtcagattttattgatcctcaagaaggatggaagaagttagctgtagctattaaaaaaccatctggtgatgatagatacaatcagtttcacataagatgctgttcccaaaactgctaatacactaccttctaaagaagctataacagttcagcaaaaacagatgcctttctgtgacaaagacaggacattgatgacacctgtgcagaatcttgaacaaagctatatgccacctgactcctcaagtccagaaaataaaagtttagaagttagtgatacacgttttcacagtttttcattttatgaattgaagaatg

SEQ ID NO: 12607 - DNA, 405 bp, Homo sapiens
  SIMILAR (114)..(296): 831254mologous to Homo sapiens Human cancer associated antigen precursor from clone NY-REN-64,accession number Y92347,Smith-Waterman Score=261.
tcatgcaggacattttggttttgcaaaactttgcttgtgtgcatgctgcttgggatgtacttcttcataaaggaagtctgcagtcaactcatccccattgtctatctcgatttttaaggagatttgaagcattacttcaaactggaaaaagtcccacttctgaattactgtttgactggggcaccacaaattgcacagttggtgatcttgtggatcttttgatccaaaatgaattttttgctcctgcgagtcttttgctcccaggtaaacttgagcatcccaaaaacctgcagccatgcccttgcttttgactgtctgcttttgctttaattggaccactgccactttgggggagccattgctttgattgtgctttaggatcatactcgtaaagtcatgtttcat

SEQ ID NO: 12608 - DNA, 1128 bp, Homo sapiens
  SIMILAR (790)..(1008): 751254mologous to Homo sapiens putative protein kinase NY-REN -64 antigen,accession number AF155118,Smith-Waterman Score=288.
atgagcctattttcaagattagtgaaatacaacttgagccaaataattttcccaaaaaaccaaaaactagatcttcaaaatctgtccttagaagatggaagaaaccaagaagttcatactttgattaagtacactgatggtgaccaaaatcatcagtctggttcagaaaaggaagatactatcgttgatggaacttccaaatgtgaagaaaaagctgatgttttaagctcctttttggatgaaaaaactcatgagttactgaataattttgcctgtgatgtaagagagaagtggctttctaaaacagagctaattggactacctcctgaattctcaataggcagaatccttgacaaaaaccagagggctagtttacacagtgccattaggcagaaatttccatttttagtaactgtaggaaaaaacagtgaaattgttgtaaaaccaaatcttgaatataaagaactttgtcatttggtatctgaagaggaagcatttgacttttttaaatatttggatgcaaagaaagaaaattccaaatttacctttaaacctgatacaaacaaagaccacagaaaagctgtccaccattttgtcaacaaaaagtttggaaaccttgtggaaaccaaatctttttctaaaatgaattgcagtgctggtaatccgaatgtggtggtaacagtaagatttcgggaaaaagcacacaaactagacagcactaaaatctctgttcaacccttcccactgtgtcggaattggtgggttcttggtctcactgacttcaagaatgaagccgcggaccctcgcagtgaaagttatggtcccaaacattgtggttttcacagtttttcattttatgaattgaagaatgtcacaaataactttgatgaacgacccatttctgttggtggtaataaaatgggagagggaggatttggagttgtatataaaggctacgtaaataacacaactgtggcagtgaagaagcttgcagcagccttggcagtgagatgcgtcagagctgttggagtcagggtgctggcggtcttctgcagcaggggcacctgtcctgagatcaaatgtctgcactggctgaagggcatggtcacaaaccagactaaaccctaa

SEQ ID NO: 12609 - DNA, 1668 bp, Homo sapiens
  SIMILAR (3235)..(5697): 901254mologous to Homo sapiens putative p150,accession number U93569,Smith-Waterman Score=3800.
atgaacaaacccataacaccatcaacatatgtgcgctgcctcaatgttggactaattaggaagctgtcagattttattgatcctcaagaaggatggaagaagttagctgtagctattaaaaaaccatctggtgatgatagatacaatcagtttcacataaggagatttgaagcattacttcaaactggaaaaagtcccacttctgaattactgtttgactggggcaccacaaattgcacagttggtgatcttgtggatcttttgatccaaaatgaattttttgctcctgcgagtcttttgctcccagatgctgttcccaaaactgctaatacactaccttctaaagaagctataacagttcagcaaaaacagatgcctttctgtgacaaagacaggacattgatgacacctgtgcagaatcttgaacaaagctatatgccacctgactcctcaagtccagaaaataaaagtttagaagttagtgatacacgttttcacagtttttcattttatgaattgaagaatgtcacaaataactttgatgaacgacccatttctgttggtggtaataaaatgggagagggaggatttggagttgtatataaaggctacgtaaataacacaactgtggcagtgaagaagcttgcagcagtaagttatattttcaggaataaaaagaaagagttgcttcatagtgtgccctataatagtgcaaatatcttactggatgaagcttttactgctaaaatatctgactttggccttgcacgggcttctgagaagtttgcccagacagtcatgactagcagaattgtgggaacaacagcttatatggcaccagaagctttgcgtggagaaataacacccaaatctgatatttacagctttgaccatcaagcaactatcgttgatggaacttccaaatgtgaagaaaaagctgatgttttaagctcctttttggatgaaaaaactcatgagttactgaataattttgcctgtgatgtaagagagaagtggctttctaaaacagagctaattggactacctcctgaattctcaataggcagaatccttgacaaaaaccagagggctagtttacacagtgccattaggcagaaatttccatttttagtaactgtaggaaaaaacagtgaaattgttgtaaaaccaaatcttgaatataaagaactttgtcatttggtatctgaagaggaagcatttgacttttttaaatatttggatgcaaagaaagaaaattccaaatttacctttaaacctgatacaaacaaagaccacagaaaagctgtcccacccattttgtcaacaaaaaagtttggaaaccttgtggaaacccaaatctttttctgaaatgaattgcagtgctggtaatccgaatgtggtggtaacagtaagatttcgggaaaaagcacacaaacgtgggaaaaggcctctttctgaatgccaagaaggaaaagttatatatacagcttttaccctacgaaaggaaaacctggaaatgtttgaagcgattggttttttagctatcaaacttggtgttaattcttcggattttagttatgcaggccttaaagacaagaaagccatcacctatcaagcaatggttgttagacgttttcctccagagaggttgaaaaatattgaaaaaaa

SEQ ID NO: 12610 - DNA, 141 bp, Homo sapiens
  SIMILAR (74)..(136): 851254mologous to Homo sapiens splicing factor U2AF,accession number X64044,Smith-Waterman Score=96.
gggttgtgtccactgtggtccccgactctgccacaagctgttcatcgggggcttacccaactacctgaacgatgaccagtgccacgggctctccaagggctacgccttctgtgagtacgtggacatcaacgtcacggtcag

SEQ ID NO: 12611 - DNA, 1662 bp, Homo sapiens
  SIMILAR (256)..(360): 1001254mologous to Escherichia coli Dipeptide transport ATP- binding protein DppD,accession number D90789,Smith-Waterman Score= 201.
ggcacgaggtcgacctcgtccttgaggcgccagatgaagaacatcgtccacaactactcagaggcggagatcaaggttcgagaggccacgagcaatgacccctggggcccatccagctccctcatgtcagagattgccgacctcacctacaacgttgtcgccttctcggagatcatgagcatgatctggaagcggctcaatgaccatggcaagaactggcgtcacgtttacaaggccatgacgctgatggagtacctcatcaagaccggctcggagcgcgtgtcgcagcagtgcaaggagaacatgtacgccgtgcagacgctgaaggacttccagtacgtggaccgcgacggcaaggaccagggcgtgaacgtgcgtgagaaagctaagcagctggtggccctgctgcgcgacgaggaccggctgcgggaagagcgggcgcacgcgctcaagaccaaggaaaagctggcacagaccgccacggcctcatcagcagctgtgggctcaggcccccctcccgaggcggagcaggcgtggccgcagagcagcggggaggaggagctgcagctccagctggccctggccatgagcaaggaggaggccgaccaggaggagcggatccgtcgcggggatgacctgcggctgcagatggcaatcgaggagagcaagagggagactgggggcaaggaggagtcgtccctcatggaccttgctgacgtcttcacggccccagctcctgccccgaccacagacccctgggggggcccagcacccatggctgctgccgtccccacggctgcccccacctcggacccctggggcggcccccctgtccctccagctgctgatccctggggaggtccagcccccacgccggcctctggggacccctggaggcctgctgcccctgcaggaccctcagttgacccttggggtgggaccccagcccctgcagctggggaggggcccacgcctgatccatggggaagttccgatggtggggtcccggtcagtgggccctcagcctccgatccctggacaccggccccggccttctcagatccctggggagggtcacctgccaagcccagcaccaatggcacaacagcagccgggggattcgacacggagcccgacgagttctctgactttgaccgactccgcacggcactgccgacctccgggagcagcgcaggagagctggagctgctggcaggagaggtgccggcccgaagccctggggcgtttgacatgagtggggtcaggggatctctggctgaggctgtgggcagccccccacctgcagccacaccaactcccacgccccccacccggaagacgccggagtcattcctggggcccaatgcagccctcgtcgacctggactcgctggtgagccggccgggccccacgccgcctggagccaaggcctccaaccccttcctgccaggcggaggcccagccactggcccttccgtcaccaaccccttccagcccgcgcctcccgcgacgctcaccctgaaccagctccgtctcagtcctgtgcctcccgtccctggagcgccacccacgtacatctctccccttggcgggggccctggcctgccccccatgatgcccccgggccccccggcccccaacactaatcccttcctcctataa

SEQ ID NO: 12612 - DNA, 1543 bp, Homo sapiens
  SIMILAR (703)..(1089): 1001254mologous to Escherichia coli InsB,accession number U70214,Smith-Waterman Score=683.
ccaaatacagccccattctggggtacggggtcggtgcagggtggggggtagggtttcaacatagagctttcaggagggcgcagttcagctagtgacagtgactgcaggtgtctaagcggagaggatgggccactccaacggggggcgggtgagcaaggggcgctggagaaagagcgtggagagcacgtgccgtctagtgtgcgcgctgggctggaagccctcgaagacactggatcctgcatcccacagtcagcccacagttcccagtgagatcagagcagctaatgctgcggatgctgttctgagacttcccgggcagccgcggctgctcatcgtgtcgtgccacccctgggttgtgtccactgtggtccccgactctgcccacaagctgttcatcgggggcttacccaactacctgaacgatgaccaggtcaaagagctgctgacatcctttgggcccctcaaggccttcaacctggtcaaggacagtgccacggggctctccaagggctacgccttctgtgagtacgtggacatcaacgtcacggatcaggccattgcggggctgaacggcatgcagctgggggataagaagctgctggtccagagggcgagtgtgggagccaagaatgccacgctgagcaccatcaatcagacgcctgtgaccctgcaagtgccgggcttgatgagctcccaggtgcagatgggcggccacccgactgaggtcctgtgcctcatgaacatggtgctgcctgaggagctgctggacgacgaggagtatgaggagatcgtggaggatgtgcgggacgagtgcagcaagtacgggcttgtcaagtccatcgagatcccccggcctgtggacggcgtcgaggtgcccggctgcggaaagggcgtcagttctctagatgaccgcatggagccccatttgacagaagagaaagctgaggtgcaaaagatccagcccgcccaggatgcggtgacctgccagcacctgccgcagccttcgtccgggagtcgccccatctctccacgcatcggggccctgtgccccttgctgctgcagccgggcaccatgtcgacctcgtccttgaggcgccagatgaagaacatcgtccacaactactcagaggcggagatcaaggttcgagaggccacgagcaatgacccctggggcccatccagctccctcatgtcagagattgccgacctcacctacaacgttgtcgccttctcggagatcatgagcatgatctggaagcggctcaatgaccatggcaagaactggcgtcacgtttacaagtccccttctggaagtacgggtgatgaggacaaccccacaggcccagaggccctgagccactgtgaagctgctacaccccctttggccctctccggagccctctgtgctgacctgttctggcatgagggcgagtcctcttgcttctcaccatcccttcgccacatggtctcatcttgtcacttcagccccaggtggtgggttgtgcaggagcagtctttccactttgatggatggggaaactga

SEQ ID NO: 12613 - DNA, 415 bp, Homo sapiens
  SIMILAR (40)..(489): 981254mologous to Escherichia coli K12 putative lyase/synthase,accession number AE000134,Smith-Waterman Score=772.
tggaggctggtaatgatttctatgacggtagctatgatgacccttccgtgccattgctggggcaagggaaggagaagccacagtatggcaagaaccccgtggtgatggtggacgagattatgagctccagccctcccaagttcaccttccctgaagcaggcttacgaatcatgatcaccaataagtttggacccaggacccgactacggatggccagcaggatcatcattaatgagcggcagagactgatcaactcggccaatggtgtgagcagtaagccgcttcaaaacgggaggcacgagaacattgagaacgggaatgttcctgtggaaaaccccgaagaccctcagcagaatcaggagcagcagccgccgccacagccaccaccgccagagccagagccggtggaggctga

SEQ ID NO: 12614 - DNA, 1443 bp, Homo sapiens
  SIMILAR (369)..(452): 421254mologous to Calotes versicolor SOX4,accession number X98344,Smith-Waterman Score=61.
atgagcgagctgacgaggaagcatgtaacaactgttctatcagatatctctgtactctcagcgcaagaagaaatatacaccgcgggacaaactccaggtccagtcaaacaaaagagcattgcaaacggtaacccggtcaacagtgagctggaggctggtaatgatttctatgacggtagctatgatgacccttccgtgccattgctggggcaagagagatcagcactaatcacggtgttgcgctcaacagtgaaggagaagccacagtatggcaagaaccccgtggtgatggtggacgagattatgagctccagccctcccaagttcaccttccctgaagcaggcttacgaatcatgatcaccaataagtttggacccaggacccgactacggatggccagcaggatcatcattaatgagggagagccccgaatgatggctgtcaccagggccgtgggctgggttgtcgagctggcagtaggaaggggtggcccaggccctctgataaatcctcaaagttttcctggtaaccatgcaaatcggcagagactgatcaactcggccaatggtgtgagcagtaagccgcttcaaaacgggaggcacgagaacattgagaacgggaatgttcctgtggaaaaccccgaagaccctcagcagaatcaggagcagcagccgccgccacagccaccaccgccagagccagagccggtggaggctgacttcctgtcccccttctccgtgccggatgagaacaacgtgttccctgattctgttggtgtctctctgatgcagcctcgatttaatgctccccagggcctccaaattcaagaggccagaggggacaaggtcaagtgggtgttcacctggcccctcatcttcctcctgtgcgtcaccattcccaactgcagcaagccccgctgggagaagttcttcatggtcaccttcatcaccgccacgctgtggatcgctgtgttctcctacatcatggtgtggctggtgactattatcggatacacacttgggatcccggatgtcatcatgggcattactttcctggcagcagggacaagtgttccagactgcatggccagcctaattgtggcgagacaaggccttggggacatggcagtctccaacaccataggaagcaacgtgtttgacatcctggtaggacttggtgtaccgtggggcctgcagaccatggttgttaattatggatcaacagtgaagatcaacagccgggggctggtctattccgtggtcctgttgctgggctctgtcgctctcaccgtcctcggcatccacctaaacaagtggcgactggaccggaagctgggtgtctacgtgctggttctctacgccatcttcttgtgcttctccataatgatagagtttaacgtctttaccttcgtcaacttgccgatgtgccgggaagacgattag

SEQ ID NO: 12615 - DNA, 338 bp, Homo sapiens
  SIMILAR (117)..(311): 1001254mologous to Homo sapiens ribosomal protein L9,accession number U21138,Smith-Waterman Score=319.
  misc_feature (1)...(338): n = a,t,c or g
gacattccagaaaatgtcgacattactctgaagggacgcacagttatcgtgaagggccccagaggaaccctgcggagggacttcaatcacatcaatgtagaactcagccttcttggatgagaccaggtgttgcttgttcagtatctcaagcccagaaagatgaattaatccttgaaggaaatgacattgagcttgtttcaaattcagcggctttgattcagcaagccacaacagttaaaaacaaggatatcaggaaatttttggatggtatctatgtctctgaaaaaggaactgttcagcaggctgatgaataagatctaagagttacctggctaccn

SEQ ID NO: 12616 - DNA, 205 bp, Homo sapiens
  SIMILAR (3)..(113): 971254mologous to Homo sapiens ribosomal protein L9,accession number U21138,Smith-Waterman Score=186.
tttcgttgtatgctcacttccccatcaacgttgttatccaggagaatgggtctcttgttgaaatccgaaatttcttgggtgaaaaatacatccgcagggttcggatgagaccagattgaaacaattggcaaaaaggtgtcttcaaagagaattccatatgctccttctggtgaaattccgaagtttagtcttcaagatccaccta

SEQ ID NO: 12617 - DNA, 732 bp, Homo sapiens
  SIMILAR (1)..(516): 781254mologous to Homo sapiens ribosomal protein L9,accession number U21138,Smith-Waterman Score=686.
atgaagaccatccgcagcaatcagactgttgatattccggaaaatgtcattactctgaagggatgcagagttattgtgaagggccccagaggaactctgtggagggacttcaatcacatcagtatagaactcagtcttcttgtaaagaaaaaaaagaggctccggcttaacaacacttgtggtgagaacatgatcaagggtgttacactgggcttccattacaagatgagatctgtgtatgctcacttccccatcaacatcgttacccgggagaatgggtcttttgttgaaatccgaaatttcttgggtgaaaaatacatccgcagggttaggatgagaccaggtgttgcttgttcagtatgtcaaacccagaaacatgaattaatccttgaaggaaatgacattgagcttgtttcaaattcagcggctttgattcagcaagcaacaacagttaaaaacaagcatatcaggaaatttttggatggtatctatgtctctgaaaaagaaactgctcagcatatcaggaaatttttggatggtatctatgtctctgaaaaagggggatcctatagagccacacggcaggcgaggaaactgaggctcggctggtggcgccgtgggcttggagtccgagccacgctgactgcaaagacgggtctcattcccgcagatcgagctctgccggcggctgcgccgcaagccgggcagaacagatctgcatcaggcaattaa

SEQ ID NO: 12618 - DNA, 1024 bp, Homo sapiens
  SIMILAR (1195)..(1284): 351254mologous to Homo sapiens Anti-HIV Fab tat31 light chain,accession number R69095,Smith-Waterman Score=53.
ctgggacacacgggcccgctgtcggtctcccgtcctccgacatcttgtctggaacttccgcctggcagtctccagtaggagtggagctctgtgcggcgtagtttggtggaaaaacgggccttgcgtcggcctcacccccagtgtttgtgtttcagaatgaagactattctcagcaatcagacctgtcgaccattcccagaaaaatgtcgacatgtactctgaagggacgccccagtaatcgtgtaagggcccgcagagggaaccctgcggaagggactttcaatcaccttcaatggtagaacctcagcctttcttggaaagaaaaaaaaagaggctcccgggttgacaaaatggtggggtaaccggaaagggaactggcctacccgttcggacctatttggtagtccatgtacagaaccatgatcaaaggggtgttaccactggggcttcccgttaccaaggatgagggtcttgtgtatgcttcactttccccatccaacgttggttatcccagggagaaatgggtcctctttgttgaaatcccgaaattttcttggggtgaaaaatacatcccgcagggtttccggatgaagaccagggtgttgcttgttccagtatcttcaagccccagaaaggatgaatttaatcccttgaaaggaaatgacattggagcttgtttccaaatttcagccggctttggatttcagcaagccccacacacgtgtttaaaaacaagggatatccagggaaatttttgggatgggtatcctatggtcctctggaaaaagggaactgtttcagccagggctggatggaataaggatcttaaggagtttacctgggctacagaaagaaagatgccaggatgacagctcaggagctaccttgtgatatattaaaagatgcaaaaaaaaacacatattagatttggaacaaccaacctgcgtatggttctacccataaaaattccatgagggagaaaagacttccctctcccattgagttcgagactactaccggcgcg

SEQ ID NO: 12619 - DNA, 328 bp, Homo sapiens
  SIMILAR (23)..(289): 961254mologous to Homo sapiens nucleophosmin,accession number M23613,Smith-Waterman Score=446.
ggcacgagcgtgccgccacccgatggaagattcgatggacatggacatgagccccctgaggccccagaactatcttttcggttgtgaactaaaggccgacaaagattatcactttaaggtggataatgatgaaaatgagcaccagttatctttaagaacggtcagtttaggggctggtgcaaaggatgagttgcacattgttgaagcagaggcaatgaattacgaaggcagtccaattaaagtaacactggcaactttgaaaatgtctgtacagccaaattcatcaattatgtgaagaattgcttccggatgactgaccaagaggctt

SEQ ID NO: 12620 - DNA, 273 bp, Homo sapiens; identical to SEQ ID NO: 6533
  SIMILAR (161)..(271): 971254mologous to Rattus norvegicus nucleolar protein B23.2,accession number J04943,Smith-Waterman Score=176.

SEQ ID NO: 12621 - DNA, 1311 bp, Homo sapiens
  SIMILAR (1249)..(1530): 1001254mologous to Cloning vector pZC320 SopA,accession number U26464,Smith-Waterman Score=485.
atggaggattcgatgaacatggatatgagccccttgaggccccagacctatcttttcaattgtgaaccaaaggccgacaaagatgatcactttaaggtgaatgatgatgaaaataagcaccagttatctttaagaacggtcagtttaggggctggtgcgaaggatgaactgcacattgttgaagcagaagcaatgaattacaaaggtagtccaattaaagtaacactggcaactttgaaaatgtctgtgcaggcaacagtttcccttgggggctttgaaataccactacctgtggtcttacaatcgaagtgtggtttagggccagtgcatattagtggacagcacttagtagctgtggaggaagatgcagaatcagaagatgagggttccatggaaaaaagtaaaacctgctgtgatgatgatgatgatgatgatgatgatgatgaagatgacgaggaaactgaagaaaaactccggaagacttttaagaagtggcttcttattcctcatgcaaagagaactggctgctgtgaagctgacgtgggccacatactgaacagtgggataaattctctctgctttgtaggagctgtgaaacttctggctgactcgagatatgaatgtagaggaggactgctctgttctggccattgctatcagggcggcttccaggaagactgggaggccctgcttggtgaggagaaatggatccgggtctcacctaacgaagcagtctggccgtggtctgccacagccgtaccgtggggaattcctcccagtgcaaatcatccggtctccctggcaccggcaggggagaacggccgactggagctgcagggatggcggctgtccccaccccctacccaaccaacttgggtgtgtcttaggcagtctccagtgtgctgccactggccgcaacctgagcggctacctaatgtctgcacagttctgtgcttgggacccaaggccctggtggcgtgggctcacggaggggatctcctgatcgcaggttgcacagatccatggaaaaagcatgttttcctgggtggggtagaacaatcactcaccgcctcccttggctggggttgggagttccctttgccctgtgcagctcccgggtgggcctttgctccactctgcttttcctcgttctctgtgggtcatgccaaccgcctcatcagtcccaataagagaatctgcatacctcagctgaaggtgcaggatccactcaccatttttgttctccttagtgggagccgtggttcacagtggcttctagtcggccatcttggtccctccataggattttag

SEQ ID NO: 12622 - DNA, 1454 bp, Homo sapiens
  SIMILAR (1)..(1080): 841254mologous to Cloning vector pZC320 SopA,accession number U26464,Smith-Waterman Score=1554.
  misc_feature (1)...(1454): n = a,t,c or g
ggctggggaggtcttgcaatcatgagggaaggcaaatgggaagcaaagtcatgtcttatgtggtggcgggcagggggacttgtgcacaggaactcctatttatacaaccatcagatatcttgagacaagaacagtatggggctccctggtgtgattccgtcctgcgcggctgttctctggagcagcattcatttatcttcgtctgccttgtctcctaccataagtgcgtgccgccacccgatggaagattcgatggacatggacatgagccccctgaggccccagaactatcttttcggttgtgaactaaaggccgacaaagattatcactttaaggtggataatgatgaaaatgagcaccagttatctttaagaacggtcagtttaggggctggtgcaaaggatgagttgcacattgttgaagcagaggcaatgaattacgaaggcagtccaattaaagtaacactggcaactttgaaaatgtctgtacagccaacggtttcccttgggggctttgaaataacaccaccagtggtcttaaggttgaagtgtggttcagggccagtgcatattagtggacagcacttagtagctgtggaggaagatgcagagtcagaagatgaagaggaggaggatgtgaaacctcttaagtatatctggaaagcggtctgcccctggaggtggtagcaaggttccacagaaaaaaagtaaaacttgctgctgattgaagatgatgacgatcgatgatgaagaggatgatgatgaagatgattgatgatgatgatttttgatgatgaggaagctgaagaaaaagcgccagtgaaagaaatctataccgagatactccagccaaaaatgcacaaaagtcaaatcagaatggaaaagactcaaaaccatcatcaacaccaagatcaaaaggacaagaatccttccaagaaacaggaaaaaactcctaaaacaccaaaaggacctagttctgtagaagacattaaagcaaaaatgcaagcaagtatagnagaaaaggtggttctcttcccaaagtggaagccaaattcatcaactatgtgaagaattgcttccggatgactgaccaagaggctattcaagatctctggcagtggaggaagtctctttaagaaaatagtttaaacaatttgttaaaaaattttccgtcttatttcatttctgtaacagttgatatctggctttcctttttataatgcagagtgagaactttccctaccgtgtttgataaatgttgtccaggttctattgccaagaatgtgttgtccaaaatgcctgtttagtctttaaagatggaactccaccctttgcttggttttaagtatgtatggaatgttatgataggacatagtagtagcggtggtcagacatggaaatggtggggagacaaaaatatacatgtgaaataaaactcagtattttaataaagt

SEQ ID NO: 12623 - DNA, 648 bp, Homo sapiens
  SIMILAR (258)..(365): 1001254mologous to Homo sapiens dJ585I14.2 (novel protein (translation of cDNA Em:AK000219)),accession number AL121782,Smith- Waterman Score=187.
atgaggaagacagccaatatattaaggatgacagagtgggcctgcaggcatcattgcaacaccgaaccaatgccagcaacctcctacctccagatgttttatcaaggagaaacaattcagcgtttcatcattaagtatgatgcaactgtaggtctttttgcagatgttctttatttctggaaattgataactgaatttagaggcctaatcggattcaagtacagttttttttgggcagtggacaagactacgtcggatgtggagagcatcttgtgcgcaccatactggctagagaatgttcacatgctttacaagctgaggatgctcaccaagccctgttggagactatgcaaaacaagtttatcaggaaagacagcagcagagttcccatggaggaggaaatattggaaatttgaggaaaaacaagaaagtataggtcagtacttgcctatgtattgccaggcagcattaagggtccaaattgaagatagtgaccatgaatttaaagaaggcatgttctttgaagaagtgcttgaggatcttgatcccgcttgtttaaaattcccattgaaagctctgctcttgtctgcagctgatctggttgcaacacttttggcacctggcgagtggagagtttgttcaacttaa

SEQ ID NO: 12624 - DNA, 746 bp, Homo sapiens
  SIMILAR (439)..(1173): 851254mologous to Cloning vector pSacBII SacB,accession number U09128,Smith-Waterman Score=1139.
ctcagagtgcctgaatccgaggaaactaaatctggcagaaaaggcggacacagactctatgcgactagcgaaaagaagactatcaagtgagaaggaaaatgactcaagcactttggacacggtaggcgctgtggttgtggaccacgaagggaatgttgctgctgctgtctccagtggaggcttggccttgaaacatccggggagagttgggcaggctgctctttatggatgtggctgctgggctgaaaatactggagctcataacccctactccacagctgtgagtacctcaggatgtggagagcatcttgtgcgcaccatactggctagagaatgttcacatgctttacaagctgaggatgctcaccaagccctgttggagactatgcaaaacaagtttatcagttcacctttccttgccagtgaagatggcgtgcttggcggagtgattgtcctccgttcatgcagatgttctgccgagcctgactcctcccaaaataagcagacacttctagtggaatttctgtgggagccacacgacggagagcatgtgtgtcggatatatgtcagcccaggatgggaaagccaagactcacatttcaagactttcttctggtgcggtggcaggacagtctgtggcattccaaggtggggtgtgccgcctgggagagcccagtgaactgacccttcaggctgagtgtgaagcgtctcagaggcatttcagaacctgagcttttgggggtttt

SEQ ID NO: 12625 - DNA, 2150 bp, Homo sapiens
  SIMILAR (1)..(714): 1001254mologous to Cloning vector pZC320 SopA,accession number U26464,Smith-Waterman Score=1244.
ggcgagcccacagctactggctgctcaagcggctgtccaggaacggggcccccctgctgcggcggctgcagtccagcctgcagtctcagcgaagctcacagcagagagaaaatgatgaggagatgaaggctgccaaagagaagctgaagtactggcagcggctgcggcacgacctggagcgcgctcgcctgctgatcgagctgctgcgcaagcgggagaagctcaagcgtgagcaggtgaaggtggagcaggtcgccatggagctgcggctgaccccgctgacggtgctgctgcgctcagtgctggaccagctgcaagacaaggaccccgccaggatatttgcgcagcccgtgagtctgaaggaggtaccagattatttggatcacattaaacatcccatggactttgccacaatgaggaaacggttagaagctcaagggtataaaaacctccatgagtttgaggaggattttgatctcattatagataactgcatgaagtacaatgccagggacaccgtgttctatagagccgcggtgaggctgcgcgatcagggaggtgttgttctgaggcaggcccggcgcgaggtggacagcatcggcttggaagaggcctcggggatgcacctgcctgagcggcctgctgcggcaccgcggcggcctttctcctgggaagacgtggacaggttgctggaccccgccaacagagcccacctgggcctggaggagcagctgagagagctgctggacatgctcgacctcacctgcgctatgaagtccagcggctcccggagcaagcgggcaaagctgctcaaaaaggaaattgcccttctccgaaacaagctgagccagcagcacagccagcccctgcccacggggccaggcttggaaggcttcgaagaggacggagctgcgctggggccggaggcgggcgaggaaggagataaatctccccctaaacttgaaccatcagatgcattacctcttccttcaaactcggagactaattcagaaccaccaaccctcaaaccagtagaactcaacccagagcagagtaaacttttcaaaagagtcacatttgataatgaatcacatagcgcttgcactcagagcgcactggtaagcggacgccctccagagcccacccgcgccagtagtggcgatgtgccggcggcggcggcctccgcggtggcggagccagcaagcgatgtaaacagacgcacttctgttctcttctgcaaatcgaaaagtgtaagccccccaaagtctgccaagaacactgaaacccagccaacttctcctcagctagggaccaaaacctttttgtctgtagtccttccgaggttggagactcttctgcagccaaggaaaaggtcgcggagcacatgcggagactccgaggtggaggaggagtccccaggaaagcgcctggacgcaggtctcaccaacggctttgggggtgcgaggagcgagcaggagccgggcggcggcctggggaggaaggccacaccccgacgacgctgtgcctccgagtccagcatctcctccagcaacagcccgctctgcgactcgagctttaatgcgcccaaatgtgggcggggcaaaccggctcttgtgcgacggcacacgctggaggaccgcagtgagctgatctcctgcatcgagaatgggaactacgccaaggcggccaggatcgcagccgaagtcggccagagcagcatgtggatctccactgatgccgccgcctcggtgctggagcctctgaaggtggtgtgggccaagtgcagcggctacccctcctacccggcactgatcatcgaccccaagatgccccgtgtgcctggccaccacaacggcgtcaccatcccggccccacccctggacgtgctgaagattggggagcacatgcagaccaagtctgatgagaagctgttcctcgttctcttttttgataataagagaagttggcagtggcttcctaagtccaaaatggttccccttggtattgacgaaactatagacaagttaaagatgatggaagggaggaattccagcatccggaaggccgtgcggatcgcttttgaccgcgccatgaaccacctgagccgcgtccacggggagccgaccagcgacctcagtgacattgactga

SEQ ID NO: 12626 - DNA, 2046 bp, Homo sapiens
  SIMILAR (25)..(420): 931254mologous to unidentified cloning vector 29kD protein essential for the replication of mini F plasmid,accession number AB015619,Smith-Waterman Score=651.
ccaaccctcaaaccagtagaactcaacccagagcagagtaaacttttcaaaagagtcacatttgataatgaatcacatagcgcttgcactcagagcgcactggtaagcggacgccctccagagcccacccgcgccagtagtggcgatgtgccggcggcggcggtcccgtcgacactcagcaggatgctcacgtggtggtttccaccaggtggccccacctgaccgggccctgccccagctgtgggctcccactgtggacagttttgccggctggcggccacgtcctcagcaacctctcaggctcgttcatcagatgtcccttgtagaagagcacgtgtcccctccgggccactgtcttacattggagtgggcacaattctgagttaggctgaacagggtcgctggtcctgaggcgacgcactcactgtgggcctcctgcccgtgtcgcccgcgggccggctgtgctgtgcgccaggcttctgttcctgcgatggcccagccccagagtctggccctgactcgtggcttccttcctccgtgactgcacgctcaccagcagtgaaccgtcacctgaagcggtctccctgtgcacgtgctggggcgtgagagcgcgggggtgtctttgtccactcaccgccgttgcggagacccctgctgcgagtctctgtgtgcatgtgctggggcttgagagtgtggggatgtctgaacttggctcggcactgtctgaggatgtggcatggacagtgcgtgctcactcactcgctagcatcttctgtatttctgggttttctacctgatttccttctccccttacttccccttcctctgttttttccccacaatgcccagtggattcttgagcagtgctgctgtttgtctcttgctggtcaccacgctgagtgcccctgcggccaactgagaagtcctgctcgtggggtggggcatctgtgcgtgggatcttgtgcaggcgtctgtcctgggccttgggtctgtctctgaccatcccagctgcattgtcatggagctgggtcccagcaagagcaggtctcgtgcaggcgtctggcctgggccttggttctgtctctgaccatcccagctgcattgtcacggagcgagtcccagcacgatgggccttgggtctgtctctgaccgtcccagctgcattgtcatggagcaggtcccagcaagatgggctttgggtctgtctctgactgtccccagcggcattgtcacagagcaagtcttgtgcaggcatctggcctgggccttgggtctgtctctgaccatcccagctgcattgtcgcggagcgggtcccagcacgatgggccttgggtctgtctctgaccgtcccagctgcattgtcatggagcaggtcccagcaagatgggctttgggtctgtctctgactgtccccagcggcattgtcacagagcaagtcttgtgcaggcatctggcctgggccttgggtctgtctctgaccatcccagctgcattgtcgcggagtgggctgcattgtcacggagcgagtcccagcacgatgggccttgggtctgtctctgaccgtcccagctgcattgtcatggagcaggtcccagcaagatgggccttgggtctgtctctgactgtccccagcggcattgtcacagagcaagtcttgtgcaggcatctggcctgggccttgggtctgtctctgaccatcccagctgcattgtcgcggagtgggtcccagcaagatgggccttgggtctgtttctgaccatccccggctgcattgtcacggagcaggtcccagcaagagcaggtctcgtgcaggcgtctggcctgggccttggttctgtctctgaccatcccagctgcattgtcacggagcgggtcccagcaacatgggccttgggtctgtctctgaccgtccccggctgcattgtcacggagcaggtcccagcaagagcaggtctcgtgcaggcgtctggcctgggccttgggtctgtctctgaccgtcccagctgcattgtcacggagcgggtcccagcaacataggccttggg

SEQ ID NO: 12627 - DNA, 849 bp, Homo sapiens
  SIMILAR (453)..(653): 1001254mologous to Homo sapiens Protein sequence encoded by clone p199-7 (PL mutet.rsT4),accession number P93369,Smith-Waterman Score=372.
tcaggtgggcttgtgatccgggtggcttttgagcgtgtggaacttgacgctgtccagcttctcgaagcgcttcccgcagcgatcgcacgtgaagttgtactgcacctccgcagtgtgcttcttcatgtgccagttgagcgacgcgcgctgccggcactggtagccacagatctcgcactgcaggggggtctcgccggtgtgggtgcgccgatgtacctccaggtggttcttcctcttgaaggacttgccgcaggtctcgcaggtgaattcacggacacctgggggcggtggggaccgaggcacgcctggcttcttcttctccttctccttttccttctccttctcgttctccctctccctctccttcttcttcttcttctttttcttttttgttatacagtgtctcactatgttgcccaggctctgctcctcggtgagctggttctgggcatgcagggcagccaggatgggcgggtgggggctcagggtgtagctctgacagcgcctctgcagctgctggatgcgggccaggatctcccactctgagggcaggctgcctggggtgttgtcctcttcttgggatccctcagtggcctcctcctgtcctgtcctgttcttcaggtatggcttctcccacttccattcgcgaatcactgcctggaccactttctcatctcccttgagcaggtccagcagctttagttccagtgccttagtctccttgcggagctgactgatggtctcctggttcttcttgatgttccactgagagctctcaaaaaaagccttccggtcaccctctgaggtcaggagttcgagaccagcctggccaacgtgccgaaaccccat

SEQ ID NO: 12628 - DNA, 957 bp, Homo sapiens
  SIMILAR (616)..(1149): 641254mologous to Cloning vector pSacBII SacB,accession number U09128,Smith-Waterman Score=572.
ttagacgaacgcgggatgctgtataatcctcatgaggtactcacttcgactgggctctgtggtgctggtcaccatggtctctttcccgcacaggaggcgcacctggggatgggcacacgggtgctcaagagggttcggctgggccaggcctgggtcttcccgccccagctcccctgccttgcaggcactcacggtggtggagcggttggggccctgccagcaacccgtgccttgctcatacttcatggcactgaacttgtcgtggtcggggccaatccatgagccccaagtgcctgccagtgggggcccctgcattcctgggacgcactcgttggtggtgagctcgtagcactggctgtacaggtaagcaaactccccgttggggccaaagtcaaaagaaatctcttgctccaggttctgcaggggggtctcgccggtgtgggtgcgccgatgtacctccaggtggttcttcctcttgaaggacttgccgcaggtctcgcaggtgaattcacggacacctcttcttcttcttcttctttcttctttcttctttcttctccttctccttctccttctttcttctttcttctttcttttcttcctcttcctcttccgctgctgctgctgctccttctccttctccttcttcttcctcttcttcttcctcttcctctttttcttcttgttctccttcttcttcctcttcttctgctgctgcttctcctcctcctccttcttcttctttcttctttcttccttctcctcctccttctccttcttccccttctcccttctctcttctcccttctccttatttcttcttcttcttctctcgcaaagaatgatgccatctttgaggccgtccatgaagttgttgccgatgcgacggcctgtcaccccctcgatccactctctcagctcctgctcccgctggtggtcatacttctgggccagcat

SEQ ID NO: 12629 - DNA, 867 bp, Homo sapiens
  SIMILAR (13)..(834): 901254mologous to Bacillus amyloliquefaciens precursor (AA - 29 to 443),accession number X52988,Smith-Waterman Score=1264.
tcagtgacaagtgctgggctcccccagatcacactcatctgtgctggatttcaccagctctcggttgatggaggtccccacgctccctgctcctcctcctccgtctgccctacatccctcctgcttctccagggaaccacagatctcgatgccaatttggatcaacttatttctgtctttcagggagctgacggctgggcggggtccctggggcacccgggcacatttggacgtgtttggcagggagagtcctggcccagccccggcacgtagggccgcgcttccacgggccgccgccaggagacgcgcgaggctgtagatgcggctttgcagagaagcagctggttctgtccccagcccccactccctccattcaatcacccatccatccccagcgcggtccagcccgtgacgggagagcctgaagcagaaggtgggggggcgtccacagctgtcccccttccccccccccgacagctgggcactggaccctgttgatcttgtgcgcgaaggcgcggcgctcggaggcagccatggtcctcgcgtcccgccgccgccgccccgggccccggccccgccgccgccgccgcctcccggttctgggcagccggggcggggcggggccggcgcgggggcggggcccttccgggtggcccgggccgctccgtgctgccccttctccatgaccaagttccactgtgtagaatagtcgtctggctcgttgtaacctctgtaattcttcctcagggtcacgaaggtgtgttccaaggccacatctccaacctcacagagaggacaggaagtgatcagtaccccaactagcaagagtggcccgttcattggccgaggttctgcctcatttgccat

SEQ ID NO: 12630 - DNA, 893 bp, Homo sapiens
  SIMILAR (1)..(444): 981254mologous to Cloning vector pSacBII SacB,accession number U09128,Smith-Waterman Score=786.
tttcgtatccggggggctgcaggctgctggcttctgcggctgcggtgtcgatgtcgcggccagggccaagccacagcgggttgaggggcggaacccctgcaggcggcgccccctacacgaggtcacccctgggaaggagcgcagcccacccggcccctccgcatccgagcaggacgcccgtctcctctccctgaggatatcaggtctccctgtcccaagaggcttgtgccaagatggcatcagctggagacacccaggcaggcccacgggatgcagcaaatcagaacttcgactatatgtacaaactgctactgatacgcaacagcagtgtgggcaagacttccttcctgatccgatacgcggacgactccttcactcccgccttcgacagtactgtgggcatcgatttcaaggtcaagaccgtctaccgccatgacaagaggatcaagctgcagatctgggacacagcgggccaggagcgctaccgcaccatcaccacggcctactaccggggagccatgggcttcctgctcatgtatgacatcgccaatcaggaatcctttgccgctgtgcaggactgggccacgcaaatcaagacctactcctgggacaacgcccaggtcatcctggtggggaacaagtgtgacctggaggacgaacgtgttgtgcctgctgaggatggccggaggctcgccgacgaccttggtttcgagttctttgaagccagtgccaaggagaacatcaatgtgaagcaggtcttcgagcgcctggtggatgtcatctgcgagaagatgaacgagtccctggaacccagctccagctcaggcagcaacgggaaaggcccggccgtgggggatgctccagccccccagcccagcagctgcagctgctag

SEQ ID NO: 12631 - DNA, 1286 bp, Homo sapiens
  SIMILAR (1)..(471): 1001254mologous to Homo sapiens GTP-binding protein,accession number AF081353,Smith-Waterman Score=819.
atggcatcagctggagacacccaggcaggcccacgggatgcagcagatcagaacttcgactatatgttcaaactgctactgataggcaacagcagtgtgggcaagacttccttcctgttccgatacgcggacgactccttcactcccgccttcgtcagtactgtgggcatcgatttcaaggtcaagaccgtctaccgccatgacaagaggatcaagctgcagatctgggacacagcgggccaggagcgctaccgcaccatcaccacggcctactaccggggagccatgggcttcctgctcatgtatgacatcgccaatcaggaatcctttgccgctgtgcaggactgggccacgcaaatcaagacctactcctgggacaacgcccaggtcatcctggtggggaacaagtgtgacctggaggacgaacgtgttgtgcctgctgaggatggccggaggctcgccgacgaccttgccgcatctacagcctcgcgcgtctcctggcggcggcccgtggaagcgcggccctacgtgccggggctgggccaggactctccctgccaaacacgtccaaatgtgcccgggtgccccagggaccccgcccagccgctaaagtgctgtggggtgaataactacacagatttttctggctcttccttcgaaatgacaacgggccacacctaccccaggagttgctgtaaatccatcggaagtgtgtcctgtgacggacgcgatgtgtctccaaacgtcatccaccagaagacctgcggcaagtccttcaagaggaagaaccacctggaggtacatcggcgcacccacaccggcgagacccccctgcagtgcgagatctgtggctaccagttgccggcaagcgcgcgtcgttcaactggcacatgaagaaagcaacactgcggaggtgcaagtacaacttcacgtgcgatcgcctgcgggaagcgcttcgagaagctggacagcgtcaagttccacacgcttcaaaagccacccggatcacaagcccacctgacccacctgaccactgaccgcccctatttattcgtccgctcggacaccacgcccgggcttgccggggcctggacagctgcgagggccgcccggaccgcgggccggaaggaggcgcccccgccccgccccagagctggcgcccctgggcaggttccccaccccgccccaccgcatccttctcggagctggtgcctggggctgcattgctggaactgtgtcaagagagcagagtgagattaaagagcgagaaaggaaaaaaaaaaaaa

SEQ ID NO: 12632 - DNA, 780 bp, Homo sapiens
  SIMILAR (274)..(645): 941254mologous to Homo sapiens sperm membrane protein BS- 63,accession number U64675,Smith-Waterman Score=563.
atgcagggtgtcagacatggcaggtactacggtctacctggcgcgtatcaaagagttggtcgacgttctcacaacaacctaatagggaccaaccatggaaggccagtagtaaaggagtttgaagttccctttcagaaaccaattaacaaccccaaagagacaaaagaaatgcaggagttgaaactaaatagcagtaagtcagcatcccgtcatcgttggcccacagagaattatggaccagactcggtgcctgatggatatcaggggtcacagacatttcatggggctccactaacagagcctccattatggcatgctgaatttaccaaagaagaattggttcagaagctccgttccaccacaaaaagtgcagatcacttaaacggcctgcttcgggaaatagaggcaaccaatgcagtccttatggagcaaattaagcttctcaaaagtgaaataagaagattggaaaggaatcaagagcgagagaagtctgcagctaacctggaatacttgaagaacgtcttgctgcagttcattttcttgaagccaggtagtgaaagagagagacttcttcctgttataaatacgatgttgcagctcagccctgaagaaaagggaaaacttgctgcggttgctcaaggtgaaggcattctcatctcctcagaggcttcagagcttctccatttcatagacaaccagggcccagtgcacgtgatccagaaatatcttgagcaccctctgctgcttgagccaggtcatcgcaagtttgacattcggtaa

SEQ ID NO: 12633 - DNA, 439 bp, Homo sapiens
  SIMILAR (20)..(439): 921254mologous to Rattus norvegicus tubulin tyrosine ligase,accession number AF207605,Smith-Waterman Score=690.
aagactcaggttgctccaagcacagatgggattcagcccaccatcaagtaactcaaggacagatgaaagagaattctttatcgcctcttataacagaaagaaagaggatggagagggcaacgtttggattgcaaagtcatcagccggtgccaaaggtgaaggcattctcatctcctcagaggcttcagagcttctcgatttcatagacaaccaggcccaagtgcacgtgatccagaaatatcttgagcaccctctgctgcttgagccaggtcatcgcaagtttgacattcgaagctgggtcttggtggatcatcagtataatatctacctctatagagagggtgtgcttcggactgcttcagaaccatatcatgttgataatttccaagacaaaacctgccatttgaccaatcactgcattcaaaaaaaaaaaaaaaaa

SEQ ID NO: 12634 - DNA, 394 bp, Homo sapiens
  SIMILAR (50)..(394): 1001254mologous to Mus musculus lymphoid enhancer factor 1,accession number X58636,Smith-Waterman Score=620.
tcgggcacgaggccggtcttcttggtcccccacacaattggcatcccttcatccagctattgtaacacctcaggtcaaacaggaacatccccacactgacagtgacctaatgcacgtgaagcctcagcatgaacagagaaaggagcaggagccaaaaagacctcacattaagaagcctctgaatgcttttatgttatacatgaaagaaatgagagcgaatgtcgttgctgagtgtactctaaaagaaagtgcagctatcaaccagattcttggcagaaggtggcatgccctctcccgtgaagagcaggctaaatattatgaattagcacggaaagaaagacagctacatatgcagctttatccaggctggtctgcaagagacaattatggtaag

SEQ ID NO: 12635 - DNA, 792 bp, Homo sapiens
  SIMILAR (625)..(1566): 971254mologous to Cloning vector pBACe3.6 levansucrase,accession number U80929,Smith-Waterman Score=1632.
atgaatgggaaagaatctcatagcctgcaatgggaaggaagcaaaatgggaagctccacacctgagagttgggggagagcaggagcagggaggctcccagctgacagattgtgtgtgcacacagctaccatcgcctctgtgtcataccctcatggacagtggttctcccaaatcccagatggttctccctggaaagttctgctggcagatcctggcattggggaagttgggaaaatacatgaacactgtctgctggggactgggtggcatgccctctcccgtgaagagcaggctaaatattatgaattagcacggaaagaaagacagctacatatgcagctttatccaggctggtctgcaagagacaattatggtaagaaaaagaagaggaagagagagaaactacaggaatctgcatcagaaagccctcagaatggcagtgtgccaagggctggcactcgatttacctcacttctgtttgcaccaaaatctgtaaagctaactatttatattaaaaagcatggaaaaatgtatttctgtatttcagagtttggtagtcgatttggtgttcttcaagatgagcatcctatggccatcccgccgctggtgaggctccagttggttgagcttcctgtaatcagagtctctggtgttgccctccctctcattcccggatcagtcatgcagcctttgaagtcactgccctgcacaccatccgagtttggagaccagaactggcagttattggataagaattgtagagtagagaggagctcagatccaccttcataa

SEQ ID NO: 12636 - DNA, 873 bp, Homo sapiens
  SIMILAR (199)..(420): 771254mologous to Gallus gallus transcription factor LEF- 1,accession number AF064462,Smith-Waterman Score=288.
atgaatgggaaagaatctcatagcctgcaatgggaaggaagcaaaatgggaagctccacacctgagagttgggggagagcaggagcagggaggctcccagctgacagattgtgtgtgcacacagctaccatcgcctctgtgtcataccctcatggacagtggttctcccaaatcccagatggttctccctggaaagttctgctggcagatcctggcattggggaagttgggaaaatacatgaacactgtctgctggggactgggtggcatgccctctcccgtgaagagcaggctaaatattatgaattagcacggaaagaaagacagctacatatgcagctttatccaggctggtctgcaagagacaattatggtaagaaaaagaagaggaagagagagaaactacaggaatctgcatcagaaagccctcagaatggcagtgtgccaagggctggcactcgatttacctcacttctgtttgcaccaaaatctgtaaagctaactatttatattaaaaagcatggaaaaatgtatttctgtatttcagagtttggtagtcgatttggtgttcttcaagatgagcatcctatgattgactctctcagttctctgagccttatgtttagagcactcaagctatatgttgttacaatatcatctcccaaagagacaataattctttcaaattctgtagaagcgactctggttagcccaacttgggtcaaacttccaccccaatctataatcagctgtggccagaggagaaggtcacattgtacaaaatggctgtcaggagctcactgctctaacagtgttggagttgggataatggagaggagagctggacagcagcccgacagatgtccgctatag

SEQ ID NO: 12637 - DNA, 732 bp, Homo sapiens
  SIMILAR (1)..(552): 981254mologous to Homo sapiens putative ribosomal protein (AA 1-184),accession number X53777,Smith-Waterman Score=948.
atggttcgctattcacttgacccggagaaccccacgaaatcaggcaaatcaagaggttccaatcttcgtgttcactttaagaacactcgtgaaactgctcaggccatcaagggtatgcatatacgaaaagccacgaagtatctgaaagatgtcactttacagaaacagtgtgtaccattccgacattacaacggtggagttggcaggtgtgcgcaggccaagcagtggggctggacacaaggtcggtggcccaaaaagagtgctgaattcttgctgcacatgcttaaaaacgcagagagtaatgctgaacttaagggtttagatgtagattctctggtcattgagcatatccaagtgaacaaagcacctaagatgcaccgccggacctacagagctcatggtcggattaacccatacatgagctctccctgccacattgagatgatccttacggaaaaggaacagattgttcctaaaccagaagaggaggttgcccagaagaaaaagatatcccagaagaaactgaagaaacaaaaacttatggcacgggagaaactccctgcagatgtggagaagccctcagttactgaccccttgttaaaagaaacagccagaaaccagaaacatgaccaggaagataaacagctgttgaggtctcagctgctctccagagtggcatcatcttcggaaataagccttgcattcatcttcaccgaggaaattgggccttga

SEQ ID NO: 12638 - DNA, 1188 bp, Homo sapiens
  SIMILAR (205)..(612): 501254mologous to Homo sapiens p40,accession number U93567,Smith-Waterman Score=349.
atgaaggactggagacctaggaggaaaaaatggtttcctgggccaggtccagggccccattgctgtgaggaacctagggacttggtgtcctacatcctagctgctccagccatggctaaaaggggccaaggtagagctcgggttgtggtttcagagggtgcagcttggcagcttccacatggtgttgagcctgtgggtgcacagaagtcaagaaccaagctgaataacacagtacaagaatttcacaatgcaatcacaagtattaatagtagaataaaccaagctgaggaaagaatctcagaactcgaaaactggctttctgaaataagacagtcagacaaaaataaagaaaaaagaataaaaaggaatgaacaaaacctccaagaagtaggggattatgtaaagaagccaaatctacaaatcactgtcatccctgaaaggaagggggagaaagcaaacagtttggaaaacgtatttcaatatattgtccatgaaaacttccacaaccttgctagagaggacaacagtcaaatacaggaaatacagacaactcctgcaagattctacacaggaagatcatccccaagacacataattgtcagattttccaaggaccctgattctcttgaaggagacttacacaggctgagaattaaccttctctggcattctgccactcataagtacaggctgcacctgggcttcagttcagttggccttctggctgccagtgatgagggactttttaaaggcttccatggaggccctttgactctcacacttgggtttaaattggtggttaatagatttgatcctggcatctatacttagtgcatcaatggtgcttagcaataccctcccaattcaacaatctttcaagttacttttccacctgtactctcaaatactagatacatcacagaagttaatgcattcgcttctacttatatgctgtcctgggtcactacaagtaaaagtgttagcaatttcactgcaggagcacatctgagactatcttcagggaagagattctgatggaaccactggtgagtgagcaaactccagaatcccatcctcagactcaggtgtatataattactactgctatcaactgtcttagattgggctcttgcagctgaccctgagaattagattcctgtccaagtgattgcctgagggagtgctctc

SEQ ID NO: 12639 - DNA, 216 bp, Homo sapiens
  SIMILAR (10)..(186): 381254mologous to Felis catus transcription factor HOXA13,accession number AF083095,Smith-Waterman Score=75.
atggcggccgggagcagcttcagtgggcacacgacagccgcgcgacccgtggcggggcgagctgtggcagtagcatcctcaccactcgcagcagcctcagccgcggcgcccgtagcgccagcagcggctgcttttgcaaaggctgagcgcaggggcggggcgggccaggaagccatggagttctgtgcagccgcggactcccggggagcggactag

SEQ ID NO: 12640 - DNA, 1294 bp, Homo sapiens
  SIMILAR (28)..(936): 791254mologous to Homo sapiens dJ852M4.2 (Novel protein similar to Drosophila CG17883),accession number AL121747,Smith- Waterman Score=1152.
atggggtttcaccatgttggccaggctgctctcgaactcctgacctcaggcatgccagaggaacagagagaagggctccaggaagaactgattgacatcatcctcctcatcttggagcgcaaccctcagctgcactactaccagggctaccatgacattgtggtcacatttctgctggtggtaggcgagaggctggcaacatccctggtagaaaaattatctacccaccacctcagggattttatggatccaacaatggacaacaccaagcatatattaaactatctgatgcccatcattgaccaggtgaatccagagctccatgacttcatgcagagtgctgaggtagggaccatctttgccctcagctggctcatcacctggtttgggcatgtcctgtctgacttcaggcacgtcgtgcggttatatgacttcttcctggcctgccacccactgatgccgatttactttgcagccgtgattgtgttgtatcgcgagcaggaagtcctggactgtgactgtgacatggcctcggtccaccacctgttgtcccagatccctcaggacttgccctatgagacactgatcagcagagcaggagacctttttgttcagtttcccccatccgaacttgctcgggaggccgctgccctaacagcaagctgagaggacggcagcctctactttcaaagactttgagctggcatcagcccagcaggaggcctgatatggtgctgcggcagcggtttcggggacttctgcggcctgaaagatcgaacaaaagatgtcctgaccaagccaaggaccaaccgctttgttgaaattgggcaagtgatgggggctgacagtgggcacttgggagcggctgcactggctgtggtgaaaagttgccctgggaatgggccccttaagttttcagcttgcagctgtttccctgaaaagccagagaagaacctttctcttacattacattaaggtctcacccttccatggaaggattgggaggggtggaatttcctttattaaaaagggtttctgtccagagttttttattcctgccaccctgccctgcccgtttgtgtttgcctttacttcagaggccagtagcagagcctacctgacacagagggcacctgggggcctggcacagaatcttatgcctcttcccagtgggcttttggatgggctctctgccacctccctggtgttggaggaagtgggtttctgaagcttgcagctgcttttgcaacctgctgggcctgggctgccctagttaccgggaacctcctagtca

SEQ ID NO: 12641 - DNA, 866 bp, Homo sapiens
  SIMILAR (1084)..(2022): 671254mologous to multiple sclerosis associated retrovirus polyprotein,accession number AF009668,Smith-Waterman Score=1069.
atggcacagaaacatcttactggcttatatggacctgtcctaatagctgttattacccaattctggcatttgttcttacttcctcctgacattgtccgccttgccgattttcataagaagccccatcgcaaccatacccatgaccactctagcgcactgctgagcagccgtacgacaatggcagagatggccaacatacgaccaaacacacggagaaaacaaccacgagaccagagcgacaagagccaagaagccagaacgccacgcacacagagcgacgaaagacggagcaaccgcccgaccgggaagcgcaaaaagaggacacaaaaagaaacaaaaacaacaaaagcggccaaacaagaagagaagacacgacaagaacacacgaaccgccgagagcaagaaactcagaaccaaccacgcaaacgaacggcaagaacaagcggccagagaacgaagaaccgcgagaagaaaacatcattcttaatacttctccataaacagattcaagttaaagctttggcagacctcacaggaagcccctccgcgtgccggtgggcgggcgctcaggcccgaggatgcggggcgaggaggcgggtactggtgattctcctggcagcccccgcccgccccgccagggggagcgttgcgcccgacgtaggctgcggggcctgggctggcggcgcagggcggtgatcggctcggtggctggccggcgaagtaccagtacgagcctcatcgcagacatcatcgggccaggacaagccacagacaaaactcctcagacacgagttaaagaaggaagaggtttattcgaccgggagtatcagcaggactctgtcttaatagccgagctccctgagtga

SEQ ID NO: 12642 - DNA, 438 bp, Homo sapiens; identical to SEQ ID NO: 9415
  misc_feature (1)...(438): n = a,t,c or g

SEQ ID NO: 12643 - DNA, 401 bp, Homo sapiens; identical to SEQ ID NO: 9418
  SIMILAR (15)..(194): 981254mologous to Homo sapiens ribosomal protein S26,accession number X77770,Smith-Waterman Score=303.

SEQ ID NO: 12644 - DNA, 799 bp, Homo sapiens
  SIMILAR (803)..(1075): 861254mologous to multiple sclerosis associated retrovirus polyprotein,accession number AF009668,Smith-Waterman Score=385.
  misc_feature (1)...(799): n = a,t,c or g
acataacctcgattttcttccgccatccggctaaatagtcccatgtgcactttgttccatggataaataaacactaggaacgcatttccaccctagatttcagcagaaatgctgaattgtaaaggaatatttgagtaaagtgagttgccgttcttgaagcccgtctcctaaggattctcccggtgtccgcgtagggatctcatgctatataggagggccctgccaggcaccgtctcctctctccggtccgtgcctccaagatgacaaagaaaagaaggaacaatggtcgtgcccaaaaaagggccgcgcgccacgtcagggggnngccncccttaaaatttttnccccngggnccntgccacctaactgtgcccgaatgcgtgcccaagggacaaggccattaagaaattcggtcattccgaaacatagtggaggccgcagcaggcaagggcacatttctgaagcgagcgtcttcgatgcctatbtbbcttcccaagctggtatgtgaagctacatttactgtgtgagttgtgcaattcacaagcaaaagtagtcaggaaatcgatcttcgtgaagcccggcaaagacccgaacacccccaccccgatttaggacctggcgggtgattgccccacggtccccccaccaaaagcccatgatctgggtccagaatactgcagacatcagacatgtgttaactgggtttgctgccggcaagccaccatccttgggaaggagttgtgtgggcaaatcaggaagttgccctctcagcagatgtctccaggatggctgccctcag

SEQ ID NO: 12645 - DNA, 306 bp, Homo sapiens
  SIMILAR (1)..(138): 1001254mologous to Homo sapiens dJ1071N3.1 (endothelin converting enzyme 1),accession number AL031728,Smith-Waterman Score =238.
atgcggggcgtgtggccgcccccggtgtccgccctgctgtcggcgctggggatgtcgacgtacaagcgggccacgctggacgaggaggacctggtggactcgctctccgagggcgacgcataccccaacggcctgcagagcctcccggccacctgcttctggggccacagcccaggtggcagagttgaaagcacccccgagacccgaactggtccagttccctttccacagaaggcacagtttgtgcatgtcccgggacttgcccaggccctttaccggcagagtctacggctgtttctgttttag

SEQ ID NO: 12646 - DNA, 945 bp, Homo sapiens
  SIMILAR (276)..(923): 831254mologous to Homo sapiens Protein encoded by the endogenetic fragment of HERV-W,accession number B07702,Smith- Waterman Score=926.
atgcgggtgctgtggatgctcttttggctcctcttttggctcctgctggaatttatcagccatcagtccacctgtgttatcaatactctggctgaccatcatcatcgtgggactgactttggtggaagtccttggttacgtatcattattgcatttccgagaagttataaagttgtccttaccctctggacagtttacctttggttgtctttcctgaagactatcttccagtctgaaaatggacatgatgtatccacagatgtacagcagagagccaggaggtccaaccgccgtagacaggaaggaaataaaattggcctgaaagacgtcattactctacggagacatgtggaaacaaaaggtagagctaaaatccgtaagatgaaggtgacaacgaaaatcaaccatcatgacaaaatcaatggaaagaggaagaccgccaaaaaacagtaagatgtgccttgacacaaatactgttgtatgaaccatgtgccaatcaaagtagacaactgtaaagtccttgagaatattttctacaatatttgtggcaaattcagtgggttcaaaattgagtttgtcctttctgcttcattagtttaagctgtataattcctttcccttcctacattcttgtttgtaattttttcgggggaagaggagttgctagtactggcattggttttcctttctctctttttttttttttttttcctgagatggagctttgctgttgttgcccaggctgttagtgcaatggcacaatctcagctcactgccttttgggttcaagcaattctcctgcctcagcctcccaagtagctgggattacaggtgcccaccaccacgcccagctaatttttgtatttttactagagatggggtttcaccatgttgtccaggctggtctcgaacttctgacctcaggtaatccacctgcctcagcct

SEQ ID NO: 12647 - DNA, 2778 bp, Homo sapiens
  SIMILAR (441)..(560): 421254mologous to Homo sapiens Human h1CED-6 proline/serine rich region,accession number Y27251,Smith-Waterman Score=69.
atgcatgtggagcggcgggtgtgccatgccgtgagtaaatacaacgtgacgctgtcgtgtgtggcagggggcctggcagcgaagtccagtggccttgagctcatctggctctgtgacttgctggtcagagaacttggccagctaactgggcctgtctgtaaagtaaggacacctgcattgatctatggtcggcaccaccagcctcccttgccccggcccctaccgacactcacctgcgcagctagcaggtggccacagcctgaggaggccacagcgccaccaggggaaggtggacaaaaagatagagccctgctccctggaatccctgcaggtccgaaagaccagtgccagaaccgccgcaagatcagctccagaaccgccacaagaccagagccagaaccaccgcaagaccggagccagaaccgccgcaagaccagcgccagaaccgcagagccacagggcttgtcactgcctgaggatgatgaccctgcgcctctaagctgcagactggggtgtctgctcacgcactgcctgccttcctgggtgccgtgctgccctccagagagcaccaccctggacgtggtggaggtggagagctatgacccctacacggacagctggacgcccgtcagcccggccctcaaatacgtcagcaacttctcggctgccggctgccggggccggctctacctggtgggctccagcgcctgcaagtacaacgccctggccctgcagtgctacaaccctgtcacagatgcgtggagtgtgatcgcctcgcccttcctgcccaagtacctgtcctcgcctcgctgtgctgcactgcacggggagctctacctcattggggacaacaccaagaaggtctacgtgtacgaccccggggccaacctgtggcagaaggtgcagtcacagcacagcctgcatgagaatggcgcgctggtgccactgggtgatgcgctgtacgtgacgggcggccgctggcagggcatggaaggtgactaccacgtggagatggaggcctacgacacggttcgggacacctggacccgccacggcgccctgccccggctctggctctaccacggggcctccaccgtcttcctggatgtctccaacaagaaaacagaaggatacaggccactactccagttggttgggccatcagttgatccagctgaaagcatgtgtatggatggagaatgtgccaatggcttaaggagagagggcacagccacgtacacaggaaagatgctgcacctccggggccgtgtcattcaccgtccctccccagtgcccggcgtggtatcagctgatcggtctgaagtgtggctgcttctcccggactctgcagcaccaggtacgtggcagggcagccagtccctgctgccacatcctgtgaaccaggacagggtaaggcctcctttccccagcgggctcttctcaaaagagttccccgggaacagcagccctcggtgtgagtgtaagggttttggagcctggactgctgagcagagggtggtccggttggggaggctcctcggcaccgcagcccccatcttcccaccacaacaccctggcctgcgcattggtcagccagctcccaaaagaaggccctgcatccccccagatcagccaggaaccaaaggcagtgacttggcagccggctttgtctctgataaaagggcccagtcagctctaaaatcccagggtccttccctggcagccttgcctggagcccagatagcccaaggcctctcccaggaaggtccctcccaaaactgtgctcagtgtcagcatcagtcaggatgcagcgcggacaggaatgggaacttccggaagcatcactgtccatgtttcggcttgccagggccccctgggcctcccggtccccagggccccccaggccccatcatcccacccgaggcgctgctgaaggagttccagctgctgctgaaaggtgcggtgcggcagcgggagcgcgcggagcccgaaccctgtacgtgtggccccgccgggccggtcgctgcgagcctcgccccggtctcggccaccgccggggaggacgacgacgacgtggccgctttcctctgccgcctgcgccgggacgcgttggtggagcggcgcgcgctgcacgagcttggcgtctactacctgcccgacgccgagggtgccttccgccgcggcccgggcctgaacttgaccagcggccagtacagggcgcccgtggctggcttctacgctctcgccgccacgctgcacgtggcgctcggggagccgccgaggagggggccgccgcgcccccgggaccacctgcgcctgctcatctgcatccagtcccggtgccagcgcaacgcatgccggcaggccccggaggagcgcccgcgacccctcggaggctctccaggtctttctcagcatggtgaacatgggagccggggctctgtctgcatgagggaggtgctcagaccctgcagggcgggaacaaggtggaggaagtcgctggcgctgcagaagctgggcagtcaccccctccacacccactaccagggaaggggcaggaagcatcaggggagtcacctgctctcgtctgagagggaggtgacagccaagaacctgaactacgaatgcaggagccggacagggggaaagggacgtctaagactcatcctcttgttcgttcaacctgttgaagtggcaggattgccagttcctggacgctacctgcagggctccagtgtcccctggaacctgggagatacattcaaatccaagtactga

SEQ ID NO: 12648 - DNA, 6042 bp, Homo sapiens
  SIMILAR (230)..(508): 641254mologous to Homo sapiens sterol regulatory element binding protein 3,accession number AF157325,Smith-Waterman Score= 354.
atggagagtgggaaaggacgttcaaagctgaaagagcagctgaagcccagccttggggcaggagagctctggtcctgctcaggaaatgactgcagcaccccatgcggtggcagggccgctccatgggcctctgcgtcctgggagccaggacccccacctggagttggagaagttgctggcggggaagggaggatgatgaaggaggacatcatctggcaatggccctggagcattcctgaaccaccccctccctgtctgggccacgccctgtggcagcccctgctatctgccatctccatccgtccagctgggccgcctctgtggaacccaggcatcaccaaggtaagcagcccctgctatctaccatctccatccgtccagcagagccgtctctgtgggacccaggcatcaccaaggtttagggagccatccagcagctcctcatccccaaagtctgcagggctgatggctggtcagccccacagtccccgggagctcctcggggctgcagggcaccgcagcaggaggcccagcacagaactccgggtcccgcccagtccaagtctcaccatggactctcagtacgagacgggccacattcgcaagctacaggcccggcacatgcagatgcaggagaagactttcaccaagtggatcaataacgtcttccagtgcggccaggcgggcatcaagatccggaacctgtacacagagctggctgacggcatccacctcctgcggctgctggagctcatctcaggggaggccctgccacccccgagccggggccgcctgcgtgtgcacttcctggagaacagcagccgagctctggccttcctcagggccaaggtgccagtaccactcatcgggccagagaacatcgtggacggagaccagacactcatcctgggactcatctgggtcatcattctgcgtttccagatctcccacatctccttggacaaggaggagtttggggccagcgcagccctgctgtccaccaaggaagccctgctggtctggtgccagcggaagacagccagctacaccaacgtgaacattacagatttctcccgaagctggagcgatgggctgggcttcaatgccctcatccatgcccacaggccagacctgttggactacggctccctgcgtccagaccgcccactgcacaaccttgcttttgctttcctggtggctgagcaggagctgggcattgctcagctgctggaccccgaggacgtggcagccgcacagccagatgagcgctctatcatgacctacgtctccctctactaccactactgctcccgcctgcatcaggggcagactgtccagaagagactcactaagatcctgcttcagctccaggagacagagctgctgcagacccagtacgagcagctggtggctgaccttctacgctggattgcagagaagcagatgcagctggaggcgcgggattttccagactcgctgcccgccatgcggcagctactggcagcattcaccatcttccgcacccaggagaagccaccccggctacagcagcgaggggccgcagaggccctgctcttccggctacagacagcactccaagcccagaaccgcaggcccttcctgcctcatgagggcctgggccttgcagagctgtcccagtgctgggcagggctggagtgggcagaggctgcaaggagccaggccctgcagcagaggctactgcagctgcagcggctagaaaccctggcccggcgcttccagcgcaaggcagccctccgggagagtttccttaaggatgcagagcaggtgctagaccaggccagagccccgccagccagcctggccacagtggaggcagccgtccagaggctgggcatgctggaggctggcatcctgccccaggaggggcgcttccaggccctggctgagatcgcagacatcctccggcaggagcagtaccacagctgggcagatgtggcccgcaggcaggaggaagttaccgtgcgctggcagaggctccttcagcatctacagggacagaggaagcaggtggcagacatgcaggctgtgctgagcctgctgcaggaggtggaggctgcctcccaccagctggaggagctgcaggagccggccaggtccaccgcctgtgggcagcagctggcagaagtggtggagctgctgcagaggcatgacctgctggaggctcaagtctcggcccacggagcccatgtgagccatcttgctcagcagacagcagagctggactcctccctgggcaccagtgtggaggtgctgcaggccaaggccaggacactggcccagctccaacagagcctggtggctcttgtcagggcccggcgggccctgctggagcagaccctgcagcgggcagagttcctgcgcaactgtgaggaggaggaagcctggctgaaggagtgcggacagcgggtggggaatgcggccctgggccgggatctcagccagatcgcaggcgccctgcagaaacacaaggtgcccctggaagctgaggtccaccgccaccaggccgtgtgcgtagatctcgtgcggaggggacgcgacctcagcgccccgcaggcccccaacgcagccggatccccggggaacgggcagaggccgttcagggagggtggcagctgctccagacccgggtgtcgcctcttctctggagtggcgaatgccaggtatccagacaccattgccttgacctttgatcctactaatcagtggctgtcttgtgtgtacaacgatcatagcatttatgtttgggatgtgagggaccccaagaaagtgggcaaggtgtactcggctctgtatcattcttcctgcgtctggagtgtggaggtctaccccgaggtgaaggatagtaaccaggcctgcctgccccccagttcctttattacctgctcctcagacaacaccatccgcctgtggaacacagagagctccggggtgcatggctccaccctccaccgaaacatcctcagcagtgacctcattaaaatcatctatgtggatgggaacacccaggccctgctggacacagagctgcctggaggagacaaagctgatgcatccctgttggatccccgcgtgggcatccgctcggtgtgtgtcagccccaatggacagcatctagcatcaggggaccgtatgggcacacttagggtgcacgaacttcagtccctgagtgagatgctgaaggtggaggcccatgactctgagattctgtgcctggagtattctaagccagacacaggtctgaaactgctagcatcggcgagccgggaccggctgatccatgtgctggatgccgggcgggagtacagcctacagcagacgctggacgaacactcatcctccatcactgctgtcaagtttgcagccagtgatgggcaagtccgcatgatcagctgtggagcagacaagagcatctacttccgcactgcgcagaagtctggagatggagtgcagttcacacggacacaccacgtggtgcggaagacgaccctctatgacatggatgtggagcccagctggaagtacacggctatcggctgccaggaccgaaatattcggatatttaacatcagcagtggaaagcagaagaagctgtttaaagggtcacagggtgaggacggcacactcattaaggtgcagacagacccctcagggatctacattgccaccagctgttctgacaagaatctctccatttttgacttctcctcaggcgagtgcgtggccaccatgtttggccactcagagattgtcactggcatgaaatttagtaatgattgtaaacatctcatctctgtgtctggggacagctgcatatttgtgtggcgcctgagctctgagatgaccatcagcatgaggcagcgtctggccgagttgcgccagcgtcagcggggcggcaagcagcaaggaccatcctctccccaaagggcttctggacccaaccggcaccaggccccatcaatgctgtctcctggaccggctctctcatcagacagtgacaaggagggagaagatgaggggactgaagaagaacttccagcactgcccgtccttgccaagagtaccaagaaggcactgggtctgtggcagttggcctcggtccccagcccagctttgccccgaagcctgtcccactgggagatgagtcgggcacaggagtccgtggggttcctggacccagctcctgcagccaacccaggacccagaagaagagggcgctgggttcagccaggtgtggaactgagcgttagatccatgctggatctgcggcagctggaaacactggccccaagcctgcaggaccctagccaggactcgctggccatcatcccatctggtcccaggaagcatgggcaggaggcccttgagacttcactcactagccagaatgaaaagccccctcggcctcaggcttcccaaccttgttcctatccccatattatccgattattgtcacaagaggaaggggtctttgcccaagatctggaacctgcacccattgaagatgactctgagagcacggagcccctcagtgtggatggcatctcctcagaccttgaagagccagctgagggtgatgaagaagaggaagaagaggagggaggcatgggcccctatgggctacaggagggcagcccccagactccagaccaggagcagtttctaaaacagcactttgagactctggccagtggagctgctccaggggccccagtgcaggtcccagagaggtcagagtctcggagtatctcttcacgattcctgttgcaagtacagacccgcccactcagggaaccatccccatcctcctcaagcctggcactgatgtcgagaccagcccaggtgccacaggcatctggtgagcagccgagaggcaatggtgccaatccccctggagcacccccggaggtggaaccgtcctctggcaaccccagcccccagcaggcagcctctgtgctgttgccacgatgccgtctcaaccctgacagcagctgggctcccaagagagtggccacagccagccccttttctggactccagaaggcccagtctgtgcacagtctggtgccacaggaaagacatgaggccagtctgcaggccccttcaccaggcgcactgctgtctcgggagatcgaagctcaggatggtctgggctccctgcccccagctgatggccgtccgtctcggcctcactcctatcagaaccccaccaccagttccatggccaagatatcccgcagtatctctgttggggagaacctgggcctggtggctgaacctcaagctcatgcccccatccgagtctcaccactcagcaagctggccctgcccagccgggctcacctggtcctggacatccccaaaccactgcctgaccgtcctaccctggctgcattctctcctgtcaccaaaggccgggcccctggcgaggcagaaaagcctggcttcccggtgggcctaggaaaagctcacagtacaactgagagatgggcctgtttgggggagggcaccactcccaagcctaggacagagtgccaggctcatcctgggcccagcagcccctgtgcccagcaactgccagtcagcagcctcttccaaggccctgaaaacttgcagcccccaccccctgagaagactcccaaccccatggaatgcaccaagccaggggcagccctgagccaggactcagagccagcggtgagcctggagcagtgtgagcagctggtggcagagctccgcggcagcgtgcgccaggcagtgcggctctaccactcggtggctggctgcaagatgccctcagcagagcaaagtcggattgcccagctcctcagagacaccttctcttcagtgcgacaggagctggaagctgtggctggggcagtgctgtccagcccaggcagcagccctggggctgtgggagccgagcagacacaggccctgctggagcaatactcagaactgttgcttcgagccgtggaacggcgtatggaacgcaaactctga

SEQ ID NO: 12649 - DNA, 5526 bp, Homo sapiens
  SIMILAR (16)..(279): 311254mologous to Mycobacterium tuberculosis key enzyme from the shikimate biosynthesis pathway,accession number M62708,Smith- Waterman Score=95.
ctccaacaaggtgtccagtcgggtgacagcagtgtccttctctgaggattgcagctactttgtcactgcaggcaaccgacacatcaaattctggtatctcgatgacagcaagacctcaaaggtgaatgccactgtgcccttgctgggccgctcagggctgctgggagagctacggaacaacctattcactgatgtggcctgtggcagaggaaaaaaggcggacagtaccttctgcatcacgtcctcagggctgctgtgcgagttcagtgatcgaaggcttttggacaagtgggtggagctgagggtctaccccgaggtgaaggatagtaaccaggcctgcctgccccccagttcctttattacctgctcctcagacaacaccatccgcctgtggaacacagagagctccggggtgcatggctccaccctccaccgaaacatcctcagcagtgacctcattaaaatcatctatgtggatgggaacacccaggccctgctggacacagagctgcctggaggagacaaagctgatgcatccctgttggatccccgcgtgggcatccgctcggtgtgtgtcagccccaatggacagcatctagcatcaggggaccgtatgggcacacttagggtgcacgaacttcagtccctgagtgagatgctgaaggtggaggcccatgactctgagattctgtgcctggagtattctaagccagacacaggtctgaaactgctagcatcggcgagccgggaccggctgatccatgtgctggatgccgggcgggagtacagcctacagcagacgctggacgaacactcatcctccatcactgctgtcaagtttgcagccagtgatgggcaagtccgcatgatcagctgtggagcagacaagagcatctacttccgcactgcgcagaagtctggagatggagtgcagttcacacggacacaccacgtggtgcggaagacgaccctctatgacatggatgtggagcccagctggaagtacacggctatcggctgccaggaccgaaatattcggatatttaacatcagcagtggaaagcagaagaagctgtttaaagggtcacagggtgaggacggcacactcattaaggtgcagacagacccctcagggatctacattgccaccagctgttctgacaagaatctctccatttttgacttctcctcaggcgagtgcgtggccaccatgtttggccactcagagattgtcactggcatgaaatttagtaatgattgtaaacatctcatctctgtgtctggggacagctgcatatttgtgtggcgcctgagctctgagatgaccatcagcatgaggcagcgtctggccgagttgcgccagcgtcagcggggcggcaagcagcaaggaccatcctctccccaaagggcttctggacccaaccggcaccaggccccatcaatgctgtctcctggaccggctctctcatcagacagtgacaaggagggagaagatgaggggactgaagaagaacttccagcactgcccgtccttgccaagagtaccaagaaggcactggcctcggtccccagcccagctttgccccgaagcctgtcccactgggagatgagtcgggcacaggagtccgtggggttcctggacccagctcctgcagccaacccaggacccagaagaagagggcgctgggttcagccaggtgtggaactgagcgttagatccatgctggatctgcggcagctggaaacactggccccaagcctgcaggaccctagccaggactcgctggccatcatcccatctggtcccaggaagcatgggcaggaggcccttgagacttcactcactagccagaatgaaaagccccctcggcctcaggcttcccaaccttgttcctatccccatattatccgattattgtcacaagaggaaggggtctttgcccaagatctggaacctgcacccattgaagatggtattgtctacccggagccgagtgacaaccccaccatggataccagtgagttccaagtgcaggctccagcccggggaactctgggaagagtgtacccaggcagcaggagctcagaaaagcacagccctgacagtgcctgctctgtggattacagcagcagctgcctttccagcccggagcaccccactgaagactctgagagcacggagcccctcagtgtggatggcatctcctcagaccttgaagagccagctgagggtgatgaagaagaggaagaagaggagggaggcatgggcccctatgggctacaggagggcagcccccagactccagaccaggagcagtttctaaaacagcactttgagactctggccagtggagctgctccaggggccccagtgcaggtcccagagaggtcagagtctcggagtatctcttcacgattcctgttgcaagtacagacccgcccactcagggaaccatccccatcctcctcaagcctggcactgatgtcgagaccagcccaggtgccacaggcatctggtgagcagccgagaggcaatggtgccaatccccctggagcacccccggaggtggaaccgtcctctggcaaccccagcccccagcaggcagcctctgtgctgttgccacgatgccgtctcaaccctgacagcagctgggctcccaagagagtggccacagccagccccttttctggactccagaaggcccagtctgtgcacagtctggtgccacaggaaagacatgaggccagtctgcaggccccttcaccaggcgcactgctgtctcgggagatcgaagctcaggatggtctgggctccctgcccccagctgatggccctccgtctcggcctcactcctatcagaaccccaccaccagttccatggccaagatatcccgcagtatctctgttggggagaacctgggcctggtggctgaacctcaagctcatgcccccatccgagtctcaccactcagcaagctggccctgcccagccgggctcacctggtcctggacatccccaaaccactgcctgaccgtcctaccctggctgcattctctcctgtcaccaaaggccgggcccctggcgaggcagaaaagcctggcttcccggtgggcctaggaaaagctcacagtacaactgagagatgggcctgtttgggggagggcaccactcccaagcctaggacagagtgccaggctcatcctgggcccagcagcccctgtgcccagcaactgccagtcagcagcctcttccaaggccctgaaaacttgcagcccccaccccctgagaagactcccaaccccatggaatgcaccaagccaggggcagccctgagccaggactcagagccagcggtgagcctggagcagtgtgagcagctggtggcagagctccgcggcagcgtgcgccaggcagtgcggctctaccactcggtggctggctgcaagatgccctcagcagagcaaagtcggattgcccagctcctcagagacaccttctcttcagtgcgacaggagctggaagctgtggctggggcagtgctgtccagcccaggcagcagccctggggctgtgggagccgagcagacacaggccctgctggagcaatactcagaactgttgcttcgagccgtggaacggcgtatggaacgcaaactctgagttctggaagcctgtcccaagtgaatgaatgctccagcgattccaaactgcagcccctctgcccctcaccaaaacctgcggggctgcttggagtggaaagcagggagcagtgttcagaggcaaagcagccttcccagccgctcctcgtggggggcctgtatttattaatttatttccctgactgttgcctcacttccttggaactcctgcctccacagcccctccagtggcagggacaggtcttgggtctttgtcatcttggtgctgtgagaggtaggagggcagcctgccccatctaggaatctgggaagggctggccctctcttagaagccatttgaaattactgcagggattagctccctgtggtggagcatacacagggtactctggggtcgaggtgagaggtgatgtggtattcagtgcccgtcagccaactgtgggccttcacctctacctgcacttcccctctcacaccagctgcactcccctggctgccagagcagggtggttttccccaatacctggagctcagaaaggcagagccatctggccctccagggtgtccccagccatcaggagacttgagttggtatttggacctgagcccgcacattccactcccattctccctccaagaggggcccagcattgtatttccctgtgaccccttactctcctggccagaacttgagccagctgtgggatgttgctgcaggacagtaagccctcacctgggcaaacatgaagctctggcctcctttcctcagccccttgttcttccctgtcctccaccctggaccccagccggctgctggagcccagaggccaccttctccctgcatcctgaatgatgcttagtcagaagcctgtgttggaacatccctcgtttacggggcgctggcctacctcctgaggacctcagccacagatgagatcacacgcatgcacgtgcacacatgtacacacacacacctacctgcacagcacgctgttgagtgttggttgctagagtatccggctggctgctgtgtgcctggtttcctcacatcctgcctcagcttcaccaccctggcttatgtggaacacctatcagggagcagaaaaggggtgcagtacactaagtgaacccagattctggattcttggtgtccacagcctagctgatacgagatagcccataggacacctggtttaggtagaaggagcctcctcaaaggcagtgctgggcacccacgggtgtgctggatactggagtttgagaggagggaggtgctggggccaaaggagacactagaaaagtggtagatgggacaggtaagtggcagaggtgagggggtaagttagaatgtaaaagggcagtaattaggggtgagggaaaggagataggggaccctaggaggtagagtgggaccatgtcgtgaggcagttgaagagttgaggaaaggtttttctgggccctactgctcccctctgctgcaggtaagtcagagcagctttaccacagcttcaggccacgagagccccttcacccgccctgctgcgccataggcagaggcttataaagaaatgggttctgggccaggtgtggtggctcaagcctgtaatcccagcactttgggaggccgaggcgggtggatcacctgaggttaggagttcgagatcagcctggccaacatggtgaaaccctgtctctactaaaaataaaaaaattagctgggcgtggtggtgggcgcctgtaatcccagctactcgggaggtttaggcaggagaatcgcttgaaccctggaggtggaggtggaggttgcagtgagccgagatcgcgccattgcactccaacctaggtgacaaagctacacgccatctc

SEQ ID NO: 12650 - DNA, 1176 bp, Homo sapiens
  SIMILAR (373)..(474): 851254mologous to Homo sapiens PRO1546,accession number AF116638,Smith-Waterman Score=156.
atggggctgatcttgctagccgccagtcctctcatggcctcatccagcatagatgaattttacaaatataatgttgaaggggaaaaacgccagagaatccccggggagaacctgggcctggtggctgaacctcaagctcatgcccccatccgagtctcaccactcagcaagctggccctgcccagccgggctcacctggtcctggacatccccaaaccactgcctgaccgtcctaccctggctgcattctctcctgtcaccaaaggccgggcccctggcgaggcagaaaagcctggcttcccgcaactgccagtcagcagcctcttccaaggccctgaaaacttgcagcccccaccccctgagaagactcccaaccccatggaatgcaccaagccaggggcagccctgagccaggactcagatggagaggctggacgtgtccgaggcacagggaaggggcaagggacagccagtctggcagcttctgtcacgtgggggcagctggaggccctgaagagggagaaggccgtgcagctggcacacagtgtggaagtgtgcagttttctgcaggagtgtggacccacacaggtccagctgcgagacgtgctcctccagctggaggccctgcagccagggagctcagaggacacctgccacgccctgcagctggcccagaagaagaccctggtgctggagaggagggtccacttcctccaaagtgtggtcgtaaagtacggccagcgcagtggtggcattgggaggcaggtgcacgaacttcagtccctgagtgagatgctgaaggtggaggcccatgactctgagattctgtgcctggagtattctaagccagacacaggtctgaaactgctagcatcggcgagccgggaccggctgatccatgtgctggatgccgggcgggagtacagcctacagcagacgctggacgaacactcatcctccatcactgctgttaagtttgcagcagtgatggaggatgagtgttcgtccagcgtctgctgtaggctgtactcccgcccggcatccagcacatggatcagccggtcccggctcgccgatgctagcagtttcagacctggggatgaaagaactccatcagcccatgagtgccctgaacagcccttatctgggcctggcaaagagccccaagggaactga

SEQ ID NO: 12651 - DNA, 1635 bp, Homo sapiens
  SIMILAR (268)..(1395): 681254mologous to Homo sapiens possible protein TPRDII,accession number D84295,Smith-Waterman Score=1208.
atgcccaaccccaaaaacagcaaaggcggccgcaaaaacaagcgcgccaacagcagcggcgacgagcaggaaaatggagccggggccctggcagcggcgggcgcggcgggagcggcggccgggggggccctggcggcggcggccggttgcggggcggcggcggcgggcgcgccgggcgccggaggcgcggcgggcgccggaggcgcggggactggcgccgcgaacgctgcggccgccgcgggggctgcggccgcgggcgatgccaaaaacgaagccccatgtgccactcccctgatctgcagcttcggtaggccggtggacctggaagaaggacgactaccagaaggtggtgtgcaacaacgagcactgcccctgcagcacctggatgcacctgcagtgcttctacgagtgggagagcagcatcctcgtccagttcaactgcatcggccgcgcgcgcacgtggaacgagaagcaatgccgccagaacatgtggacaaagaaggggctacgacctgggccttccgcttctgctcttgccgctgtggccagggcaacttgaagaaggacacagactggtatcaggtgaagcggatgcaggacgagaaaaagaagaagtctggctccgagaagaacacagggaggcctcctggtgaggcggcggaggaggcaaaaaagtgcaggcccccaaataagccccagaaaggcccaagccacgacctcccccgccggcattccatggaccggcagaactcccaggagaaggcagtgggtgccgcagcctacggtgcccgttcccccggtggctccccgggccagtccccacccacgggctactccatcctctctcctgcccacttcagcggcccccgctcctccagatacctcggggagttcttaaagaacgccatccatctggagcctcacaagaaggccatggctgggggccatgtgttcagaaatgcccactttgattacagccctgcggggttggcagttcacagggggggacacttcgacacccccgtgcagttccttcggcggctggacctctccgaactcctcactcacatccccaggcataagctgaacactttccacgtgcgcatggaagacgatgcccaagtgggccagggggaagacttgcggaagttcattctggccgcgctcagtgccagccacagaaacgtggtaaactgtgccctgtgccaccgggcgctcccggtgttcgaacagttcccactggtggatggaactttgttcctaagcccgtcgagacatgatgagatcgaatatgatgttccttgtcaccttcaagggagactcatgcatctgtatgccgtgtgcgtggactgcctggaaggggttcacaagatcatctgcatcaagtgtaagtcacggtgggatggcagctggcaccagctgggcactatgtacacctacgacatcctggctgcctctccatgttgtcaggcccgcctgaactgtaagcactgtgggaagccggtgatcgacgtgaggatcgggatgcagtacttctccgaatatagcaacgtccagcagtgtccacactgtgggaacctggactaccacttcgtgaagccattttcctccttcaaagttctcgaagcttattga

SEQ ID NO: 12652 - DNA, 1563 bp, Homo sapiens
  SIMILAR (616)..(1140): 1001254mologous to Cloning vector pSacBII SacB,accession number U09128,Smith-Waterman Score=937.
atgcaggaagccccatgtgccactcccctgatctgcagcttcggtaggccggtggacctggagaaggacgactaccagaaggtggtgtgcaacaacgagcactgcccctgcagcacctggatgcacctgcagtgcttctacgagtgggagagcagcatcctcgtccagttcaactgcatcggccgcgcgcgcagctggaacgagaagcaatgccgccagaacatgtggacaaagaagggctacgacctggccttccgcttctgctcttgccgctgtggccagggccacttgaagaaggacacagactggtatcaggtgaagcggatgcaggacgagaaaaagaagaagtctggctccgagaagaacacagggaggcctcctggtgaggcggcggaggaggcaaaaaagtgcaggcccccaaataagccccagaaaggcccaagccacgacctcccccgccggcattccatggaccggcagaactcccaggagaaggcagtgggtgccgcagcctacggtgcccgttcccccggtggctccccgggccagtccccacccacgggctactccatcctctctcctgcccacttcagcggcccccgctcctccagatacctcggggagttcttaaagaacgccatccatctggagcctcacaagaaggccatggctgggggccatgtgttcagaaatgcccactttgattacagccctgcggggttggcagttcacagggggggacacttcgacacccccgtgcagttccttcggcggctggacctctccgaactcctcactcacatccccaggcataagctgaacactttccacgtgcgcatggaagacgatgcccaagtgggccagggggaagacttgcggaagttcattctggccgcgctcagtgccagccacagaaacgtggtaaactgtgccctgtgccaccgggcgctcccggtgttcgaacagttcccactggtggatggaactttgttcctaagcccgtcgagacatgatgagatcgaatatgatgttccttgtcaccttcaagatccttataaacataacagtgaggaaaagcagtggtcagaaaagggccaaggtatttttagattagttgaattaattttgaagtttatgaaagatgagagtgtgttgatagcagcaaaagggagactcatgcatctgtatgccgtgtgcgtggactgcctggaaggggttcacaagatcatctgcatcaagtgtaagtcacggtgggatggcagctggcaccagctgggcactatgtacacctacgacatcctggctgcctctccatgttgtcaggcccgcctgaactgtaagcactgtgggaagccggtgatcgacgtgaggatcgggatgcagtacttctccgaatatagcaacgtccagcagtgtccacactgtgggaacctggactaccacttcgtgaagccattttcctccttcaaagttctcgaagcttattgatgaaagctttgctttagtaatagctattttattgatattattcccttattacatatcttttatagggaaaaaaaa

SEQ ID NO: 12653 - DNA, 1077 bp, Homo sapiens
  SIMILAR (349)..(735): 461254mologous to Homo sapiens S164,accession number AF109907,Smith-Waterman Score=314.
atggtggcaggcatccctggttctgcacaggtttcctccaaaggggacagattgctggagaagcttccagatgctgtgaggttcctggtggtctctgaagatgagtccctcctcgccgcaggctttggaagatcggtgcggatattcttggcggactcgaggggctttcgccgattcatggccatggatctggaacatgaagacatggtggagacggctgtttttggtactgagaacaacctgatcatcacggggtcccttgatgcgctcattcagctgcaccacctcgtgagcgatgacgtctgcctgaaggtggtggagctctacctgaacgagaagaagcggggtgccgctggtgggaacctgtcctcccgctgcgtccgcgctgctagggagaccagctaccagtggaaggctgagcgctgcatggccgacgagaactgcttcaaggtgatgttcctgcagcgcaaagggcaggtgatcatgaccatcgagctcctggacaccgaggaggcccagacggaggaccctgtggaggtccagcacctggctcggtacgtggagcagtatgtggggaccgagggcgcgtccagctcgcccactgagggcttcctcctgaaacctgtgttcctgcagaggaacctcaagaagttccgccgccggtggcagagcgagcaggcgcgggccctgcgcggtgaggccaggagctcctggaagcggctggtgggcgtggagagcgcctgcgacgtggactgccgcttcaagctcagcactcacaagatggtgttcatcgtgaactccgaggactacatgtaccgtcgcgggaccctctgccgggccaagcaggtgcagcccctggtcctgctccgccaccaccagcactttgaggagtggcacagccgctggctggaggacaatgtgacggtggaggcggctagcctggtgcaggactggctgatgggtgaggaggacgaggacatggtaccctgcaagacgctgtgtgagacagtgcacgtgcacggcctgcccgtgacccgctaccgcgtgcagtacagccgccgcccggcctcgccctga

SEQ ID NO: 12654 - DNA, 3681 bp, Homo sapiens
  SIMILAR (179)..(262): 821254mologous to Homo sapiens Human secreted protein, SEQ ID NO: 6834,accession number G02753,Smith-Waterman Score=115.
catggcgcacgctggcggtggcagcggtggcagcggtgccggcggccccgcgggccgggggctgagcggcgcccgctggggtcgctcgggctccgcaggccacgagaagctgccggtgcacgtagaagacgccctcacctatctggaccaggtgaagatccgctttggcagcgaccctgccacctacaacggcttcctggagatcatgaaggagttcaaaagccagagcatcgatactcctggagtcatcagacgtgtctcgcagctcttccacgagcaccctgacctcattgttggattcaacgcttttcttcccctcggatatagaatagacattcccaagaatggcaagttaaacatacagtcgcctctgacaagccaggagaattcgcacaaccacggggacggtgcagaggacttcaagcagcaggtgccgtataaagaggacaaaccccaggtgcccctggagtccgattccgtggaattcaacaacgccatcagctatgtgaataagattaaaacccgcttcctagaccacccagaaatctacaggtcattcctggagatcctgcacacgtaccagaaggagcagctgaacacgaggggccggccattccgaggcatgtctgaagaggaggtgttcaccgaggtggccaacctcttccggggccaggaggacctgctctcagagtttggacagttcctgcccgaagccaagcggtctctgttcacaggaaacgggccgtgcgagatgcacagcgtgcagaagaacgagcacgacaagaccccggagcacagcaggaagcgctcccggccctcgctcctccgccccgtgtctgcacccgccaagaaaaaaatgaaacttcgtggtaccaaagacctgtccatcgctgcagtggggaagtacgggactctgcaggaattttctttctttgacaaggtccgccgggtgctgaagagccaggaggtgtatgaaaacttcctccgctgcatcgcactcttcaaccaggagctggtgtctggctctgagctcctgcagctcgtcagcccatttctggggaaatttccagaactctttgcacagttcaagtccttcctgggggtaaaagagctgtccttcgcgccacccatgagcgacagatccggggacgggataagccgggaaattgattatgcatcctgcaagcgcataggatccagctaccgggcactccccaaaacctaccagcagcccaagtgcagtgggaggacagccatctgcaaggaggtactgaacgacacctgggtctccttcccttcctggtctgaggactccacgttcgtcagctccaagaagacaccgtacgaggagcagcttcaccgctgtgaggacgagcgcttcgagttagacgttgtcctggagacgaacctggccacaatccgtgtgttggaaagtgtgcagaagaagctgtctcggatggcgccggaagaccaggagaagttccggctggacgactccctgggaggcacgtcggaggtgatccagcgccgtgccatttatcgcatctatggcgacaaggccccggagatcatcgagagcctcaagaagaaccctgtcaccgctgtccccgttgtcctgaaaagactgaaggccaaggaagaggagtggcgggaggcccagcagggcttcaacaagatctggcgggagcagtatgagaaggcgtacctcaagtcccttgaccaccaggctgtgaacttcaagcagaacgacaccaaggccctgcgctccaagagcttgctcaacgagatcgagagcgtctacgacgagcaccaggagcagcactcggagggccgcagtgccccctctagcgagccgcacctcatctttgtgtacgaggaccggcagatcctggaggacgcagcagcgctcatcagctactacgtgaagcggcagccggccatccagaaggaggaccagggcaccatccaccagctgctgcaccagttcgtgcccagcctcttcttctctcagcagctggacctgggcgcctccgaggagtcagctgatgaggaccgggacagcccccaggggcagaccacagaccccagtgagcggaagaagccggcgccaggaccccacagtagccccccagaggagaagggggccttcggggatgccccggccactgagcagccacccctgccgcccccagccccgcacaagcccctggacgatgtctacagcctattttttgccaacaacaactggtacttcttcctgcgcctgcaccagaccctgtgctccaggctgctgaagatctaccgccaggcgcagaagcagcttctggagtatcggaccgagaaggagcgggagaagctgctgtgtgagggccgcagggagaagggcagcgaccccgccatggagctgcggctgaagcagcccagtgaagtggagctggaggagtactacccggccttcctggacatggtgcggagcctgctggagggcagcatcgaccccacgcagtacgaggacaccctacgcgagatgttcaccatccatgcctacgtgggcttcaccatggacaagctggtgcagaacattgcgcggcagctgcaccacctcgtgagcgatgacgtctgcctgaaggtggtggagctctacctgaacgagaagaagcggggtgccgctggtgggaacctgtcctcccgctgcgtccgcgctgctagggagaccagctaccagtggaaggctgagcgctgcatggccgacgagaactgcttcaaggtgatgttcctgcagcgcaaagggcaggtgatcatgaccatcgagctcctggacaccgaggaggcccagacggaggaccctgtggaggtccagcacctggctcggtacgtggagcagtatgtggggaccgagggcgcgtccagctcgcccactgagggcttcctcctgaaacctgtgttcctgcagaggaacctcaagaagttccgccgccggtggcagagcgagcaggcgcgggccctgcgcggtgaggccaggagctcctggaagcggctggtgggcgtggagagcgcctgcgacgtggactgccgcttcaagctcagcactcacaagatggtgttcatcgtgaactccgaggactacatgtaccgtcgcgggaccctctgccgggccaagcaggtgcagcccctggtcctgctccgccaccaccagcactttgaggagtggcacagccgctggctggaggacaatgtgacggtggaggcggctagcctggtgcaggactggctgatgggtgaggaggacgaggacatggtaccctgcaagacgctgtgtgagacagtgcacgtgcacggcctgcccgtgacccgctaccgcgtgcagtacagccgccgcccggcctcgccctgacccgccctcatgggcaccgggcaggcgcctcacagagcacagacgtgccctcggccttggtcgtgtcggggccgttttcttgaacgacgtgagaggcatctcccagcccctctgctgccggacagcgcactccagggcaggacgccgcccccgtggctcccggtctcctgtgggcctgctgtgtgccaaacctgagctacctgcacccgagccctggggctcagccccaccacaggggcgggtggacgtgctggccgaggaacaagcaatcatgtttgcgttcccgg

SEQ ID NO: 12655 - DNA, 2193 bp, Homo sapiens
  SIMILAR (55)..(2559): 981254mologous to Homo sapiens hematopoietic progenitor kinase,accession number U66464,Smith-Waterman Score=4344.
atgagttgtgatacaaatggagaagtggaggggggaagggtagacagcaaaacaagaggcaggcaagaagtagaaaggaacacagaaactcatctgggctctggactcaactgtgatattccactgatatttttaacatatgaatggagggggatcctggaatacaagattttcagtgttaagactggagaagttctgggtaaaccaggacaacttggtcatcctactggtcaaacaacattttttgaaactgggacccaggtcacgtcgatgcaagagatgggctcctacagctttgggcagccccaccctgtggctttgcagggtacagctccactccccgctgctttcaccggctggcgtttagcgtctgtggcttttccaggcacacagtgcaagctgtctgtggatctaccaatctggggtctggaggacagtggccctcttctcacagctccacttggcagtgccccagtggggcctctgtgtgggggttctgaccccacatttcccttctgcactgccctaacaggaccctcagctgcaagtctgttggagtttgctagaggtccactccagaccctgtttgcctgggtatcagcagaggtgtctgcagaacaggggtttttcgtgaaccacgaatgctgctgtctgatcgttcctctggaagttttgtctcagaggagtacccggccctgtgaggtgtcagtctgcccctactggggggtgcctcccagagatcgcagtaatcagtgcccctccgggtttaccttagactcagttggacctttttgtgctgatgaggatgaatgtgcagcagggaatccctgctcccatagctgccacaatgccatggggacttactactgctcctgccctaaaggcctcaccatagctgcagatggaagaacttgtcaagatattgatgagtgtgctttgggtaggcatacctgccacgctggtcaggactgtgacaatacgattggatcttatcgctgtgtggtccgttgtggaagtggctttcgaagaacctctgatgggctgagttgtcaagatattaatgaatgtcaagaatccagcccctgtcaccagcgctgtttcaatgccataggaagtttccattgtggatgtgaacctgggtatcagctcaaaggcagaaaatgcatggatgtgaacgagtgtagacaaaatgtatgcagaccagatcagcactgtaagaacacccgtggtggctataagtgcattgatctttgtccaaatggaatgaccaaggcagaaaatggaacctgtattggtgagtgtctggctgtttccgtgactgagatcagtttgccgtcaacaagtcaaatattgatgaatgtaaagatgggacccatcagtgcagatataaccagatatgtgagaatacaagaggcagctatcgttgtgtatgcccaagaggttatcggtctcaaggagttggaagaccctgcatggatattgatgaatgtgaaaatacagatgcctgccagcatgagtgtaagaatacctttggaagttatcagtgcatctgcccacctggctatcaactcacacacaatggaaagacatgccaaggaaaactgccatttaaacaaattgaaagtggggggggccagtaaggaaaaggaaaagagtgatgattttcttgaaaaaggagaaaaaaatctgggtattattaaggtgaccaaaagggttgccaatgtcctgatgctttggaaatctttggattccatacatctagacccttttggaacatcagtgaattatctagattctgcattcagaaatataagaaaccttggcatagtgtcagtgacttctacagatatcagttctttatatgccaaggcacagcatgttgcccggcgtcactacggatgtaacattgtccgaactgaatattacaaggaactagcagccagaattgttgtagctgcagtggcaagtgtatctgtggaatttgcaggctcagaggactgtcatagcaatatacaagatgaaggtttgctcctcgcagctctgctagatgtcatgaaggagggtttccccaccctgccgtgtatcctaagggaactttcagggttggtgattgatctcattgcctacctctgctcaaccactggcatgcttaagataaatttcaaggaaatgttgtcagaagtacttggttaa

SEQ ID NO: 12656 - DNA, 1254 bp, Homo sapiens
  SIMILAR (1)..(258): 951254mologous to Homo sapiens putative p150,accession number U93563,Smith-Waterman Score=429.
atgcctgtagacccagctattcggggggctgacgtggaagaatcacttaagcccaggataatgggattacagtgggcaaaacatcttggaaatgcagtcaaagttacaatcaatgacttgaatgaaaattctgtgacactgattcaggaaaactgccatttaaacaaattgaaagtggtggtggacagtaaggaaaaggaaaagagtgatgatattcttgaagaaggagagaaaaatcttggtaatattaaggtgaccaaaatggatgccaatgtactgatgcatttgagatcttttgatttcatacatctagacccttttggaacatcagtgaattatctagattctgcattcagaaatataagaaaccttggcatagtgtcagtgacttctacagatatcagttctttatatgccaaggcacagcatgttgcccggcgtcactacggatgtaacattgtccgaactgaatattacaaggaactagcagccagaattgttgtagctgcagtggcaagagctgcagcccgatgcaacaaaggcatagaagtactgtttgcagtggctctggaacattttgtgttggtagttgtgagagttttgaggggacctacttcagcagatgaaacagccaagaagattcaatacctgatccattgtcagtggtgtgaagagagaatttttcagaaggatggtaatatggtagaagaactcaggattaagaaactcactcaaaaccacacaacgtcatggaaactgaacaacctgctcctgaatgactaccgagtaaataacgaaatgaaggcagaaataaataagctctttgaaaccagtcagaacaaagacacaatgttacagaatctctgggacacagctaaagcagtgtttagagggaaatttatagcactaaaagcacacaagagaaagcaggaaagatctaaaattgacaccctaacatcacaattaaaagacgtagagaaacaagagcaaacaaattcaaaagctagcagaagaaaagaaataactaagatcacagcagaactgaaggagatagagacacaaaaaacccttcaaaaactcaatgaatccaggagctggttttttgaaagatcaacaaaacagactgctagccagactaataaagaagaaaagagagacaataaaaaaatgattaaggggatatcaccacccatcccacagaaatacaaactaccatcagagaatactataaacacctttatgcaaataaactag

SEQ ID NO: 12657 - DNA, 1713 bp, Homo sapiens
  SIMILAR (383)..(114): 931254mologous to unidentified cloning vector beta- galactosidase alpha-peptide,accession number M77169,Smith-Waterman Score=445.
atgggcaaagacttcatgactaaaacaccaaaagcaatggcaacaaaagccaaaactgacaaatgggatctaattaaactaaagagcttctgcacagcaaaagaaactatcatcagggttaacaagcaacctacagaatttggggaaattgaaataaaaagtacaaaagaaacaagtaaaggaacagttaatgacatacaaagggaaccaagagactatggcctcctgaaagccagatacataaagacttctggtaacgccactgttgatcacttatccaagtatctggctgtgaggttagctttagaagaacttcgaagcaaaggtgaatcaaaccagatgaaccttgatacagccagtgagaagcagtataccatttatatagcaacagccagtggccagttcactgtattaaatggctctttttctttggaattggtcaggataatgggattacagtgggcaaaacatcttggaaatgcagtcaaagttacaatcaatgacttgaatgaaaattctgtgacactgattcaggaaaactgccatttaaacaaattgaaagtggtggtggacagtaaggaaaaggaaaagagtgatgatattcttgaagaaggagagaaaaatcttggtaatattaaggtgaccaaaatggatgccaatgtactgatgcatttgagatcttttgatttcatacatctagacccttttggaacatcagtgaattatctagattctgcattcagaaatataagaaaccttggcatagtgtcagtgacttctacagatatcagttctttatatgccaaggcacagcatgttgcccggcgtcactacggatgtaacattgtccgaactgaatattacaaggaactagcagccagaattgttgtagctgcagtggcaagagctgcagcccgatgcaacaaaggcatagaagtactgtttgcagtggctctggaacattttgtgttggtagttgtgagagttttgaggggacctacttcagcagatgaaacagccaagaagattcaatacctgatccattgtcagtggtgtgaagagagaatttttcagaaggatggtaatatggtagaagaaaacccatatagacagctgccttgtaactgtcatggaagcatgcctggaaagacagcaatagaacttggacctctgtggtcaagttcccttttcaatactggattcctcaaaagaatgctatttgaatctcttcaccatggtttggatgacattcagaccctaataaagacattaatctttgaatcagagtgtacgcctcaaagtcagttttcaattcatgcatcttcaaatgtcaacaagcaagaagaaaatggtgtatttattaaaactacagatgacaccacaacagataattacattgcacaaggctttcgagtaagccgaactcattttgacccaatgggtgtacgcacagatgcacctctgatgcagtttaaatctatccttttaaagtacagcacccccacctacactggaggacagtcagaaagccatgtccagtcagcatctgaagatacagtaactgaaagagttgaaatgtcagtgaatgacaaagcagaagcaagtggctgcagaagatgcttccagaagaaatcaaccctactgacacctcgatttcagatttctggccttcagaactgtgagaataactttaagccaccaagtttggaataa

SEQ ID NO: 12658 - DNA, 860 bp, Homo sapiens
  SIMILAR (12)..(713): 921254mologous to Homo sapiens bG120K12.3.1 (novel protein similar to archaeal, yeast and worm N2,N2-dimethylguanosine tRNA methyltransferase (isoform 1)),accession number AL109865,Smith- Waterman Score=1126.
cggacgcgtggggtaatatggtagaagaaaacccatatagacagctgccttgtaactgtcatggaagcatgcctggaaagacagcaatagaacttggacctctgtggtcaagttcccttttcaatactggattcctcaaaagaatgctatttgaatctcttcaccatggtttggatgacattcagaccctaataaagacattaatctttgaatcagagtgtacgcctcaaagtcagttttcaattcatgcatcttcaaatgtcaacaagcaagaagaaaatggtgtatttattaaaactacagatgacaccacaacagataattacattgcacaaggaaagagaaaaagtaatgaaatgatcacaaatttaggcaagaagcaaaagactgatgtcagtactgaacatcctcccttttattacaacattcacagacacagcattaaaggaatgaatatgccaaagttaaaaaagtttttgtgctatttatctcaagcaggctttcgagtaagccgaactcattttgacccaatgggtgtacgcacagatgcacctctgatgcagtttaaatctatccttttaaagtacagcacccccacctacactggaggacagtcagaaagccatgtccagtcagcatctggaagatcacggaacctggaaaagttgaaaggtcggtgattgacaaagcaggaagcaagtgggctgcagaaggatgggtaaacgtggagaaggattgggttctcaggtgtcttgtattaggtgggccttattagttctctataccaactgtagttctttttctgttctttcaattcagtagagtaaaaataaaaaacagtgtcattttcattcaaaaaa

SEQ ID NO: 12659 - DNA, 1371 bp, Homo sapiens
  SIMILAR (295)..(396): 761254mologous to Homo sapiens PRO1546,accession number AF116638,Smith-Waterman Score=160.
atggatgaagctggaaaccatcattctcagcaaactatcacaaggacaaaaaaccaaacaccgcatgttctcactcacagaaagccgtctgagacatcttgcaccacacaaatctccgacttggccttcatacagccttttgtgaaagcaaatataattacagagcaaaagagaggaacaaaacagcagattttgaatctccccctgaatggccagaaaaatgagcaggcaactggagatgaggacatggatgaagctggaaatcatcattctcagcaaactaacacaagaacagaaaaccgaacaccgcatgttctcactcataagtgggaactgaacaatgagaacacatggacacgaggaggggaacatcacacaccagggcctctccagggctctgctctcggaatagctctaacccccccaaaagggcaagaaccggttttaataatgcagaattatgcctctttactaactactgaatacgctttatttcggatgccaaaccagaaacaccttttcctctatgctcaacacatgtgctctggtgaaattcacaaaactcctagacctaatcatggagcatatgaagtaacacagtccacgcatagtgttcccctgcatatgggatgtattgcactatgtaaatgtgacttaaccctgttgaatcacactgaatctttgttgtgcatgacattcaaggtttggcagccacctccaagcctcatcacagatgctaatagcaaatcaactgaaatggatgatgcggaattaagatttggtgtaagacaactagcccaagtgtctggagtagttacaatggaatgcacgcatgtagccgagctgcaagtggaagcccagttttctgactcccaggcacttctcccttcctcttccactgctttgcatggcgagaagagtttggcacagctctgttattcccatttcacaaatacagtaactgatgcagttagaacaaagggaatattttggagctcacttcctagtcaatatcaggagcttaatgatctcactgaggtaaaatttatgaggattcagacttgccattgctgggttgatctttgtggttcttggaaggggctccgaggtgggagtcctgctgcaaatgcagctctggctggacctgccctgcagttagccctgagggcaccaatgatctcagatgcaagtacttgcccgggaggtgccagtgcaaggatggacgctggctctagtctggtccacacactgataggtaacctctctgaagtactgtattgtacaaggagttactctttcattctttcatctagcagcaactatgtagtgagcatcaacaaagaacctattgaaagtctaactaaacggtga

SEQ ID NO: 12660 - DNA, 1257 bp, Homo sapiens
  SIMILAR (2701)..(3828): 951254mologous to Macaca fascicularis hypothetical protein,accession number AB052142,Smith-Waterman Score=1837.
atgggcaaggacttcatgtcaaaaacaccaaaagcaatggcaacaaaagccaaaattgacaaatgggatctaattaaactaaagagcttctgcacagcaaaagaaactaccatcagagtgaacaggcaacctacagaatgggagaaaatgtttgcaatctactcatcagacaaagggctaatatccaaaatctacaaagaattcaaacaaatttacaagaaaaaaacaaacaaccccatcaaaaagtgggtgaaggatatgaacagacacttctcaaaagaagacatttatgcagccaaaaaacacatgaaaaaatgctcatcatcactggccatcagagaaatgaaaatcaaaaccacaatgagataccatctcacaccagttagaatggcaatcattaaaaagtcaggaaacaacagggacatggatgaagctggaaaccatcattctcagcaaactattgcaaggacaaaaaaccaaacaccatatgttctcactcacaggattgtttttgaagacttgcaaaggtcctgtatgaagtacaaccagtgtagcacttggcacatgggaaacaggcactccacacagaaggcctggtctcctcttacacataaacatcctcatggacccaggctgcttctagctcatgatctgccaactcaaagatgtaaccttcattattctcatggtctacatggggtgcacctgcatttcagcagcagcagagtggaggaggggacagtgaagaagagaagcaacaaagagtgcatgccggctgcctttccaggaagggagatagaaatctcaggatctcaacaaggtacaaataacgcacattcccagaacatagagccagggacagtcccctctcagttctcttctaaaggtggttctggcacaacagttgataaagctgtgtccctgaagggctttttagccctgggtgcttcctgtaaaacttgtcagcttccactggatctgcgggactgtgtccctcacaggctggacacccggccctgcggagaggacttgattaaacaagaaactctgttcagcttcatgcaggagcgccagaaaagatacgccaagtatgccgagcagatccagaaagtgaacgagatgtccgccatcctccgccgcatacagatgggcatcgaccagactgtgcccctgctggacaggctcaacagcatgctgcccgagggcgagcggctggagcccttcagcatgaagcccgaccgcgagctcaggctgtag

SEQ ID NO: 12661 - DNA, 462 bp, Homo sapiens
  SIMILAR (75)..(1): 761254mologous to Homo sapiens Human secreted protein, SEQ ID NO: 7217,accession number G03136,Smith-Waterman Score=95.
atggatgaagctggaaaccatcctcagcaaactatcgcaaggacaaaaaaccaaacacctcatgttctcactcacaggtcagaaccggatgcaagacccttcaaagaagcctccaaaacaaaggtcttcaaaggcatcaaccgatttttacaacttctttccaagggtgaacttagtcctgctgattggcgtgtaacggaaaagccagtggctgctggggatgtacctgctgatgcccagttcaaagggagacagtttccggacgcccaacaatcacagggcggcccaggaccgagagagagcaatagactcgcctcttgcttccgcatccccagttctggtccaggtggcactgaacccaattatctccaaggacggcgagagtcagccagggccggcaggaaccatcacattatgctccttggggaggaggaacgctgttggtgccctcttagcacttaa

SEQ ID NO: 12662 - DNA, 3239 bp, Homo sapiens
  SIMILAR (466)..(2532): 951254mologous to Homo sapiens putative p150,accession number U93574,Smith-Waterman Score=3514.
atgtactcacatgtgatcacggtgtgccggcatgtgaagaatggggacattctgctactgaaccgacagcccacactgcacagaccctccatccaggcccaccgtgcccgcatcctgcctgaagagaaagtgctgcggctccactatgccaactgcaaggcctataatgccgactttgatggagacgagatgaatgcccatttcccccagagtgagctgggccgggccgaggcctacgtcctggcctgcactgatcagcagtaccttgttcccaaggatggccaaccattggcgggactgatccaggatcacatggtttcaggggcaagcatgactactcggggttgctttttcacccgggagcactatatggagctggtgtaccgaggactcacggacaaagtggggcgcgtgaagctcctttctccttccatcctgaagccctttccgctgtggacaggaaaacagcatataaacagaaccaaagacaaaaaccacatgattatctcaatagatgcagaaaaggcctttgataaaattcaacaacccttcatgctaaaaactctcaataaattaggtattgatgggacgtatctcaaaataataagagctatctatgacaaacccacagccagtatcatactgaatgggcaaaaactggaagcattccctttgaaaactggcacaagacagggatgccctctctcaccactcctattcaacatagtgttggaagttctggccagggcaatcaggcaggagaaggaaataaagagcattcagttaggaaaagaggaagtcaaattgtccctgtttgcagatgacatgattgtatatctagaaaaccccactgtctcagcccaaaatctccttaagctgatgagcaacttcagcaaagtctcaggatacaaaatcaatgtgcaaaaatcacaagcattcttatacaccaataacagacaaacagagagccaaatcatgagtggactcccattcacaatcacttcaaagagaataacatacctaggaatccaacttacaagggatgtgaaggacctcttcaaggagaactacaaaccactgctcaaggaaataaaagaggatacaaacaaatggaagaacattccatgctcatgggtaggaagaatcaatatcgtgaaaatggccatactgcccaaggtaatttatagattcaacaccatccccatcaagctaccaatgactttcctcacagaattggaaaaaactactttaaagttcatatggaaccaaaaaagagcccacattgccaagtcaatcttaagccaaaagaacaaagctggaggcatcatgctacctgacttcaaactatactacaaggctacagtaaccaaaacagcatggtactggtaccaaaacagagatatagaccaatggaacagaacagagccctcagaaataatgccgcatatctataactatctgatctttgacaaacctgacaaaaacaagcaatggggaaaggattccctatttaataaatggtgctgggaaaactggctagccatatgtagaaagctgaaactggatcccttccttacaccttatacaaaaattaattcaagatggattaaagacttacatgttagacctaaaaccataaaaaccctagaagaaaacctaggcaataccattcaggacataggcatgggcaaggacttcatgtcgaaaacaccaaaagcaatggcaacaaaagccaaaattgacaaatgggatctcattaaactaaagagcttctgcacagcaaaagaaaccaccatcagagtgaacaggcaacctacagaatgggagaaaatttttgcaacctactcatctgacaaagggctaatatccagaatctacaatgaactcaaacaaatttacaagaaaaaaacaaacaaccccatcaaaaagtgggcaaaggatatgaacagacacttctcagaagaagacatttatgcagccaaaaaacacatgaaaaaatgctcatcatcactggccatcagagaaatgcaaatcaaaaccacaatgagataccatctcacaccagttagaatggtgatcattaaaaagtcaggaaacaataggtgctggagaggatgtggagaaataggaacacttttacactgttggtgggactgtaaactagttcaaccattgtggaagtcggtgtggcaattcctcagggatctagaactagaaataccatttgacccagccatcccattactgggtatatacccagaggattataaaccatgctgctataaagacacatgcacacgtatgtttattgcggcactattcacaatagcaaagacttggaaccaacccaaatgtccaacaatgatagacgggattaagaaaatgtggcacatatacaccatggaatactatgcagccataaaaaaggatgagttcatgtcctttgtagggacatggatgaagctggaaaccatcattctcagcaaactatcgcaaggacagaaaaccaaacaccgcatgttctcactcgtgttacttttgtctcccaaagctatcatactgtgtctggaattggttccttccagtgggttcttggtcttgctgacttcaggagtgaagccgcagaccttcacagactgaagctacagaccttcgcagtgagtgttacagcttttaaaggtagtgcagatgcaaagagtgagcagcagcaagattgtatcgtgaagagtgaaagaacaaagcttccacagtgtggaaggggacccaagcagtttgccactgctggctcggaaagatccacctacgacctcacgtcctcagaccgaccagcccaagaaacatctcagcaatttcaaatccgtgggttcgtggtcttgctggcttcaggagtgaagctgcagaccttcctggtgagtgttacagctcataaaggctgcccagacccaaagagtgaacagcagcaagatttattgcaaagtgtgaaagaacaaggattccacagcatggaaggggacccgagcggattgctgctgctggctcacagaaaagttctccaagtccccacccatcccagaagccgagctggcttcacctctcactggcaccccttgcgggactttgcggcacccagcctgggcactctggcagcccagagggagctggctcctgctgttgcctctccctccacacctccccgtgagcagaaggagccaggctctggccttggccagccccagtga

SEQ ID NO: 12663 - DNA, 369 bp, Homo sapiens
  SIMILAR (4621)..(5370): 641254mologous to Yersinia pestis putative lipoprotein,accession number AL117211,Smith-Waterman Score=836.
ggtcacagattgatttacagaagaagaagcggcgagcgccagctccccctccaccacagccaccaccaccgagtcccctgatccccaaccgcactgaggataaggaggagaacaggaagagcacgatggtttattgctgtgcgtcattccctactcaggccaagcgcttctgatggacgggcctcttcctgacctcggacctttcccagtgtctcttctgccctggctctgattttcctgttggtcttcctcctttcaggataaaagggctcattgtatacccagaatttacttcctttggggtttacatataaatgcattaataacagagatttgtttgattgaggtttatatttttttgaaggaggc

SEQ ID NO: 12664 - DNA, 1482 bp, Homo sapiens
  SIMILAR (525)..(355): 911254mologous to Homo sapiens Human secreted protein cw976_1,accession number W69430,Smith-Waterman Score=265.
atggaagtggcaaagaatccaacctttaaagattatccagaagggtccgcagatgcagatgatgatgcagaaccagttggagctgaaatgtctacaggaaccgcactggcagttgtctggagctcacagggtggtgcattcacacagttgcaccaagccatgcacgtgagtattcacagcagcactgttgacagcatccccaggctcaccccaaccgaatccctttccacagtccagcacataaagcgtggtgtattcacaccgagtgccactgcacagcaacgagccacacagcagcggatgagcctcagagcaaaagaagccagatatcatgatacaaagccccaaaacaggcagagccagcctccactcatgccaccaggagagtggctgctgtcaggagagggtggggaatcagaatgttggcccgaggatccttgggtggtactgactgtgagaaacacgcattcacccgtccaaacccaaagaatgggctcggagacacgaaaaacagcagaagcgagacttttaatggcggtcttggaagatcgggcgtcttgtaggcaggcacacccggggcaggtatctcttgggtcacagattgatttacagaagaagaagcggcgagcgccagctccccctccaccacagccaccaccaccgagtcccctgatccccaaccgcactgaggataaggaggagaacaggaagagcacgatgggtggtggacggcaggtgccacaaaagcctcccagaggcactgctcggggtccaccccagttagtgcttcccccacccccgccctaccctcctcccgacacagacgtggtggagcctctcagctttcccggggaaggcgctggttccgaggcctcagacccgatacccaaacagatgtcagctaggagccagtgttctcatattagaatgaacctcagagtgtctgtagagagagacagctgtccggcacagccgtcgtgtgatctggatggtgggctaactcaggcaggctgtgggcacacctgtagagatcgcactcaagagctgggaggacgtccttcagcagtggaacctccccacctgctgcccttagacctttggacaggtctgagccggaaggagagcgaagtggcggagagaaaaccagactcaccttcgtcttgccttgtggctccatttcctccttgtgccctcttgccaactccataccagttcattcccccaggaatagaatatggcaaaggtagtgggatgtcacttcttacatccaagattagggttgaaaaggactgtggtctccatcttgggcaccctcgctcacttgctcactctgaggaaagccagccaccacgctgtgagctgctctacggagacccacatggcaaggagctgagggagacttcagccaactgccagcgaggcgctgaggccctttgtccactgatcatgagcctagaaacctgccaacagccacttgagtga

SEQ ID NO: 12665 - DNA, 924 bp, Homo sapiens
  SIMILAR (193)..(309): 1001254mologous to Homo sapiens dJ236A3.1 (phenylalanine-tRNA synthetase),accession number AL133473,Smith-Waterman Score=205.
atgacaaaatctccaaaagcaattgcaacaaaaacaaaaattgacaaatgggatctaattaaactaaagagcttctgcacaacagaagaaacaataatcagagtgaaaaggaaacctacagagtgggagaaaagttctgaaatctacccatctgacaaaggtctaatatccagaatctacagccagggtgggaatgtcggatatgcaggtcctcctgatcaggcagatgtggtgatgagtatgactactgatgacaatgtaaaaatgttttcagtgtgtgcattggctcctagtcagctgagcccaggggtcttaaaaccaaatgaaatgacaactaagaaaaaagagttaaaatctgtgaggactctggaaaacaagaaaggaggacttcagaagaactacaaacaaaaatactgcaagaagggaaaaagattgaatcagattctgacgacacagaaaggtttcaatgttaaccacttggatatcgctccaagatatgccagtatcttaatgggcatttcgaatggtgttggcacattgtcaggaatggtttgtcctatcattgttggtgcaatgacaaagaataagtcacgtgaagagtggcagtatgtcttcctgatcgctgccctagtccactatggtggagttatattttatgcaatatttgcctcaggagagaaacaaccctgggcagacccggaggaaacaagtgaagaaaaatgtggatttattcatgaagatgaactcgatgaagaaacaggggacattactcaaaattatataaattatggtaccaccaagtcttatggtgccacaacacaggctaatggaggttggcctagtggttgggaaaagaaagaggaatttgtacaaggagaagtacaagactcacatagctataaggaccgagttgattattcataa

SEQ ID NO: 12666 - DNA, 801 bp, Homo sapiens
  SIMILAR (154)..(288): 1001254mologous to Homo sapiens Human secreted protein 1,accession number W63681,Smith-Waterman Score=224.
atggagaaggaggcagtgtccgtgactgtgctgctctccgcagccccctgcctgctgtcctgtttcctcggctcctcggtgtctggactggcgttctgggtttcccagcagaaaactaaagggccagagaggtgtaaaaacacacaccacttggcaggaacaggaaatatagtggtcattatgattagctatccaaaaggaagagaaattttggagctggtgcaaaaaggaattccagtaacgatgaccataggggttggcacccggcatgtacaggagttcatcagcgcttcctggacactgttgttaaatcagaaagacctgcccgaagccgctcttgaacgccgactcttccgctttccgggtacccgtcttttgtccgcggcgatgagagagcggccagacgcccagctcgcccctcgccgggcatcagcctcgctcccctccccgtctatcccggcccgaggggccctggcgccggctcgctccgtccccgcggccgtaaagcgcgctgttacacgactgcgtcgcaaacaaaacacgtcggggaaaccagaccgccgcggagagggacagcgcccagcgaaagcgaggctgatggagcgaagccaggaagaggatgcggagacgcggggagagcccggggactgcatgcgtctgcgcagctgcgaggttaagccgccctttggcggtccccaggacggttcctggtgccagacggtcccacccctcatttccttccccatatttggcaaccagaccagcatccaggacaacataaactatgccactggttgttag

SEQ ID NO: 12667 - DNA, 1708 bp, Homo sapiens
  SIMILAR (13)..(1158): 881254mologous to Homo sapiens phenylalanine-tRNA synthetase,accession number AF097441,Smith-Waterman Score=1714.
gggctgcgcgcccgacacgcgcttcttcgtgcccgagcccggcggccgaggggccgcgccctgggtcgccctggtggctcgtgggggctgcaccttcaaggacaaggtgctggtggcggcgcggaggaacgcctcggccgtcgtcctctacaatgaggagcgctacgggaacatcaccttgcccatgtctcacgcgggaacaggaaatatagtggtcattatgattagctatccaaaaggaagagaaattttggagctggtgcaaaaaggaattccagtaacgatgaccataggggttggcacccggcatgtacaggagttcatcagcggtcagtctgtggtgtttgtggccattgccttcatcaccatgatgattatctcgttagcctggctaatattttactatatacagcgtttcctatatactggctctcagattggaagtcagagccatagaaaagaaactaagaaagttattggccagcttctacttcatactgtaaagcatggagaaaagggaattgatgttgatgctgaaaattgtgcagtgtgtattgaaaatttcaaagtaaaggatattattagaattctgccatgcaagcatatttttcatagaatatgcattgacccatggcttttggatcaccgaacatgtccaatgtgtaaacttgatgtcatcaaagccctaggatattggggagaagcctgggggatgtacaggagatgcctcctgccagaatctcctcctgggaagggatccagctggcaaatttgagtctagctttaccagatgatgacgggaagtggatggacaggcagtcccacccttcagccttccccttgctggattcttgaggccacagtgttgattccccagctttcaaaggagatgcaggagaaaatacggcattgctagaagccggcaggagtgactctcggcatgggaggacccatctcctagcacacgtgcccacttgaagtggcaccaacagaagtttggcttgaactaaaggacattttatttttttttactttagcacataatttgtatatttgaaaataatgtatattattttacctatttagattcttgattttgattattacaaaggactaaggatattttcttcttggaaggagacttttccgattagtcctcatatatttatctacttaaaataggagtgtttaccatgaacagtgtgtttgctttcagactatttacaaggacaactgggggcaggtactctaaatataaaggaccaggtggtgtttcctaaataattggctgcctatggttctgtaaaaacccagttaattctatttttcaaggtttttggcaaagcacatcaatgttagactagttgaaagtggaattggataattccaattccgataattggtccccatggggctttcccctggaggaaaggttttttttgttgtttttttttttaagaacttgaaacttgtaaactgagatgtctgtagcttttttgcccatctgtagtgtatgtgaagatttcaaaacctgagagcactttttctttgtttagaattatgagaaaggcactagatgactttaggatttgcatttttccctttattgcctcatttcttgtgacgccttgttggggagggaaatctgtttattttttcctacaaataaaaagctaagattctatatcgcaaaaaaaaaaaaaaaaaa

SEQ ID NO: 12668 - DNA, 489 bp, Homo sapiens
  SIMILAR (69)..(164): 401254mologous to Mycobacterium tuberculosis SEQ ID NO 15A',accession number AX005206,Smith-Waterman Score=58.
  misc_feature (1)...(489): n = a,t,c or g
taggcctttgtgggtcacattaaggagcccccactcctccctccgcctcnccggccattggaccgtgcgggcagaacccgtggactggacccacggcctcagccgaaacgcgtcccgggcgcggaaaccctcggccgccgtggaaccttcccgggaagctctccccgcgcgggtgaaatgcgtccgaagacagggaaccgcttcccggagccgctgggaaggaggacggtacggaggcccgggagaccctcggcgcatgtccgcgaacgatgagtatgaggaagatgtagcccctcaccgttggggcacggcgcttggaaggtgcggcaaaggactctgtctatcccctcgggcagggtatctcgagtaagtcacctcggcctccttagaaatgcttcaggtgacgggtctgccttccctccgagtactgcgagctgccgggcatcgcaggaactcgtgaacctggcgtggtctgcgcctcccctagct

SEQ ID NO: 12669 - DNA, 988 bp, Homo sapiens
  SIMILAR (342)..(689): 361254mologous to Chlamydomonas eugametos amino acid feature: N-glycosylation sites, aa 41 .. 43, 46 .. 48, 51 .. 53, 72 .. 74, 107 .. 109, 128 .. 130, 132 .. 134, 158 .. 160, 163 .. 165; amino acid feat,accession number L29028,Smith-Waterman Score=121.
cccacgcgtccggtgtgaataaagtaaatgagctggagggggcgggacaagatttcaaaaagcaccactcatacacccaggactggcaaagctgctggcagtaagctctatcatggggctcccccactgcaggtgagctgattggcctcagctggcaccatccatgctcagtgtttgccctgaggacaagaagacatggcaaaaaagaggaaagtacagaacacactcccacctggctggtggggatatagatagtgcagctgctgtggaaaccttcagctccacagaaagaggaatatcagagctgctggtgttattgatgcttctggtgttactactggaaactgtgtccagcccaaagcgacatcagagggcctggcacagcaactacgaccccatcctgtcccagtcctgcggcacatctccaatggctcccactgccaagggcatgccccagccgtgcatcaaagacctccccctggaatcatacgcagatctcctgccctcctccaactctgccctggcacacgccgccccccacctggcatcctctgctcacctccgcctccccggccattggaccgtgcgggcagaacccgtggactggacccacggcctcagccgaaacgcgtcccgggcgcggaaaccctcggccgccgtggaaccttcccgggaagctctccccgcgcggatcctacaaccaggattctgtgttgggggccaagatgccctgctgaagcctctattccctgaggctgcttcgcaggagatagacctcctgacaaggctttcgatgtgcagacacccaaaggatggagaaagggagtggaacagtcccagcatccctgaagcagatgcagtggaggcagaaaggcaccaggctctgccgtggccgcttcctcctgaccgactacaaggccgcacttccgggccgttaccccggcggaacggaggcctgcggtcgcggcggcgcaggggaaacccctag

SEQ ID NO: 12670 - DNA, 3232 bp, Homo sapiens
  SIMILAR (1324)..(1043): 931254mologous to Escherichia coli O157:H7 GTP-binding protein in thiophene and furan oxidation,accession number AE005601,Smith-Waterman Score=437.
atgcacacgttctctcagttgcagaagctgaagggcctgcagccgcccgtggtagtgctccggaacaagatcaagccctgcttaaccattgactcgtcgccgctgtcagcagacctgaagaagcctctcgcagtcatcgtgtgccctgggtggaagaaggcccaatttatttttgaattattgggagaatatagcatgtcctccaggcctcttcatcctgtgctattaacaattgggctccataaagaggaagccaaaaatacaaagcttccaaggggctgtgatgtgattgttacgaccccatacagcctgctgaggcttctcgcctgtcagagcctgctgttcctcaggctctgccacctgatcctggatgaggtagaggtgctattcttggaagccaatgaacagatgtttgctatattagataactttaaaaaaaatattgaagttgaagaaagggaatctgcaccacatcagattgttgcagttggagttcattggaacaaacatatagaacatctcatcaaagagttcatgaatgatccctacattgtgatcacagccatggaagaggctgctctctatggcaatgtccaacaggtagtagaaagcagttcaatattttgcttgaagatgcataaagaaatgatttttaacttacaaaatgttttagaacagtggaagaagaagttaagttctggctctcaaattatattagccctcacagacgactgcgtcccactcttggccatcaccgatgccacgtgtgtgattcacttcagtttccctgcctcaccaaaagtttttggtggacgcctgtattgcatgtctgatcattttcacgctgaacagggttctcctgcagaacagggagataagaaagccaaatctgtcttgctgctgacggagaaagatgcgagccatgcggtgggcgtcctgcgctacttggagcgagcggacgccaaggtccccgcagagctgtacgagttcaccgcaggagttctggaagccaaagaagataagaaagccggaaggcctctttgtccatatctgaaggcttttggtttttgcaaagacaaaaggatctgtcctgaccgacaccgtattaatccagaaacggacttgcccaggaaactgtccagccaagccctaccttcatttggatacattaaaataatacctttttatattttgaatgcaacaaattactttggccgtatagttgataaacacatggatctttatgcaactctcaatgctgaaatgaatgagtattttaaggattctaataaaacaactgtggaaaaggtggagaagtttggattgtatggattagcagaaaaaacgctttttcacagggttcaggtgttggaagtgaaccaaaaagaagacgcctgggccctggatgacatccttgtagagttcatcgatgaaggcaggacggggctcgtcacaagggaccagctgctgcatctcccagaacatttccacacacttcccccgcaggctgtggagtttattgtctgtagggtgaaacctgctgacaacgaaatagaatggaatccgaaggttactaggtacattcatcataaaattgttggaaaattgcatgatgcaaaagtgatcctggctttgggaaatacagtttggattgatccaatggtgcacattacaaacctttccagtttaaaaacctctgtcattgattataatgttcgagctgaaattttgtccatgggcatgggcattgataatccagaacacatagaacaactgaaaaaattacgcgaagatgctaagataccagcttgtgaagaaagcctaagccagaccccggagcttaacatacccgtggtcacgaacacagagcatacagcactgcgaggtttcacagagagcctgctagaagagaccccatatcagacagctcctggagaacaggggatcctgacaggcttgaattgtctcttcaaagatgtacaaaaactgagtcacattgtcacccacgaggaagggagctggctggctggggagcaggggacgcctccagcagaagatgctgcttgcctgcagagcccccagcctgaggacacgggtgcagaaggaggggctgagtccaagacgagctcagaaaaccagaagcctggttcttcatcacagtcccatgtgctgctcttgctggccgtgactgtggctggtgaggtgagaggtgcaggtgaggagaaaggatcttccggagccgagtgggtttctggtatttggacagtcagtgtctccatgtggctagaaaagtatgatgcatccattgtgctgccacacgctggatctgccagccctgctgcagctggtcggtctcaggtggaccccgtgccctcctctgcagacgtgacacccgcatgccactgtgccaggcagggcttctggaggacgcagaaccccaacgtggcttttgattttgatcactgggaagactgtgaagaggacagccacttccccaaggtagtgaattctaaaaacctgccgtacacagtgacagaggtggttgaagacagtagcagcacttcagaggatgacgacagtgagagtgaaagagaaggctcttgggaagtagaaagttctggtgtttttgctggtgaaggttttgactgtggagctcttctaacacccatatcagtgtctgtttctctgcatgtggctgctgccctgttggtggagctctgggggcagagaccaggccgccgtccagtggcgccccgtgcgcaccagctgcctgctgtttacacccagagtccttcccccgaccagggctacaagaagcaggcagcactgaagctgggggacatcagtcaccgtctgctggagcagcaggaggacttcgccggcaagacagcccagtaccggcaggagatgcggcacctgcaccaggtgctgaaggacaagcaggaggtgctggaccaggcgctgcagcagaacagagaaatggaaggtgaacttgaagttatttgggaatctaccttcagggaaaaccgaagaatccgagaacttctccaggacacactcacgaggacaggcgtgcaggacaaccccagagctctggttgcccccagcctcaatggcgtctctcaggcagacctgctggacggctgcgatgtctgctcctatgacctgaagtctcatgcccccacctgctagaatctgcgggagcccgtggtgtagcctcctctggcctgag

SEQ ID NO: 12671 - DNA, 2576 bp, Homo sapiens
  SIMILAR (245)..(448): 921254mologous to Escherichia coli O157:H7 putative transport,accession number AE005239,Smith-Waterman Score=299.
ccacgcgtccgccggctgcacggtcgcaccggcagcggctcaggctccggctcctctcccgctgcagcagccgcgctgccggccccactgggctcggatccggccccggccccctcggcaccgcctgctctggccccggccccggccccgcggaccatgcgctgggcgcccccaggggaaacccgacccggccaagggcccgcaaagacgaggctcccgggccggggcccctcccggccgcccagctctcggccggcgccctgccccgcgtcccggagccgcgtgagcctgcggggccatggagcgcgcgccgcccgacgggccgctgaacgcttcgggggcgctggcgggcgatgcggcggcggcgggcggggcgcgcggcttctcggcagcctggaccgcggtgctggccgcgctcatggcgctgctcatcgtggccacggtgctgggcaacgcgctggtcatgctcgccttcgtggccgactcgagcctccgcacccagaacaacttcttcctgctcaacctcgccatctccgacttcctcgtcggcgccttctgcatcccactgtatgtaccctacgtgctgacaggccgctggaccttcggccggggcctctgcaagctgtggctggtagtggactacctgctgtgcacctcctctgccttcaacatcgtgctcatcagctacgaccgcttcctgtcggtcacccgagcggtctcataccgggcccagcagggtgacacgcggcgggcagtgcggaagatgctgctggtgtgggtgctggccttcctgctgtacggaccagccatcctgagctgggagtacctgtccgggggcagctccatccccgagggccactgctatgccgagttcttctacaactggtacttcctcatcacggcttccaccctggagttctttacgcccttcctcagcgtcaccttctttaacctcagcatctacctgaacatccagaggcgcacccgcctccggctggatggggctcgagaggcagccggccccgagccccctcccgaggcccagccctcaccacccccaccgcctggctgctggggctgctggcagaaggggcacggggaggccatgccgctgcacaggtatggggtgggtgaggcggccgtaggcgctgaggccggggaggcgaccctcgggggtggcggtgggggcggctccgtggcttcacccacctccagctccggcagctcctcgaggggcactgagaggccgcgctcactcaagaggggctccaagccgtcggcgtcctcggcctcgctggagaagcgcatgaagatggtgtcccagagcttcacccagcgctttcggctggctcagggacaggaaagaggccaagtcgctggccgtcatcgtgagcatctttgggctctgctgggccccatacacgctgctgatgatcatccgggccgcctgccatggccactgcgtccctgactactggtacgaaacctccttctggctcctgtgggccaactcggctgtcaaccctgtcctctaccctctgtgccaccacagcttccgccgggccttcaccaagctgctctgcccccagaagctcaaaatccagccccacagctccctggagcactgctggaagtgagtggcccaccagagcctccctcagccacgcctctctcagcccaggtctcctgggcatctggccctgctgccccctacccggctcgttcccccaggggtgagccccgccgtgtctgtggccctctcttaatgccacggcagccaccctgccatggaggcgccttcctgggttggccagagggcccctcactggctggactggaggctgggtggccggccctgccccccacattctggctccaccggggagggacagtctggaggtcccagacatgctgcccaccccctgctggtgcccacccttcgcagttactggttggtgttcttcccaaagcaagcacctgggtgtgctccaggcttcctgccctagcagtttgcctctgcacgtgcacacacctgcacacccctgcacacacctgcacaccgtccctctccccggacaagcccaggacactgcctttgctgccttctgtctcttgcataagcctcaggcctggccctttcacccctcttcccaccaactctctctgcccccaaaagtgtcaaggggccctaggaacctcgaagctgttctctgcttttccattctgggtgttttcagaaagatgaagaagaaaacatgtctgtgaacttgatgttcgtgggatgtttaatcaagagagacaaaattgctgaggagctcagggctggattggcaggtgtgggctcccacgccctcctccctccgctaaggcttccggctgagctgtgccagctgcttctgcccaccccgcctctgggctcacaccagccctggtggccaagcctgccccggccactctgtttgctcacccaggacctctgggggttgttgggaggagggggcccggctgggcccgagggtcccaaggcgtgcaggggcggtccagaggaggtgcccgggcaggggccgcttctcctt

SEQ ID NO: 12672 - DNA, 2145 bp, Homo sapiens
  SIMILAR (1)..(240): 1001254mologous to Escherichia coli sms,accession number X63155,Smith-Waterman Score=400.
atggagcgcgcgccgcccgacgggccgctgaacgcttcgggggcgctggcgggcgaggcggcggcggcgggcggggcgcgcggcttctcggcagcctggaccgcggtgctggccgcgctcatggcgctgctcatcgtggccacggtgctgggcaacgcgctggtcatgctcgccttcgtggccgactcgagcctccgcacccagaacaacttcttcctgctcaacctcgccatctccgacttcctcgtcggtaaatccccagcccctggccgctggggacccaggggcgcccagcgtggccgggccagcggggactggaacacggacctgggcccaggggacacagatagtgctgggagctatgtgggggtgaaggctggcggcagggcagagtttgtggctgacaccaggtggaggggtggcgccttctgcatcccactgtatgtaccctacgtgctgacaggccgctggaccttcggccggggcctctgcaagctgtggctggtagtggactacctgctgtgcacctcctctgccttcaacatcgtgctcatcagctacgaccgcttcctgtcggtcacccgagcggtctcataccgggcccagcagggtgacacgcggcgggcagtgcggaagatgctgctggtgtgggtgctggccttcctgctgtacggaccagccatcctgagctgggagtacctgtccgggggcagctccatccccgagggccactgctatgccgagttcttctacaactggtacttcctcatcacggcttccaccctggagttctttacgcccttcctcagcgtcaccttctttaacctcagcatctacctgaacatccagaggcgcacccgcctccggctggatggggctcgagaggcagccggccccgagccccctcccgaggcccagccctcaccacccccaccgcctggctgctggggctgctggcagaaggggcacggggaggccatgccgctgcacaggtatggggtgggtgaggcggccgtaggcgctgaggccggggaggcgaccctcgggggtggcggtgggggcggctccgtggcttcacccacctccagctccggcagctcctcgaggggcactgagaggccgcgctcactcaagaggggctccaagccgtcggcgtcctcggcctcgctggagaagcgcatgaagatggtgtcccagagcttcacccagcgctttcggctgtctcgggacaggaaagtggccaagtcgctggccgtcatcgtgagcatctttgggctctgctgggccccatacacgctgctgatgatcatccgggccgcctgccatggccactgcgtccctgactactggtacgaaacctccttctggctcctgtgggccaactcggctgtcaaccctgtcctctaccctctgtgccaccacagcttccgccgggccttcaccaagctgctctgcccccagaagctcaaaatccagccccacagctccctggagcactgctggaagtctcctgggcatctggccctgctgccccctacccggctcgttcccccagggaaagatgaagaagaaaacatgtctgtgaacttgatgttcctgggatgtttaatcaagagagacaaaattgctgaggagctcagggctggattggcagaatgggctcggccacgctcgggggtggatggagcagcggttgcagagattgagcaagagcaccaggaggggacagtcccaggagggctggggtggttgcagcccgaacattccatggagcctccaggagctcgccagagggcagtgggctcccgacgccttgacttttcctctttcgagattgttgtagattccatgctgttgggtgcaacactacagagaccccacgtgccctttatcggcttcccccacagggaagcttgggtggacgccatgcacgcagagctgcaccccgcccccgccaagcactgccgcaccccgcggctctgcagcctctttagcggcaccaggacaggtccccggcacgtgtgttcactgatgagacgctccggttgcctcagcatgtctgcccttcaggcctccatcccggggccagcgccgacccgggcactgcatacagacaaacgaggtctctgttctccaggagcttag

SEQ ID NO: 12673 - DNA, 711 bp, Homo sapiens
  SIMILAR (18)..(473): 901254mologous to Homo sapiens cisplatin resistance related protein CRR9p,accession number AB045223,Smith-Waterman Score=675.
cagtgtggtggaattcggacctgatggtcataaaccgctccaccaccgagctgcccctcaccgtgtcctacgacaaggtctcactggggcggctgcgcttctggatccacatgcaggacgccgtgtactccctgcagcagttcgggttttcagagaaagatgctgatgaggtgaaaggaatttttgtagataccaacttatacttcctggcgctgaccttctttgtcgcagcgttccatcttctctttgatttcctggcctttaaaaatgacatcagtttctggaagaagaagaagagcatgatcggcatgtccaccaaggcagtgctctggcgctgcttcagcaccgtggtcatctttctgttcctgctggacgagcagacgagcctgctggtgctggtcccggcgggtgtttgggagccgccattgagctgtgggaaagttgaaggaaggcatttgaaggtggactattttttggagaggcctgatgcccgaatttcagtttggcacttacagcgaatctgagaggaaaaccgaggagtacgatactcaggccatgaagtacttgtcatacctgctgtaccctctctgtgtcggaggtgctgtctattcactcctgaatatcaaatataagagctggtactcctggttaatcaacagcttcgtcaacggggtctatgcctttggtttcctcttcatgctgccccagctg

SEQ ID NO: 12674 - DNA, 2028 bp, Homo sapiens
  SIMILAR (451)..(660): 881254mologous to Homo sapiens cisplatin resistance related protein CRR9p,accession number AB045223,Smith-Waterman Score=292.
atggaacggggtgcagtggggtgttcgtggtcctgctgccgttggctgggcgcagccatccctgccggctcccccgcgcctgtgccccgggccctactgcacctgcacgggcggggctctggggccggcgcggggagtgaggccgccggtctcctctgctgtggtcggtgtgggggccggcggggcgcagagctgctcacccggctgactcccccttctgccctgctggcctctgagccggttctctggggcctctgtgagcgccttgtgccccccacacccgccgtgagtaccgtgtctctctgctcagccaggcccacaccaggatgccggcgcgtgccatctttacacgggctgcacctgtgccgtctgagccaggtggtgctgcggtttccgtcggtctcgttctgcctgcacctggacaccatttgtccagagtgcacattgcagcttctctttgatttcctggcctttaaaaatgacatcagtttctggaagaagaagaagagcatgatcggcatgtccaccaagtgcagcccgaccatcctgtccccagtgctctggcgctgcttcagcaccgtggtcatctttctgttcctgctggacgagcagacgagcctgctggtgctggtcccggcgggtgttggagccgccattgagtgttctggaagctgtgggatggcaggcagtgggtgtaaaggctttgaacaagtggagagcaaggaaatgcgtgttcgggtggtatcagctcatgaggctctgtccaccaagcagtggccaggtccctgctggaagcggctgcatcttcctgtcagccctggtttccatggtgactggcgtcacgctgccacccgagtatggctgaccttcctgcagagagaggagccgcagtcttttgcttgtggaaggagacgctgggctgtgcgaagttggtgggttcttagtctcgtcttcaagaatgaagccgcagaccctcgcggtacatgttacggttacctaaaaacggtgtgtctggagtttgttccttctggtgcgttcgtggtctacactgatttcaggagtgaaactgcaaacctccgcggtgcctcgtggacacacagcagatgcttctcgggcaagggctcagacgctgcccaccccacccgtgatagctcagcaaaccaaccagcacctgctggcctgcccaacctggggcgcaaggcggccacccaggccccgcgccggcccaaacaaacggcgggcggccttcccaccccctttggccccccccttggcgccggccccacgtggccgagcgcggcgcaagcttgggctgcagagttcccccacggcccctctgcctccgtttggattgacgcggccacccaggtgtgcttctccctgggcgtggggttcggggtgctgatcgccttctccagctacaacaagttcaccaacaactgctacaggtgggtgctccaccaggaacctgcagtgagcccagcaccagtgggctgtggggaccttgagtccacctgggccgtctttatgctccaggagcccatgaaggggcaaggacgtgcgggagtcattgctgtggaagggggaacacagctggcaccaaatgaatgccctgagctcggcggcaggcctgtgaggcaaggtcgcctaagtggggagggccgatggaaccggaagtattctgagcatccaagagcacctggaggaagagttcaccttcttcctttcgatggcgaggacggcattctgcagacgtggaagacttacaccctcggaagccaaaaccacaaagcaggattccttcggagaggaaagatgaaccctaaaattggggttttgaccggttctggagactggaaatccaacatcaaggcagctgattcagttcctggtgaggcctctcttcctggcttgcagatggccgccttcttactctatcttcacatggcagaaagtaaaatggagagagcttcctcttcttataaggccacagtcctcctgggttatgaccccacccttacaatttaa

SEQ ID NO: 12675 - DNA, 770 bp, Homo sapiens
  SIMILAR (337)..(390): 521254mologous to Homo sapiens collagen 1 pro-alpha-2 chain,accession number J00114,Smith-Waterman Score=47.
gatgggtttctaattctgtcataaaaaatgatgaaacaaggtgatgtcagaaggaactcgaggtaacaccaaaataccccatccagggcctggaagcccctctgcctttgactgtaagatggggcaggacccccgctctcagtgggatgtgcccgcgaccctggcgctgggagacagtgctgcagagaggagtggtgtccgcacggctgtcaccagacatcctcatcaccctccgcaccgcacagcccagcgtctccttccacaagcaaaagactgcggctcctctctctgccaggaaggtcagccatactcgggtggctgcgtgacgacagtcaccatggaaaccagggctggacaggaagatgccagccccttccagcagggaccctggcctgagggcaaagggaggagcggcactggcggcggctgcctttgcgcttccagctcgggccctgctcatttgaacaatatccaacctcggactggagtttaggctacagtgaaatggattacgttatgccgaaacagaaacatcaaactgccaacgtttataaaaaaagaggggactggaaaagcgcctaagaaaagcagaaaaagtgttttggggctaggcccttgagttcacacctccccaggggacccagcggaaggagagggattacctgctggagagaggcctgatggaaatttaagtcaaagcccaaacagcctcagattctatattaaaaaaaaaaaggcctataaataaatatcctttgactctaaaagga

SEQ ID NO: 12676 - DNA, 918 bp, Homo sapiens
  SIMILAR (1087)..(2478): 961254mologous to Homo sapiens unknown,accession number AF148856,Smith-Waterman Score=2341.
  misc_feature (1)...(918): n = a,t,c or g
ccttttagcgtggtggaattcgtgaggagacacgcaggaagattgtgattctgggagacaactggaagcatgagctgacaaaattcatcagccccgaccagctgcctgtggagtttggggggaccatgactgaccccgatggcaaccccaagtgcctgaccaagatcaactatgggggtgaggtgcccaagagctactacctgtgcgagcaggtgaggctgcagtatgagcacacgaggtccgtgggccgcggctcctccctgcaggtggagaacgagatcctgttcccgggctgtgtgctcaggtggcagtttgcttcagatggtggggacatcggctttggggttttcctgaagaccaagatgggggagcagcagagtgctagggagatgacggaggtgctgcccagccagcgctacaatgcccacatggtgcctgaggatgggagcctcacctgcctccaggctggcgtctatgtcctgcgcttcgacaacacctacagccggatgcatgccaagaagctcagctacactgtggaggtgctgcttcccgacaaggcctctgaggagacgctgcagagtctcaaggcgatgagaccctccccaacacagctcacctggcacagtggccaagcaggaaggggccaccagtgcatagcccatgctgaagattcagacaggaacctctttccctgttcccagaagaatgcggctgagaatgagaacgcttgagatgatccaatccactgaggatgggtccttgctgcagaagcttgcccttcacccatcttgacaggatccaacccacccaggactcaacccatgccctgggggttcaagcttcaggggggtgggcgtggntttctaaggccttgtggacaataacaagcttcaggccctgaagaagcaaaaaaaccct

SEQ ID NO: 12677 - DNA, 753 bp, Homo sapiens
  SIMILAR (281)..(529): 971254mologous to Homo sapiens similar to 45 kDa secretory protein ; similar to CAA10644.1 (PID:g4164418),accession number AC004832,Smith-Waterman Score=442.
ccgggtcgacgatttcgaataaagaccctgcttctccctggctcgtcctctactcgggcactacccctggcctgaccctggtgagcctgcacacgcacgggcaatgccttgggtcctagaccgtgggctgggagccacataaaggtcttgggtactcttaggagtaggtgcccgggggagcacgcccaggacatatcaggttccctcaccaagcttagccccctctgccctctgttgagtctcctgagtccctttggagtccctctcttgctcccatgcagacaactggaagcaggagctgacaaaattcatcagccccgaccagctgcctgtggagtttggggggaccatgactgaccccgatggcaaccccaagtgcctgaccaagatcaactatgggggtgaggtgcccaagagctactacctgtgcaagcaggtgaggctgcagtatgagcacacgaggtccgtgggccgcggctcctccctgcaggtggagaacgagatcctgttcccgggctgtgggctcagatgtcctgaggttttacaacacctacagcctggttcattctaaacgcatcagctacaccgtggaggtactgctcccagaccaaaccttcatggagaagatggagaaattctaggtgaacctcatggtccccacaccctcctctttgatctctgaatccacaatgagttcacagccttccctggccagaccctgttcaacctctcaggaacagggattctacaaca

SEQ ID NO: 12678 - DNA, 1638 bp, Homo sapiens
  SIMILAR (649)..(2199): 821254mologous to Homo sapiens putative p150,accession number U93563,Smith-Waterman Score=2112.
atgagcagccgagtcggggacctgagcccccagcagcaggaagcgctggccaggttccgggagaacctccaggacctgctgcccatactgcccaatgctgatgactacttcctcctgcgctggctgcgagctcgaaactttgacctgcagaaatccgaagacatgctccgaaggcacatggagttccggaagcaacaagacctggacaacattgtcacatggcagccccctgaggtcatccagctgtatgactcgggtggtctttgtggctacgactacgaaggctgccctgtgtacttcaacatcattgggtccctcgaccccaagggtctcctgctgtcagcctccaagcaggatatgatccggaagcgcatcaaagtctgtgagctgctgttgcatgagtgtgagctgcaaactcagaagctgggcaggaagatcgagatggcgctgatggtgtttgacatggaggggctgagcctgaaacacctgtggaagccagctgtggaggtctaccagcagcttctcaagagatttacatgtgtttcagccccaaaactgttccccgtggccttcaacttggtcaagtcgttcatgagtgaggagacacgcaggaagattgtgattctgggagacaactggaagcaggagctgacaaaattcatcagccccgaccagctgcctgtggagtttggggggaccatgactgaccccgatggcaaccccaagtgcctgaccaagatcaactatgggggtgaggtgcccaagagctactacctgtgcgagcaggtgaggctgcagtatgagcacacgaggtccgtgggccgcggctcctccctgcaggtggagaacgagatcctgttcccgggctgtgtgctcaggtggcagtttgcttcagatggtggggacatcggctttggggttttcctgaagaccaagatgggggagcagcagagtgctagggagatgacggaggtgctgcccagccagcgctacaatgcccacatggtgcctgaggatgggagcctcacctgcctccaggctggcgtctatgtcctgcgcttcgacaacacctacagccggatgcatgccaagaagctcaacttccacccggggaggtgctggcttcccgacaaggcctgtgaggagacgctgcaaagtctcaagccgatggagaccctccccaacacagtgaagacccccagccacttttacctgggggactccaacccttttacacccacccttttgacccttgccttcccaggcagggtggtgctggaggtggctgcaaaaagccacttgtcccacgtcaccatttcatctcattgtaggctcacctggcacagtggccaagcaggaaggggccaccagtgcatagcccatgctgaagattcagacaggaacctctttccctgttcccagagaatgcggctgagaatgagaacgctgaagatgatcaatccactgaggatggtcctgcttgcagaacttgccctttacccttcttgacagatccagcacccaggactcaccatgcttgtggtccaacttaaaggggggggcggggtccttaggcttgggacatccaactcaggccttaaaccagaaaccctgtttttcttttggaggcaccagggg

SEQ ID NO: 12679 - DNA, 877 bp, Homo sapiens
  SIMILAR (519)..(797): 561254mologous to Human endogenous retrovirus K pol- env,accession number AF023261,Smith-Waterman Score=287.
atgccagcccgtgagggcagccaggagcggggctgtactctgcaagccacaggggcagagctgcctgacgtcatgggaacacacctcttgcaacagtgtgacccgcatccacaggtggaagtggtcggagaaacagaaggaggagcaagagatgcagaactggagagaatcagcttcctgtctgggtacccacaagacatcttaagttgtgccatgagccagaacccaaggaagaggaaaagacctcggaatgtctctgcacccccagttcatcagatggctcagatgaacatctctgttgagcagatggaaaccagtaaaactcaccaagcaactccactgacctgggggcagatgaagagactagctcacgttgcagaagagaacctgaggtctcagaacaagccgctgaccaccagtaatctaatggtagctatgatggtggtaatctccttggcggtgagtctccccgtagctggggcagatcaaaattacatttattgggcctacattccattcccccactgattaggtctgttacatggttagaccccctggtggaggtttatattaatgatagtgtctggatgcctggaccaacagataactgaggtcctactcatccagaggaggaaggaatgttaatgaatgtttccattggttatcgctttcctcccatctgcctggggccagcagcaggatttttaaattatgataaacaaatttggatggtttatgtccctgcacataatggatcaaaagcctctattcatgcaatcagtggaagaacatttcaatctttggacactattaaataccttgagcatggctatgttatgacacatcgccagattaataaatttaaacctaataagaa

SEQ ID NO: 12680 - DNA, 1446 bp, Homo sapiens
  SIMILAR (1225)..(2475): 951254mologous to Homo sapiens putative p150,accession number U93563,Smith-Waterman Score=2086.
atgggaaaatgcagaatgaagggaatgtacaagaagaaaagacttaagaagaacacagtgtacatggagatggaaaagaacaagaaagaagaaagaaaaaggaggaagaaagagagacaagagagtttgcctgcatcaggtagagattgtaaccagaaagtgattgctggaggttttgtctgtgtccatattatgactgtatcagataaagcctctctcctgggaatcattactagagatacagccatgtactgcagtgtgactataccagtttcagccactgttaatggatttattcctggcaacagatcctgggtctatgatgtgactattttagttttaaactatctctattgttttactgctacacaaacattcttagccaatggtgtcactctatcaaatagagtgtatgtgcagggattgttgattttagaatgggcctgggtccacagtatgacaatttctgtttcaagatttgtggagggatttactcctacagattcagcttggtttggtggtataactgtagctgcactgcagcctttccacactgaggaggaggaggagaagtttcaggatgacatagaaaagtttaataatcaggagtctgctaatcagcaaagtgaactgtcacagtctagttttaaaaagggggagaaatgggaagttatatatcctaacctccaaaaacttatgaaagaaacagtgctacctactgcgcctttaggggaagaatgtcaggcagcaattagacctattaagggaaaggcagatctaaatgaggaaaaatctttaagcgaatacattaaagcctaccatggcattgtggggcacttacataaggccagcctcctagctctggcagtggatgaactaaagattaagagactagctcacattgcagaagagaacctgaggtctcagaacaagccgctgaccaccagtaatctaatgttagctatgatggtggtaatctccttggtgctacagattctgtccagtaaactactgctgaagattcagccttacgccatggagtgtctgtgtcatatacaggctgtgtccaaagatttcctactgcagattcagactgtgcatagtgtgatagtagcagcccgtggcagtatccatggatatcccgctattaattcagcccggttccatagtgtgatggtattggctatggacattgtccaggtatttactgatggacattcaacctgggtccaaggtacaattatggaaggtataggctgtgtccatggaattactgctggagatacagcccgggcccatggtgtgactttggaagttgcagcctctgtgcacagatttaccattggagactcagcttgtgtccacaggataatgctatcagattcagggagtgtacagagatttactgctgaagattcatctggggcccatggtttgattgtataa

SEQ ID NO: 12681 - DNA, 767 bp, Homo sapiens
  SIMILAR (105)..(359): 1001254mologous to Homo sapiens hypothetical protein,accession number AL122044,Smith-Waterman Score=425.
ccccgatgagctccccggtgcgcgagccgccccagctggaggaggagcggcaggtgcggatcagcgagagcggccagttcagcgacgggctggaggaccgaggcttactagaaagcagcacccgcctgaaacctcacgaagcccagaactacaggaagaaggcattgtgggtgtcctggttctccatcattgtcaccctggccctcgcggtggctgcctttactgtctccgttatgaggtacagcgcctctgcttttgggtttgcatttgatgccatcctggacgtcctgtcatcggcgattgtcctgtggcgttacagcaacgcggccgctgtgcactctgcccatagggagtacatgctgtataatcatggcaccaacatctgctggacttctagtgagggcctgaggatgcttacaatcatggtagaagatgacagtttgttattccattcaccagtagttggacatttaggttatttccagtttttgactattatgaaattagcagctgagaacactggtgtgcaagtcttcgtgtggacgtatgccttcatttctcttggagtagaattgctgaatcctatggtggcccccaagcacatctgccaggtagagtaccatggggaggcctctgccctgagcatcatcacaggggcgcctccagacctggctgagaatagcctctgcttgggcctaggaagaagggcagaagtccaaaggaaaccttgtccagtattgagtggaagtgcgccggagttccactga

SEQ ID NO: 12682 - DNA, 789 bp, Homo sapiens
  SIMILAR (931)..(1554): 961254mologous to Homo sapiens putative p150,accession number U93574,Smith-Waterman Score=1057.
atgcatgaggatgaaaccaaggggatgacagctgacccactggctctcaccaccaagagagctttggaccagaagctctatgtggatgcagcagataaggaggaaaactgcccctgcttctgcccggagtgcctctcgcagaaattgctcagaagacctcttatgtatcctgaaaagggctccattcaagaagtcatgggcctacctccaagctacctaccaatttcagcaaagtacacagtccttttcctaatgcaagggaggcaggcacttaatctctgcctctatgaagttattcacaagggaaccataaaattgccttgtccccagattgacagcttaatgaacatgtcagcacagggccgatttgcatattgcagtgtgcttcagcacccagagaaactctccacaccacggctgctgcagggtgggggaggggtgacatcagcaattcagagctgttttttctatctcctgagtgcctctttcagcaatttgaagttagaaccaggtactaaaacacctgaaactagtgatcagcagcttcctggagttgggaaagtggactcaagcatgtgcatgcagacagcccaacccaagggaagaatcaaaggagaagtgacgcaagaccccggaagtatgccaacatataaagccaaagttaaacataaaaccaaaccttggaaacaaggtgaagaacagcctgtatgcaacttcagacagggggttaccaaaacaaagctgaagcagttgaccatggacacctcaaaagaatttcggagaacctga

SEQ ID NO: 12683 - DNA, 705 bp, Homo sapiens
  SIMILAR (1)..(2979): 941254mologous to Homo sapiens putative p150,accession number U93563,Smith-Waterman Score=4870.
cttttttttttttttttttttttttttaaatagcttaagtattttatttgtttgcaactaagcttgttaacactatataatgaaaatgtacaaagaataatgttgcagtttttggttagatttaagtcaaagacattcattaataaggaatcttcgaatgtgaatattccagaaatttctctaagccatctgatcacaacaactgtctctgaatattaccttactttggaaggtattggcatacatttgaattaaactcagaatttttcaaaataagcccctaattaaaaaaactattctatattcaaagtaaaacaatattaatagaactttcctttccagaaacaatgaaggaaacaaggcattttgtaaaatgtggtcctgaacaagtcacagtaayayaataaatgtatacttaacttccacctcctcaaaabcagaggctactttctgttcctcaagccttggaaacaaggtgaagaacagcctatatgcgacttcgggcagggggttgccaaaacaaagctgaagcagttgaccatggacacctcaaaagaatttgggagaacccgaccaaaggatccaaattctatggtttttttttttttttttttgagacgaagtctcgttttgttgcccaggctggagtgcagtggcatgatctgtgctcactgcaaccgccacctccagggttcaagctcgtgc

SEQ ID NO: 12684 - DNA, 1614 bp, Homo sapiens
  SIMILAR (358)..(1236): 871254mologous to Homo sapiens putative p150,accession number U93567,Smith-Waterman Score=1322.
atgactgactgtaccgggaaaattgggacactgccacctaaatactgtgctgttcccacggttttagcaaacagcacaccaggaaattatatcccacacatggctcagcaggattgcagctcttcaccagcaatggaacaaagctggacagagaatgactttgacaagttgacagaagtagccttcagaaagtcagtaataacaaacttctctgagctaaaggaggatgttcgaacccattgcaagggagctaaaaaccttgaaaacagattagatgaatggctaactaaaataaacagtgtagggaagcccttaaatgacctgaggaagctgaaaaccatggcaagagaactaccaccacatcacacttattccaaaattgaccacatagttggaagtaaagcactcctcagcaaatgtaaaagaacagaaattacaacaaactgtctctcagaccacagtgcaatcaaatttgaactcaggattaagaaactcactcaaaagcacacaactacatggaaactaaacaacctgctcctgaatgactactgggtaaataatgaaatgaaggcagaaataaagatgttctttgaaaccaatgagaacaaagacaaaatgtaccagaatctctgggacacatttaaagcagtgtgtagagggaaattcatagcactaaatgcccacaagagaaagcaggaaagatctaaaatcgacatcctaacatcacaattaaaagaactagagaagcaagagcaaacaaattcaaatgctagcagaaggcaagaaataactaagatcagagcagaactgaaggagataaagatacaagaaactcttcaaaaaatcagtgaatccagcagttggttttttgaaaagatcagcaaaattgatagaccattagcaagattaataaagaagaaaaaagagaagaatcaaatagacacaataaaagttgataaaggggatatcaccactgatcccacagaaatacaaactaccatcagagaatactataaacacctctacgcaaatgaagtagaaaatctagaagaaatggataaattcctggacacatacaccctcccaaggctacaccaggaagaagtcaaatccctaaatagaccaataacaagttctgaaatggaggtagtaattaatagcttaccaaccgaaaaaaaaagcccaggaccagatggattcacagtcaaattctaccagaggtacaaagaggagctgagacacaacaacaacaaaaaagagaattttagaccaatatccctgatgaacatcaatgagaaaatcctcaatagaatactggcaaaccgaatccagcagcacatcaaaaagcttatccactatgatcaagcgtgcttcatccctgggatgcaaggctcgttcaacatacgcaaatcaatacacattatccatcacataaacagaaccaatgacaaaaaccacatgattatctcaatagatgcagaaaaggcctttgacaaaattcaacaggacttcatgctaaaaactctcaataaactaggtattgatggaacgtatctcaaaatagtaagagctacttatgacaaacccacagccagtatcatactgaatgggtaa

SEQ ID NO: 12685 - DNA, 1755 bp, Homo sapiens; identical to SEQ ID NO: 4929
  SIMILAR (520)..(2715): 931254mologous to Homo sapiens putative p150,accession number U93572,Smith-Waterman Score=3550.

SEQ ID NO: 12686 - DNA, 2112 bp, Homo sapiens
  SIMILAR (793)..(2076): 941254mologous to Homo sapiens putative p150,accession number U93569,Smith-Waterman Score=2160.
atggggaaaaaacagaacagaaaaactggaaactctaaaatgcagagcgcctctcctcctccaaaggaatgcagttcctcaccagcaatggaacaaagctggatggagaatgactttgacgagctgagagaagaaggcttcagactatcaaattactctgagctacaggaggacattcaaaccaaaggcaaagaagttgaaaactttgaaagaaatttagaagaatgtataagtagaataaccaatacagagaagtgcttaaaggagctgatggagctgaaaaccaaggctcgagaactacgtgaagaatgcagaagcctcaggagccgatgcgatcaactggaagaaagggtatcagcgatggaagacgaaatgaatgaaatgaaactaaaccaggaagaagttgaatctctgaatagaccaataacgggagctgaaattgtggcaataatcaatagtttaccaaccaaaaagagtccaggaccagatggattcacagccgaattctaccagaggtacaaggaggaacagcatataaacagagccaaagacaaaaaccacatgattatctcaatagatgcagaaaaggcctttgacaaaattcaacaacacttcatgctaaaaactctcaataaattaggtattgatgggacgtattttcgcaaatcaataaatgtaatccagcatataaacagagccaaagacaaaaaccacatgattatctcaatagatgcagaaaaggcctttgacaaaattcaacaacccttcatgctaaaaactctcaataaattagacaacatcatcgtatatctcgaaaaccccattgtctcagccccaaatctccttaagctgataagcaacttcagcaaagtctcaggatacaaaatcaatgtacaaaaatcacaagcattcttatacaccaacaacagccaaacagagagccaaatcatgagtgaactcccattcacaattgcttcaaagagaataaaatacctaggaatccaacttacaagggatgtgaaggacctcttcaaggagaactacaaaccactgctcaaggaaataaaagaggatacaaagaaatggaagaacattccatgctcatgggtaggaagaatcaatatcgtgaaaatggccatactgcgcaaggtaatttacagattcaatgccatccccatcaagctaccaatgactttcttcacagaattggaaaaaactactttaaagttcatatggaaccaaaaaagagcccccgtcgccaaggcaatcctaagccaaaagaacaaagctggaggcatcacactacctgacttcaaactatactacaaggctacagtaaccaaaacagcatggtactggtaccaaaacagagatataggtcaatggaacagaacagagccctcagaaataacaccgcatgtctacaactatctgatctttgacaaacctgagaaaaccaagcaatggggaaaggattccctatttaataaatggtgctgggaaaactggctagccatatgtagaaagctgaaactggatcccttccttacaccttatacaaaaatcaattcaagatggattaaagacttaaacgttagacctaaaaccataaaaaccctagaagaaaacctaggcattaccattcaggacataggcatgggcaaggacttcatgtctaaaacaccaaaagcaatggcaacaaaagacaaaattgacaaatgggatctaattaaactaaagagcttctgcacagcaaaagaaactaccatcagagtgaacaggcaacctacggaatgggagaaaacttttgcaacctactcatctgacaaagggctaatatccagaatctacaatgaactcaaactaatttacaagaaaaaaacaaacaaccccatcaaaaagtgggcgaaggacatgaacagacacttctcaaaagaagacatttatgcagccaaaaaacacatgaaaaaatgctcatcatcactggccatcagagaaatgcaaatcaaaaccacagtgagataccatctcacaccagttagaatggcgatcattaaaaagtcaggaaacaacagggacatggatgaagttggaaatcatcattctcagtaa

SEQ ID NO: 12687 - DNA, 1659 bp, Homo sapiens; identical to SEQ ID NO: 5397
  SIMILAR (1939)..(2613): 941254mologous to Homo sapiens putative p150,accession number U93567,Smith-Waterman Score=1089.

SEQ ID NO: 12688 - DNA, 1527 bp, Homo sapiens
  SIMILAR (586)..(1515): 781254mologous to Homo sapiens putative p150,accession number U93572,Smith-Waterman Score=1153.
atgggagactttaacatcccaatgtcaatattagacagatcaacgagacaggacctcaactcagctctgcaacaagcagacctaatagacatctacagaactctccaccccaaatcaacagaatatacattcttctcagcaccacatcgcacttattctaaaattgaccacataattggaaataaagcactcctcagcaaatgtaaaagaatagaaatcacaacaaactgtctctcagaccacagtgcaatgaaattagaactcaggattaagaagctcactcaaaactgcacaactacatggaaaatgaacaacgtgctcatgaatagctactgggtaaataatgaaatgaaggctgaaataaagatattttttgaaaccaatgagaacaaagacacaacgtatcagaatctctgggacacatttaaagcagtgtgtagagggaaatttagagcacttaatgcccacaagagaaagcaggaaagatctaaaatcgacaccctaacatcacaattaaaagaactggagaagcaagagccaataaattcaaaagccaacagaaggcaagaaataactaagatcaaagcagaactgaaggagatagagacaaaaaaacccttcaaaaaatcagtgaatccaggagctggaatacaaactatcatcagagaatactatgaacacctctatgcaaataaactagaaaatctagaagaaatggataaattcctggacacatacaccctcccaagactaaaccaatcaataggaaaagagggaatcctccctaactcattttatgaggccagcatcatcctgataccaaagcctggcagagacacaacaagaaaagataattttagaccaatatctctgatgaacactgatgtgaaaatcctcaataaaatactggcaaaccgaatccagcagcacatcaaaaagcttatccaccatgatcaagtgggcttcatccctgggatgcaaggctggttcaacatacacaaatcaataaacgtaatccatcacataaacagaaccaatcacaaaaaccacatgattatctcaatagatgcagaaaaggccttcaacaaaattcaacagccctacatgctaaagactctcaataaactaggtattgatggaatgtatctcaaaataataagagctatttatgacaaacacacagccaatattatagtgaatggggaaaaactggaagcattccctttgaaaactggcacaagacaaggatgccctctctcaccactcctattcaacatagtgttggaagttctggccagggccatcaggcaagagaaagaaataaagtgtattcgattaggaaaagtggaagtcaaattgtccctgtttgcagatgtcatgattgtagatttagaaaatcccatcatctcagccccaaatctccttaagctgataagcaatttcagcaaagtctcaggatacaaaatcaatgtgcaaaaaccacaagcattcctatacaccgttaacagacagacagccaaatcatga

SEQ ID NO: 12689 - DNA, 1746 bp, Homo sapiens; identical to SEQ ID NO: 7073
  SIMILAR (745)..(2055): 941254mologous to Homo sapiens putative p150,accession number U93574,Smith-Waterman Score=2163.

SEQ ID NO: 12690 - DNA, 2853 bp, Homo sapiens; identical to SEQ ID NO: 4331
  SIMILAR (442)..(3252): 951254mologous to Homo sapiens putative p150,accession number U93572,Smith-Waterman Score=4651.

SEQ ID NO: 12691 - DNA, 1479 bp, Homo sapiens
  SIMILAR (1)..(576): 951254mologous to Homo sapiens putative p150,accession number U93574,Smith-Waterman Score=933.
atgaacatcgatgcaaaaatcctcaataaaatactggcaaaccgaatccagcagcacatcaaaaagcttatccaccatgatcaagtgggcttcatccctgggatgcaaggctggttcaacatacgcaaatcaataaacgtaatctggcatataaacagaaccaaagacaaaaaccacatgattatctcaatagatgcagaaaaggtcttcgacaaaattcaacagcccttcatgctaaaaactctcaacaaattaggtattgatgggacatatctcaaaatactaagagctatttatgacaaacccacagccaatatcatactgaatgggcaaaaactggaagcattccctttgaaaactggcacaagacagggatgccctctctcaccactcctattcaacatagtgttggaagttctggccagggcaatcaggcaggagaaagaaataaagggtattcaattaggaaaagaggaagtcaaaccgtccctgtttgcagatgacgtgattgtatatttagaaaaccccatcatctcagtccaaaatctccttaagctgataagcaacttcagcaaaaataaaatacctaggaatccaacttacaaggaatgtgaagtacctcttcaaggagaactacaaatcactgctcaacgaaataaaagaggacacaaacaaatggaagaacattccatgctcatggataggaagaatcaatatcgtgaaaatggccatactgcccaagaattggaaaaaactactttaaagttcatatggaaccaaaaaagagtccgcattgccaagtcaatcctaagccaaaagaacaaagctggaggcatcacgctacctgacttcaaactatactacaaggctacagtaaccaaaacagcatgggacatggatgaagctggaaagcatcattctcagcaaactattgcacgggacaaaaaccaaatgctgcatgttctcactcataggtgggaattgaacaatgagaacacttggacccaggaaggggaacatcacacaccggggcttgttgttgtgtgccggcatgagtctgccccaaccctttttcccttaagagaagtgccacgtggaggaatgggaattggctttgtaaatgcccccttaactagtttagaggtcagaaacctgaagagggaacttaaaccactattagatgatccttttggggtcacggatcaaattgaccaatttttaggaccacaagtatacacttgggctgagttaatgtccatcttcagtattctcttttcgagggaggaaagaaccatgatccgcagggctgctatgatagtctgggagcacaaacatcctcccggtcaaaatatccctgcagcagaacaaaaatttctggcccaagacccgcaatgggataataacaatgcagcccaccgagaaaacttgaaagaccttagggaaatgatagttaaagggattcaggaatcagtgccttga

SEQ ID NO: 12692 - DNA, 1932 bp, Homo sapiens
  SIMILAR (1705)..(3015): 941254mologous to Homo sapiens putative p150,accession number U93567,Smith-Waterman Score=2286.
atgaagcaggatgatgcgaaaattaataagtaccttatggaggatagatacggcatcaaagaaagagggcagcaacggtcagaggctggagccactggtgcgcagccatctcagagggactcgataaaatgggaggaaagaaaccagagggaggaggaaggaaggaaggtgggggctcggggcaagcacgcagagctcgctgctccttcaccttccaccctgcaggagcgacatttacatgaaaacagagctgaggacagtagcctccctggacctgaagtcaccatttggcccttctgggctgctgccaatgccagcagcagtatcctaccaccctttcatagccaatggccccttattgtcaggcaggaccttcgagagatcagacaatttatttcagaaaacacttactggagtcttgcaacaagcaaagcattgagggcatacacaggtggggacggggaaaacattctctacgaagactggaaattagaagatgtgaaagttaaaaacagacatctaactacattaaaaagtaacatatttgatggcaaaatataccctaaacaagggctcctctgctatcagcatgcaggaagcctgtgggaacctgcagggcatctgagtaaacctggaaatgatcacagctcctcaccaacaacggaacaaagctggatggagaatgactttgacgagttgacagaagtaggcttcagaaggtcggtaataacaaacgtctccaagctaaaggaggatgttagaacccatcgcaaggaagctaagaaccttgaaaaaatattacatgaatggctaactagaacaaacaaaatacaaactaccatcagagaatactataaacacctctatgcaaatgaactagaaaatctagaagaaatggataaattcctggacacatataccctcccaagactaaaccaggaagaaggtgaatctctgaatagaccaataacaggctctgaaattgaggcaataattaataacctaccaaccaaaaaaagtccaggaccagatggattcactgccaaattctaccagagcaccaacaataaaaaccacatgattatctcaatagatgcagaaaaggccttccacaaaattcaacagcctttcatgctaaaaactctcaataaactaggtattgatggaacttatctcaaaataataagagctatttatgacaaacccacagccaatatcatactgaatgggcaaaaactggaagcattccctttgaaaactggcacaagacagggatgccctctctcaccactcccattcaacatagtgttggaagttctggccagggcaatcaggcaggagaaagaaataaactgtattcaattacacaatgaggaagtcaaattgtctccatttgcagatgacatgattgcatatttagaaaaccccatcgtctcagcccaaaatctccttaagctgataagcaacttcagcaaagtctcaggatacaaaatcaatgtgcaaaaatcacaagcattcctatacaccattaacagacaaactgagagccaaatcatgagtgaactcccattcacaattgctacaaagagaataaagtacctaggaatccaacttacaagggatgtgaagtacctcttcaaggagaactacaaaccactgctcaatgaaataaaagaggatacaaacaaatggaagtacattccatgctcatggataggaagaatcaatatcgtgaaaatggccatactgcccaaagtaatttatagattcaatgccatccccattaagctaccaatgaccctttcttcacagaattggaaaaaaactactttaaagttcatatggaaccaaaaaagagcccgcattgccaagtcaatcctaagcaaaaagaacaaagctggaagcatcatgctacctgacttcaaactatag

SEQ ID NO: 12693 - DNA, 1584 bp, Homo sapiens; identical to SEQ ID NO: 6590
  SIMILAR (1708)..(2091): 981254mologous to Homo sapiens PAR-6A,accession number AB043634,Smith-Waterman Score=641.

SEQ ID NO: 12694 - DNA, 4542 bp, Homo sapiens
  SIMILAR (1)..(276): 981254mologous to Homo sapiens putative odorant binding protein ag,accession number AJ251024,Smith-Waterman Score=467.
atgggcaggaagaacaggaagctggacagccggcagcacagctacacttccccacagagcaggtcccatgaggaccctgcagctgtcctgcaagccctgagctcgtcgggggtggtcatctaccagtctctggtggcagtgcagagccccctggctgccccaggttgtgacggcagccggtgtgaggtcaggggcctgactgtgggcagcaggtatggcagctggaggctggctggatgcagggacaatgagatggtaaatgcctgccaatcagggtggtgctaccagaacctcacagttcttagaggatggaaggtgctgcttgagatgacaccacaccacacctattccaaaattgaccacatacttggaagtaaagctctcctcagcaaatgtaaaagaacagaaattataacaaactatctctcagatcacagtgcaatgaaacgagaactcaggattaagaatctcactcaaaaccgctcaactacatggaaactgaacaacctgctcctgaatgactactgggtacataacgaaatgaaggcagaaataaagatgttctttgaaaccaacgagaacaaagacacaacataccagaatctctgggacatattcaaagcagtgtgtagagggaaatttatagcactaaatgcccacaagagaaagcaggaaagatccaaaactgacaccctaacatcacaattaaaagaactagaaaagcaagagcaaacacattcaaaagctagcagaaggcaagaaataactaagatcagagcagaactgaaggaaatagagacacaaaaaacccttcaaaaaattaacgaatccaggagctggttttttgaaaggatcaacaaaattgatagaccgctagcaagactaataaagaaaaagagagagaagaatcaaatagacgcaataaaaaatgataaaggggatatcaccaccgatcccacagaaatacaaactaccatcagagaatactacaaacacctctacgcaaataaactagaagatctagaagaaatggataaattcctcaacacatacactctcccaagactaaaccaggaagaagttgaatctctgaatagaccaataacaggagctgaaattgtggcaataatcaatagcttaccaaccaaaaagagtccaggaccagatggattcacagctgaattcaaccagaggtacaaggaggaactggtatcattccttctgaaactattccaatcaatagaaaaagagggaatcctccctaactcacttgatgaggccagcatcatcctgataccaaagccaggcagagacacaaccaaaaaagagaattttagaccaatatccctgatgaacattgatgcgaaaatcctcaataaaatactggcaaaccgaatccagcagcacatcaaaaagcttatccaccacgatcaagtgggcttcatccctgggatgcaaggctggttcaatagatgcaaatcaataaatgtaatccagcatataaacagaaccaatgacaaaaaccacatgattatctcaatagatgcagaaaaggccttcaacaaaattcaacagcccttcatgctaaaaactctcaataaattaggtattgatgggacatatctcaaaataataagagctatttatgacaaacccacagccaatagcatactgaatgggcaaaaactggaagcattccctttgaaaactggcacaagacagggatgccctctctcaccactcctattcaacatagtgttggaagttctggccagggcaatcaggcaggagaaagaaataaagggtattcaattaggaaaagaggaagtcaaattgtccctgtttgcagatgacatgattgtatatctagaaaaccccatggtctcagcccaaaatctccttaagctgataagcaacttcagcaaagtctcaggatgcaaaatcaatgtgcaaaaatcacaagcattcttatacaccaataacagacaaacagagagccaaatcatgagtgaattcccattcacaattgcttcaaagagaataaaatacctaggaatccaacttacaagggaagtgaaggacctcttcaaggagaactacaaaccactgctcaaggaaataaaagaggatacaaacaaatggaagaacattccatgctcatggataggaagaatcaatatcacgaaaatggccatactgcccaaggtaatttatagattcaatgccattcccatcaagctaccaatgactttcttcacagaattggaaaaaactactctaaagttcatatggaaccaaaaaagagcccacattgccaagtcaatcctaagccaaaagaacaaagctggaggcatcacgctacctgacttcaaactatactacaaggctacagtaaccaaaacagcatggaatccatatggagccactaccaccatccctgctctcctactgcataacccaacaggccaaagtgcagtgctcacacctgtaatccgagtgctttgcaaggccatagaggaagatcacttgagctcttcaaggaataaagacttgaatgtgaaacccaaagctataaaagccctggaaggcaacctaggcgacaccctcctggacaaaggaagggacaaagatttcattacaaggacaccaaaagcaattgcaacaaaagcaaaaattgacaaatgggatctaattaaacttaagagcttctgcacagcaaaagaaactatcaacagagcatacagacagcctacagaatgggaggaaatatttgtaaactatccatctgacaacggtctaatatccagcatctcagaacaatctgtgctcctgttctatcccatcactggacggtacatggccatcatacatcccctccagccccggctgtcagccacagccaccaaagtggtcatctgtgtcatctgggtcctggctctcctgctggccttcccccagggctactactcaaccacagagaccatgcccagcagagtcgtgtgcatgatcgaatggccagagcatccgaacaagatttatgagaaagtttcatattttggtcagccttcaggtaatcagccagagatgctagcattgtatactgctctctttccacagcctccattagaggagggaattcactggaggatgctccaggtggtacagctacaagatgcagagcctccatcacctaagttcctgactaaggagaaagattctcctggcctgggcgggacttacactggtaaggagtatcggcgagttgaccatagtgtccctcccatcacactcagacccaatcttgctcagtgccctgtagcaatgtctcggcaaagctcagctaacatgttttggtcacaaactattagtctgcatgaggcagggctgttctttcaggactccccattggctgacccctcccagaagccagaaagcaagggagtcctttggtgtggtccatatagcacccacctggatgcagaagaggataaagacagagaggctctggagagggcagtggctgccaatgccttgaaaccgagtggccatcccatagccacgaagtctagtcacttgggcaaatatgtcatgggccgataccatgaccctagtgtttgtaccaaggctcctgtagctattccttttcttttatggacatacagccccttgaagagccacaaggaatctgtttggaatcttcataatgaaaacttggtggagtttctggaggtaaggtccattagagttacggctcccctaaagagagttgactccagaagttccttactctcatgctattccagtcagcctctagtaattgcgcaaacttcccatggacatgtttccctaccaattaaggattatgtgtcttctgctccagggatctatgaggaagaattgcctatgtcatcaataggaagcactgaggactccacaaaactcccggttctcaggtatcaacttgaactaacagatgactacatcattagaattaatcgactgaagatgaaaggaagaataaaagtgatgtttggatgcgccctgcaggcagtcagaccttatggttatctcctttgttccctgaacattgctgttatcctgttctttttcaagctgcccagatttcataacgctcaaacacacatgttttacaaacaatttgtgcaggaagccacttatgcagaacactttcttcatctctgctctaacgagcagcagctgcatccaggcttgatatggaagacagacagaaatagtggaagaccttgcagagaagagctaattgatgagatctctgcttatcccggcataggtgaaggcagaacaggaagagtgtgtaatgacgacatacagctcatcgataccgtccgaatccctgtgggagttcactggccctgcctgacggtacaggctggtgctatatctccacccctccctcgggtagccctatcagatctgccacgccctggccggctcatccactcactgagaacttccagctgcaagtttctgccctcctggggtctttgctttggtggttaa

SEQ ID NO: 12695 - DNA, 2162 bp, Homo sapiens
  SIMILAR (227)..(1198): 881254mologous to Homo sapiens putative p150,accession number U93563,Smith-Waterman Score=1464.
atcactgaccttcagtccagcaatttccagtgtcctgcaggctgctgatcccaagatgctcagccacacaaaggtgttgcggccaacctccgctggtgatacccaggcaaacagggttggagtggacctccagcaaactccaacagacctgcagctgagggtcctcactgttagaaagaaaactaacaaacagaaaggacatccacaccaaaaccccatctgtacgtcaccatcatcaaagaccaaagacagatccacgagacagaaagttaacaaggatatccaggacttgaactcagctctgcacaaagcggacctaatagacatctacagaactctccaccccaaatcaacagaatatacattcttcttagcaccacatcacacttattccaaaattgaccacatagttagaagtaaagcactcctcagcaaatgtaaaagcatagaaattataacaaactgtctctcagaccacagtgcaatcaaactacaactcaggattaagaaactcactcaaaaccactcaactacatggaaactggacaacctgctcctgaatgactactgggtacataacgaaatgaaggcagaaataaagatgttctttgaaaccaatgagaacaaagacacaacataccagaatctctgggacacatttaaagcagtgtgtagagggaaatttatagcactaaatgcccacaagagaaagcaggaaagatctaaaatgggtaccctaacatcacaattaaaagaactagagaagcaagagcaaacatattcaaaagctagcagaaggcaagaaataactaagatcagagcagaactgaaggagatagagacacaaaaaacccttcaaaaaaaaatcaatgactccaggagctggtttttggaaaagatcaacaaaattgataaaccgctagcaagactaataaagaagaaaggagagaagaatcaaatagatgcaataaaaaatgataaaggggatctcaccaccgatcccacagaaatacaaactaccatcagagaatactataaacacctctatgcaaataaactagaaaatctagaagaaatggataaattcctgcacccacacaccctctcaagactaaaccaggaagaagttgaatctctgaatagaccaataacaggctctgaaattgaagcaataattaatagcataccaaccaaaaaaaagtccaggaccagatggattcacagccgaattctaccacagcatcatcctgacaccaaagcctggcagagacacaacaaaaaaagagaattttagaccaatatccctgatgaacatcgatgcaaaaatcctcaataaaatactggcaaacggaatccagcagcacatcaaaaagcttatccaccatgatcaagtgggcttcatccctgggatgcaaggctggttcaacatacgcaaatcaacaaatgtaatccatcatataaacagaaccaaagacaaaaaccacatgattatctcaatagatgcagaaaaggcctttgacaaaattcaacagcccttcatgctaaaaactctcaataaactaggtattgatgggacgtatctcaaaataacaagagctatttatgacaaacccacaggcaatatcatatggaatgggcaaaaactggaagtattccctttgaaaactgccacaacacagggatgccctttctcaccactcctattcaacatagtgttggaagttctggccacggcaatcaggcaggagaaagaaataaaggttattcaattaggaaaagaggaagtcaaattgtccctgtttgcagatgacatgattgtatatttagaaaactccatcgtctcaatccaaaatcttcttaagttgataagcaacttcagcaaagtctcaggacacaaaatcaatgtgcaaaaatcacaagcattcttatacaccaataacagacaaacagagagccaaatcatgagtgaactcccattcacaattgcttcaaagagaataaaatacccaggaatccaacttacaagggatgtgaaggacctcttcaaggagaactacaaaccactgctcaacaaaataaaagagaacacaaacaaatggaagaacattccatgctcatggataggaagaatcaatattgtgaaaatggccatattgcccaag

SEQ ID NO: 12696 - DNA, 5445 bp, Homo sapiens
  SIMILAR (913)..(2145): 861254mologous to Homo sapiens unknown,accession number AF149422,Smith-Waterman Score=1862.
atggggaaaaaacagagcagaaaaactggaaactctaaaaatcagagcgcctctcctcctccaaaggaacgcagctcctcaccagcaatggaacaaagctggatggagaatgactttgatgacttgagagaagaaggcttcagacaatcaaactactctgagctaaaggaggaagttcgaacccatggcaaagaagttaaaaaccttgaaaaaaaattagacgaatggctaactagaataaccaatgcagagaagtccttaaaggacctgatggagctgaaaaccacagcccgagaactacatgatgaatgcacaagcctcaaaagggtatcagtgacggaagatcaaatgaatgaaatgaagcgagaagagaagtttagagaaaaaagaataaaaagaaatgaacaaagcctccaagaaatatgggactatgtgaaaagaccaaatctacacctgattggtgtacctgaaagtgacagggagaatggaaccaagttggaaaacactctgcaggatattatccaagagaacttccccaatctagtaaggcaggccaacattcaaattcaggaaatacagagaacgccacaaagatactcctcgagaagagcaactccaagacacataattgtcagattcaccaaagttgaaatgaaggaaaaaatgttaagggcagccagagagaaaggtcgggttacccacaaagggaagcccatcagactaacagctgatctcttggcagaaactctacaagccagaagagagtgggggccaatattcaacattcttaaagaaaagaattttcaacccagaatttcatatccagccaaactaagcttcatagacagatcaacgagacagaaagttaacaaggatacccaggaattgaactcagctctgcaccaagcggacctaatagacatctacagaactctccaccccaaatcaacagaatatacattcttttcagcaccacaccacacctattccaaaattgaccacatagttggaagtaaagcactcctcagcaaatgtaaaagaacagaaattataacaaactgtctctcagaccacagcgcaatcaaactagaactcaggattaagaaactcactcgaaaccactcaactacatggaaactgaacaacctgcttctgaatgactactgggtacataatgaaatgaaggcagaaataaagatgttctttgaaaccaacgagaacaaagacaaaacataccagaatctctgggacacattcaaaacagtgtgtagagggaaatttatagcactaaatgcccacaagagaaagcaggaaagatctaaaattgacaccctaacatcacaattaaaaggacttgagaagcaagagcaaacacattcaaaagctagcagaaggcaagaaataactaagatcagagcagaactgaaggaaatagagacacaaaaaacccttcaaaaaatcaacgaatccaggagctggttttttgaaaagatcaacaaaattgatagaccgctagcaagactaataaagaataaaagagaggagaatcaaatagacgcaataaaaaatgataaaggggatatcaccactgatcccacagaaatacaaactgccatcagcgaatactataaacacctctacgcaaataaactggaaaatctagaagaaatggataaattcctcgacacctacaccctcccaagactaaaccaggaagaagttgaatctctgaatagaccaataacaggctctgaaattgaggcaataattaatagcttaccaaccaaaaaaagtccaggaccagatggattcatggccgaattctaccagagggacaaggaggagctggtaccattccttctgaaactgttccaatcaatagaaaaagagggaatcctccctaactcattttatgaggccagcatcatgctgataccaaagcctggcagagacacaacaaaaaaagagaattttagaccaatatccctgatgaacatcgatgcaaaaatcctcaataaaatactggcaaaccgaatccagcagcacatcaaaaagcttatccaccatgatcaagtgggcttcatccctgggatgcaaggctggttcaacttacgcaaatcactaaacgtaatccagcatataaacagaaccaatgacaaaaaccacatgattatctcaatagatgcagaaaaggcctttgacaaaattcaacagcccttcatgctaaaaactctcaataaattaggtattgatgggatgtatctcaaaataataagagctatctatgacagacccacagccaatatcatactgaatgggcaaaaactggaagcattccctttgaaaactggcacaagacagggatgccctctctcaccactcctattcaatatagtgttggaagttctggccagggcaatcaggcaggagaaggaaataaagggtattcaattaggaaaagaggaagtcaaattgtccctgtttgcagatgacatgactgtatatttagaaaacgccatcgtctcagccccaaatctccttaagctgataggcaacttcagcaaagtctcaggatacaaaatcaatgtgcaaaaatcacaagcattcttatacactaataacagacaaacagagagccaaatcatgagtgaactcccattcagaattgcttcaaagagaataaaatacctaggaatccaacttacaagggatgtgaaggacctcttcaagcagaactacaaaccactgctcaatgaaataaaagaggatacaaacaaatggaagaacattccatgctcatgggtaggaagaatcaatatcgtgaaaatggccatactgcccaagctgcagcttggtcttcctctgagagctcaactccaagaggccactgataacactttcataattatagctattgctgcatttgtccttgctgcccctggagccaaggagaaaccagaactcgaagtggcaactattgccagtgaattgggaaaattacacacaaaaggaataagtagatcttcaggtggtaagaaccatgtggtgaacctcaaacagcagaggcaagataaacgagaagagaagaagaaggttaacaaggatatccaggacttgaactcagctctgctccaagcagacctaatagacatctacataactctccaccccaaatcaacagattatacattcttctcagcaacacatcacatttatttcaatactgaccacatagttggaagtaaagcacccatcagcgaatgtaaaagaacagaaatcacaacaaactgtctctcagaccacagtgcaatcaaactagaactcacgattaagaaactcactcaaaacctcacaactacatggaaactgaacaacctgctcctgaatgactactggggcacttttacctgcttcatcaagcagcagggtcccaaccagtaccctttaggccagaggtctacctcctctgctggtagggggcacagttgtggggccttggcagtgcctgatggtgccaaaggtggcaaaacacctaaacattccaaactcttctctgaccagagacatgctagacccaagataagcctcctccagctgggaagatgccagcctcgatttaaccccctccgggccgaaatacaaactaccatcagagaatactacaaacacctctatgcaagtaaactagaaaacctagaagaaatggataaattcctcgacacatacactctcccaagactaaaccaggaagaagttgaatctctgaatagaccaataacaggatctgaaattgtggcaataatcaatagcttaccaaccaaaaagagtccagaaccagatggattcacagccaaattctaccagaggtacaaggaggaattggtaccattccttctgaaactattccaatcaatagaaaaacagggaatcctccctaactcattttatgaggccagcatcatcctgataccaaagcctggcagagacacaaccaaaaaagagaattttagaccaatatccttgatgaacattgatgcaaaaatcctcaataaaatactggcaaaccgaatacagcagcacatcataaagcttatctaccatgatcaagtgggcctcatccctgggatgcaaggctggttcaatatacacaaatcaataaatgtaatccagcatataaacagaaccaaagacaaaaaccacatgattatctcaatagatgcagaaaaggcctttgacaaaattcaacagcccttcatgctaaaaactctcaataaattaggtattgatgggacgtatttcaaaataataagagctatctatgacaaacccacagccaatatcatactgaatgggaaaaaactggaagcattccctttgaaaactggcacaagacaagggtgtcctctcttaccactcctgttcaacgtagtgttggaagttctggccagggcaatcagacaaacagagagccaaatgatgagtgaactcccattcacaattgcttcaaagagaataaaatacctaggaatccaacttacaagggacgtgaaggacctcttcaaggagaactacaaaccactgctcaatgaaataaaagaggatacaaacaaatggaagaacattccatgctcatgggtaggaagaatcaatatcgtgaaaatggccatactgcccaaggtaatttacagattcaatgccatccccatcaagctaccaatgactttcttcacagaattggaaaaaactactttaaagttcatatggaaccaaaaaagagcccgcatcaccaagtcaatcctaagccaaaagaacaaagctggaggcatcacactacctgacttcaaactatactacaaggctacagtaaccaaaacagcatggtactggtaccaaaacagagatatagatcaatggaacagaacagagccctcagaaataacaccgcatatctacaactatctgatctttgacaaacctgagaaaaacaagcaatggggaaaggattccctatttaataaatggtactgggaaaactggctagccatatgtagaaagctgaaactggatcccttccttacaccttatacaaaaatcaattcaagatggattaaagacttaaacgttagacctaaaaccataaaaaccctagaagaaaacctaggcattaccattcaggacataggcatgggcaaggacttcatgtctaaaacaccaaaagcaatggcaacaaaagccaaaattgacaaatgggatctaattaaactcaagagcttctgcacagcaaaagaaactaccatcagagtgaacaggcaacctacaaaatgggagaaaattttcgcaacctactcatctgacaaagggctaatatccagaatctacaatgaacttaaacaaatttacaagaaaaaacaaacaaccccatcaaaaagtgggcgaaggacatga

SEQ ID NO: 12697 - DNA, 3859 bp, Homo sapiens
  SIMILAR (382)..(1041): 901254mologous to Homo sapiens putative p150,accession number U93563,Smith-Waterman Score=1009.
atgacaggatcaaattcacacataacaatattaactttaaatataaatggactaaattctgcaattaaaagacacagactggcaagttggataaagagtcaagacccatcagtgtgctgtattcaggaaacccatctcatgtgcagagacacacataggctcaaaataaaaggatggaggaagatctaccaagcaaatggaaaacaaaaaaaggcaggggttgcaatcctagtctctgataaaacagactttaaaccaacaaagatcaaaagagacaaagaaggccattacataatggtaaagggatcaattcaacaagaggagctaactatcctaaatatttatgcacccaatacaggagcacccagattcataaagcaagtcctgagtgacctacaaagagacttagactcccacacattaataatgggagactttaacaccccactgtcaatattagacagatcaacgagacagaaagtcaacaaggatacccaggaattgaactcagctctgcaccaagcagacctaatagacatctacagaactctccaccccaaatcaacagaatatacatttttttcagcaccacaccacacctattccaaaatcgaccacatagttggaagtaaagctctcctcagcaaatgtaaaagaacagaaattataacaaactatctctcagaccacagtgcaatcaaactagaactcaggattaagaatctcactcaaagccgctcaactacatggaaactgaacaacctgctcctgaatgactactgggtacataacgaaatgaaggcagaaataaagatgttctttgaaaccaacgagaacaaagacaccacataccagaatctctgggacgcattcaaagcagtgtgtagagggaaatttatagcactaaatgcctacaagagaaagcaggaaagatccaaaattgacaccctaacatcacaattaaaagaactagaaaagcaagagcaaacacattcaaaagctagcagaaggcaagaaataactaaaatcagagcagaactgaaggaaatagagacacaaaaaacccttcaaaaaatcaatgaatccaggagctggttttttgaaaggatcaacaaaattgatagaccgctagcaagactaataaagaaaaaaagagagaagaatcaaatagacacaataaaaaatgataaaggggatatcaccaccgatcccacagaaatacaatctggcatctagagaatactacaagcacctctatgcgcatgtactagaatttctagaagaaatggataaattcctcatcacatacgctctccccagactaaaccaggaagaagttgaatctctgaatagaacaataacaggacctgaaattgtggcaataatcaatagcttaccaaccaaaaagagtccaggaccagatggattcacagctgaattctaccagaggtacaaggaggaactggtaccattccttctgaaactattccaatcaatagaaaaagagggaatcctccctaactcattttatgaggccagcatcatcctgataccaaagccgggcagagacacaaccaaaaaagagaattttagaccaatatccttgatgaacattgatgcaaaaatcctcaataaaatactggcaaaccgaatccagcagcacatcaaaaagcttatctgccatgatcaagtgggcttcatccctgggatgcaaggctggttcaatatacgcaaatcaataaatgtaatccagcatataaacataaacagaaccaaaaataaaaaccacatgattatctcaatagatgcagaaaaggcctttgacaaaattcaacagctcttcatgctaaaaactctcaataaattaggtattgatgggatgtatctcaaaataataagagctatctatgacaaacacacagccaatatcatactgaatgggcaaaaactggaagcattccctttgaaaactggcacaagacagggatgccctctctcaccactcctattcaacatagtgttggtggaagttctggccagggcaatcaggcaggagaaggaaataaagggtattcaattaggaaaagaggaagtcaaattgtccctgtttgcagatgacatgattatatatctagaaaaccccattgtctcagcccaaaatctccttaagctgataagcaacttcagcaaagtctcaggatacaaaatcagtgagcaaaatcaatgtgcaaaaatcacaagcattcttatatacaccaaaaacagacaaacagagagccaaatcatgagtgagctcccattcacaattgcttcaaagagaataaaatacctaggaatccaccttacaagggatgtgaaggttctctacaaggagaactacaaaccactgctcaaggaaataaaagaggacacaaacaaatggaagaacattccatgctcattgataggaagaatcaataccatgaaaatggccatactgcccaagggaatttatagattcaatgccatctccatcaagttaccaatgactttcttcacagaattggaaaaaaactactttcaagttcatatggaagcaaaaaagagcccgcgtcgccaagtcaatcctaagccaaaagaacaaagctggcggcatcgcgctacctgacttcaaactctactacaagtctacagtaaccaaaacagcatggtactggtaccaaaaaaaaagatatagatcaatggaacagaacagagccctcagtaataacgccgcattatctacaactatctgatctttgacaaacctgacaaaaagaagaaatggggaaaaggattccctatttaataaatggtgctgggaaaactggctagccctatgtagaaagctgaaactggatcccttccttacaccttatacaaaaattaattcaagatggattaaagacttaaatgttagacctaaaaccataaaaaccctagaagaaaacctaggcaataccattcaggacataggcatgggcaaggacttcatgtctaaaacaacaaaagcaatggcaacaaaagccaaaattgacaaatgggatctaattaaaccaaagagcttctgcacagcaaaagaaactaccattagagtgaataggcaacctacagaatgggagaaaatttttgcaatctactcatctgacaaagggctaatatccagaatctacgaagaactcaaacaaatttacaaaaaaaaaaaaaaaacaagcccaccaaaaagtgggcaaagcatatgaacagatgcttctcaaaagaagacatttatgcagccaaaagacacgtgaaaaaatgctcatcatcactggccatcagagaaatgcaaatcaaaaccacaatgagataccatctcacgccagttagaatggcaatcattaaaaagtcaggaaacaacaggtgctggagaggatgtggagaaataagaacacttttacactgttggtggggctgtgaactagttcaaccattgtggaagtcagtgcggcgattcctcagggatctagaactagaaataccatttgacccagccatcccattactgggtatatacccaaatgagtataaatcatgctgctataaagacacatgcacacgtatgtttattgcggcactattcacaatagcaaagacttggaaccaacccaaatgtccaacaatgatagactggattaagaaaatgtggcacatatacaccatggaatactatgcagccataaaaaatgatgagttcatatcctttgtagggacatggatgaaattggaaaccatcattctcagtaaactatcgcaagaacaaaaaaccaaacaccgcatattctcactcataggtgggaattga

SEQ ID NO: 12698 - DNA, 1025 bp, Homo sapiens
  SIMILAR (104)..(295): 501254mologous to Homo sapiens Human receptor protein (HURP) 3 amino acid sequence,accession number Y15224,Smith-Waterman Score= 139.
ctccgtggtggacattcgcaagctataagctctgccagtggtgaccccgacgcgatcgccttgaagttacgcttgattgagtgtataactcatcaattttcggggaatcccgttcatcatctccggatccctctcagtggcagccgagaagaaccacaccagttgcctggtgaggagcagcctgggcaccaacatcctcagcgtcatggcggcctttgctgggacagccattctgctcatggattttggtgttaccaaccgggatgtggacaggggctatctggccgtgcttacttattttcactgtcctggagttcttcacagcgctcattggcatgcacttcgggtgccaagccatccatgcccaggccagtgcacctgtgatcttcctgccaaacgccttcagcgcagacttcaacattccccagctccggcattcctctgcgccccctgcctatgacaatgtgggcatatgcccaaggagtcgtctgaggagcaaaagtgagcacctgcgggtggagtccagccttttccctctgggcccagcctctccccacccccaccttgttcatcaggggccagccccatcccagctgccctccctcaccacatctacacatactccggcatctgagtgaagtgttccccagggaccatctctcccaaacttttccccagtgctttctttctaaaagtacaccgggcctgaaccgtcaggggtgtgtgtccttcagctccctgagccctgtcacccttccaggacacccaccttgtgcatctaagcatttctctgctcattggggaaatcctggcctcattggagactcaggttcgaggccctgccctgaaccttggggccttggggaagggtaaaaaaagccccggaaaccctcccaaaaggggaagaatcctggaactctgggcattcccaccagaagggtgcccgattaccagggcccaaaggcccttcaacagccatggtgtaattgggtttatggccccggtagggaccttccaaagagtcc

SEQ ID NO: 12699 - DNA, 982 bp, Homo sapiens
  SIMILAR (299)..(979): 471254mologous to Escherichia coli monomeric lac repressor,accession number X58469,Smith-Waterman Score=358.
aggaaaaggagtggatggacaaagtggggcccaaagtctggatctagttctgaccaacaaggagaaattgatgcacaatggggaagtgaccttggcattttcaactggcagagccggtaagatttcagaggtactggatgctgggacagtcgatcccctgacaaagctggtccttgtgaatgccatttatttcaagggaaagtggaatgagcaatttgacagaaagtacacaaggggaatgctctttaaaaccaacgagctgcccaaaggattctctttgcccactgcccacatagagcctatttatctagacacgggaattgcaacagagaaagaatgcattgccttggatcctctacaaaatacaggcttgcatgccaagatgtcatctgaggatggaaattatctggttccacccctggatatgatcaaccttcatagactgtgcattatacatgggccaggcggtgaagggcaatcagctgttgcccgtctcactggtgaaaagaaaaaccaccctggcgcccaatacgcaaaccgcctctccccgcgcgttggccgattcattaatgcagctggcacgacaggtttcccgactggaaagcgggcagtgagcgcaacgcaattaataacttctagttccacattttgggagcacactgagaaagaaggacatgacagccgggtagtacccaccagtcggaggcaatcagacaccccggagcgtcaggaggaactggattttgccgatttcggaaccaccatcaaacaggattttcgcctgctggggcaaaccagcgtggaccgcttgctgcaactctctcagggccaggcggtgaagggcaatcagctgttgcccgtctcactggtgaaaagaaaaaccaccctggcgcccaatacgcaaaccgcctctccccgcgcgttggccgattcattaatgcagctggcacgacaggtttcccgactggaaagcgggcagtga

SEQ ID NO: 12700 - DNA, 381 bp, Homo sapiens
  SIMILAR (235)..(375): 1001254mologous to Homo sapiens dJ399J4.1 (similar to RPL7A),accession number AL078595,Smith-Waterman Score=243.
atgagtcaccgtgccaggccagagcaggtgcacggccaccagcaggcggctcaagcaggagcagggcctgctaactgggtcaccagtagaccagaacccacacgcatccagaggcccaacttctccggtgacctgatggtgttttctttgaataggtcaccctatccagggagaatgacggaaactggttggcttttgtttgttctgctgcttatcattgtgaaaatgggagaaatccagattctattagaaaacaggaacgacagatatgatgagatctgccggcactgggaaggcgatgtcctgggttacaagtctgtggctcagatcgccaagctcgaaaaggcaaaggctaaagaacttggcactaaactcggttaa

SEQ ID NO: 12701 - DNA, 363 bp, Homo sapiens
  SIMILAR (43)..(363): 931254mologous to Homo sapiens ribonuclease 6 precursor,accession number U85625,Smith-Waterman Score=533.
cctggcgttgctttgcctgggcggtgcagacaagcgcctgcggatcttttgccataaatgagggcatactggcctgacgtaatttactcgtttgccaatcgcagccgcttctggaagcatgagtgggaaaagcatgggacctgcgccgcccaggtggatgcgctcaactcccagaataagtactttggcacaagcctggaactctacagggagctggacctcaacagtgtgcttctaaaattggggataaaaccatccatcaattactaccaagttgcagattttaaagatgccctcgccagagtatatggagtgatacccaaaatccagtgccttccaccaagccaggatgaggatagacag

SEQ ID NO: 12702 - DNA, 655 bp, Homo sapiens
  SIMILAR (298)..(576): 1001254mologous to Homo sapiens ribonuclease 6 precursor,accession number U85625,Smith-Waterman Score=502.
cagaggttcaaaaacgactgtagagaccctcgggatactgggccaatacatggactatggcccgataaaagtgaaggagtaatagatcgtggccttcaatttagaagagattaaggatctttgcccagaaatgagggcatactggcctgacgtaattcactcgtttcccaatcgcagccgcttctggaagcatgagtgggaaaagcatgggacctgcgccgcccaggtggatgcgctcaactcccagaagaagtactttggcagaagcctggaactctacagggagctggacctcaacaggttgcagattttaaagatgcccttgccagagtatatggagtgatacccaaaatccagtgccttccaccaagccaggatgaggaagtacagacaattggtcagatagaactgtgcctcactaagcaagaccagcagctgcaaaactgcaccgagccaggggagcagccgtcccccaagcaggaagtctggctggcaaatggggccgccgagagccggggtctgagagtctgtgaagatggcccagtcttctatcccccacctaaaaagaccaagcattgatgcccaagttttggaaatattctgttttaaaaagcaagagaaattcacaaactgcagctttctaaaaaacaaaaaa

SEQ ID NO: 12703 - DNA, 627 bp, Homo sapiens
  SIMILAR (235)..(417): 1001254mologous to Homo sapiens Human breast tumour- associated protein 24,accession number Y48563,Smith-Waterman Score= 342.
atgcgccctgcagccctgcgcggggccctgctgggctgcctctgcctggcgttgctttgcctgggcggtgcggacaagcgcctgcgtgcgtcagtgtccaggcccttctcattggagcacccagagccaggacactgcctggatctgcacctcagggcgtaccctgctcggtgtgtcaagctgaccctggccccaggacttctgggtcagatgaccgacgtgggaatctggtcggatcttttgccagaaatgagggcatactggcctgacgtaattcactcgtttcccaatcgcagccgcttctggaagcatgagtgggaaaagcatgggacctgcgccgcccaggtggatgcgctcaactcccagaagaagtactttggcagaagcctggaactctacagggagctggacctcaacaggggtgagcgagttcccactcagttccccagagagctggttgttaacaggagcctggcaccgcccccaacccctggcttcctctctggccatgtgatctctgtacacaccagctcccctttgccttctgccatgagcggaagtttcctgaggcccttgccagaagcagaatctggttccatgcttctcggacagcctgcagacccctga

SEQ ID NO: 12704 - DNA, 801 bp, Homo sapiens
  SIMILAR (1737)..(2222): 941254mologous to Homo sapiens neutral protease large subunit,accession number M27826,Smith-Waterman Score=794.
  misc_feature (1)...(801): n = a,t,c or g
atgacacattttgaggttctggctggccatgaaagtttaggggacatgattcaaaccattacagggtgtgaccaaacaattaattttatctccaaccccaatttggctgtatttggagataaagcctataagaaggtaattaagaatgccgtgtttcttaatgatagacaatggcttacaaagcactttcagtacggtccctataaaatgggtaccttagtcagtgagaagcatgagtgggaaaagcatgggacctgcgccgcccaggtggatgcgctcaactcccagaagaagtactttggcagaagcctggaactctacagggagctggacctcaacagcctgacagctggatccaggggagtgggtgtagacctcactgccctccagcagcttctgcatgtgcactattcggctactgggatcattcctgaggaatgttctgagcctaccaagcctttccagatcattctacatcacgaatcacacagagtgggtgcagagtattgggatgcccatctgggaaccattcttcattcattcagagttcggccattagggaaaacgagggacttccaaccagcatgttgccgtttttcagccatgatttcctgattaaaggatagttgcatttattaagtngttttcttaggaaaggacggaaaattttgggaagtctnttaggttttttgnccgcagaatttctngggacaagcaggcaggaaagagattttgggccagggttctttaaggcccagaattnaccccaacttgcttaattgttccttgncttgccntaag

SEQ ID NO: 12705 - DNA, 1232 bp, Homo sapiens
  SIMILAR (7)..(189): 1001254mologous to Homo sapiens ORF1; putative,accession number M19503,Smith-Waterman Score=311.
cggcgactgaccgtggtcgtgggcggacggcggcttgcagcgtggaggagctggggtcgctgtgggtcgcgaagcagagcccgggacgtgcgcgcttggtgcacgatcctgaaggggagctccgaggggcccgggtcgccagggctgctgcggccattcccggagcccggcgcggggcccgcgagatactggtttaggccgtcccagggctccgggcgcacccggtggccgctgctgcagcggagggagcgcggcggcgcgggggctcggagacagcgtttctcccggaagtcttcctcgggcagcaggtgggaagtgggagccggagcggcagctggcagcgttctctccgcaggtcggcaccatgcgccctgcagccctgcgcggggccctgctgggctgcctctgcctggcgttgctttgcctgggcggtgcggacaagcgcctgcgtgacaaccatgagtggaaaaaactaattatggttcagcactggcctgagacagtatgcgagaaaattcaaaacgactgtagagaccctccggattactggacaatacatggactatggcccgataaaagtgaaggatgtaatagatcgtggccctttcaatttagaagagattaaggatcttttgccagaaatgagggcatactggcctgacgtaattcactcgtttcccaatcgcagccgcttctggaagcatgagtgccgaaaaggcatgggacctgcgccgcccagggtggatgcgctcaactcccagaaagaagtactttggcagaagcctggaactctaccaggaagctggacctcaacagtgtgctttttaaaattggggataaaaccatccatcaattactaccaagttgcagattttaaagatgcccttgccagagtatatggagtgatacccaaaatccagtgccttccaacaagccagggtgagggaagtacagacaattggtcaggatagacctgtgcctcattaaggcaaggaccaggcagttgcaaaactggcaccgagccgggggagcagccgttcccccaagcaggaagtctggctggcaaatggggcccgccgagagccggggtctgagagtctgtgaagatggcccagtcttctatcccccacctaaaaagaccaagcattgatgcccaagttttggaaatattctgttttaaaaagcaagagaaattcacaaactgcagctttctaaaaaacaactccaaagtg

SEQ ID NO: 12706 - DNA, 517 bp, Homo sapiens
  SIMILAR (2)..(511): 901254mologous to Mus musculus LPIN3,accession number AF286724,Smith-Waterman Score=817.
aaatgggtacaagttcctgtactgctcggcgcgggccattggcatggcggacctcaccaaggggtacctgcagtgggtgagcgaggggggctgtagcctccccaagggccccatccttctgtctcccagcagcctcttctctgccctccacagagaggtgatcgagaagaaaccagaggtgttcaaggtcgcctgcctgagtgacatccagcagctgtttctgccccacggacagcccttctatgctgcctttgggaataggcccaatgatgtctttgcctaccggcaggtgggcctgcctgagtcacgcatcttcacagtcaacccccggggagagctcatccaggagctcataaagaaccacaaatccacgtatgagcggcttggtgaagtggtcgagctcctcttcccacctgtggcccgtggccccagcacagacctggccaaccctgaatacagtaacttctgctactggcgggagccactgcctgctgtggaccttgataccctggactga

SEQ ID NO: 12707 - DNA, 487 bp, Homo sapiens
  SIMILAR (14)..(418): 761254mologous to Homo sapiens bcr polypeptide,accession number Y00661,Smith-Waterman Score=507.
  misc_feature (1)...(487): n = a,t,c or g
tgggannnnngagcganngaatcgagaccatagaccagcgtggtggaattcggacccgcaggccctgcaggacagagactggcagcgcgccgtcatcgccatgaatgggatcgaagtaaagctctcggtcaagttcaacagcagggagttcagcttgaagaggatgccgtcccgaaaacagacaggggtcttcggagtcaagattgctgtggtcaccaagagagagaggtccaaggtgccctacatcatgcgccagtgcgtggaggagatcgagcgccgaggcatggaggaggtgggcatctaccgcgtgtccggtgtggccacggacatccaggcactgaaggcaggcttcaacgtcagtgagtgtcggcctgcgcaggacgggatggaggtgtgggcagtggtgtccgcgatgagatctcagagtgctccatggcccagataacaaggacgtgtcggtgatgatgagcgagatggacgtgaacgc

SEQ ID NO: 12708 - DNA, 871 bp, Homo sapiens
  SIMILAR (656)..(982): 331254mologous to Homo sapiens Human secreted protein encoded by gene No. 12,accession number Y27700,Smith-Waterman Score=174.
  misc_feature (1)...(871): n = a,t,c or g
tttttttttctcaggaaactttttaatgaaagtgtcggccacggtggtgtgtaggtggctgagctcagattgcagctgctaagacaccagccacttaccaagagaaagccaggctgcttcaaacccagggcccgcggcaaaaaagcatcacttccggccggggagtctggaagccacgccttgtgggaggtcacactggcatctaggccttcgcctgcactgcagaaggagagccgggtcccctcctggagaacgctgcgttccccagccccacaccggctttgccaccacacaggctgttgaggcaggaggcgggtaagacgtagctgtagacccaaagcaaccaccagccctgggaccctgagacatgacctccaaggacctgctgtcagtcatggtgacaggctggctggggttggcagggagcttgctctccttctcggagggccggagcagcgtggggccaaagacagtggcgaggttgtgcagggacatcttattgaccgcctccttctctgccacccgatgccctctgcgaagttggggtagaactcgtcagtgaagaggggctcgggcagctcacgggagtacagcttcagcgtgcctgcgatggcgttcacgtacatctcgctcatcatcaccgacacgtaccttgtatctactacatgcctcggcgctcgatctccttcagcactggcgcatgatgtagggcactttggacctctctctcttgtgaccacagcaatcttgacttcgaagaaccctgtctgttttcgggacggcatcctctcaagctgaactccctgctggtgaacttgaccganagcttacttcgatccattaatgcgatgacggagcgctgccggctttt

SEQ ID NO: 12709 - DNA, 3566 bp, Homo sapiens
  SIMILAR (210)..(389): 951254mologous to Rattus norvegicus CDK5 activator-binding protein,accession number AF177476,Smith-Waterman Score=300.
gtaaaataaagaatttacttttccaggacctactgcctccctgttccccccccaccttttttttttttcaaacaatcttgaaccctttgtcacgagtcagttgccaagagaagcctatttgttggtttgagagcagttcatgcagacacagaccacttcctctgagaattcatttgcttccccaggatggaatctggctgggcctctgaccttgctggtcacgtgggccggggcctccatcagtcataccctggactcctatctgtgtctaaacaccacgccccacccccaactgcacggcagccactcgcatagcactctgggagggctgtgggcatgagcagcgaggactccatcagcagctcccccacataagccctgctgatgagggggcttgcgaagcagctttgatgtgctggtaaatccaggtgcaaaacagaactcaagttaaggcctccgcacagcactgcgttctaactgtgaaggattcttactctagtgtcctgtgtggaggtattggaattgtccattgctaagactcagaggagaaaagcacttagcatcgcaggacttggagcaccggtgctgaggcaacccttcattcattcgtcggatgtgtgttaaggcccagggcaggggtcagggtttctcctctcacacagcacgtgggtggcaggaccaacaccgggtctgacctcccagccgggggcacaggctgctaaccccaggcctggaatctgtcagatgcccttcccgtgctgacttgacttagacaggcctcctgaccttcccgcaaaggtcatgtgtgattcgcaggggttctggccgcttgaaaggttcctgagaaagtacatgcaatgaggacagagcttgcagagggaggacaggcatgcagaaggctctgtgtgcagccccagacctgggtaccttcgtcaccgtcctcaccccacctccgggtgcgcagatagggagcaggtctcctgtgttatggcccaagcagggctgttaggacactgagaacattccctcctcccgcaggagagagaggtccaaggtgccctacatcgtgcgccagtgcgtggaggagatcgagcgccgaggcatggaggaggtgggcatctaccacgtgtccggccggtgtggccgcagacatccaggcactgaaggcagccttcaacgtcagtgagtgtcggcctgcgcaggacgggatggaggtgtgggcagtggtgtccgcgatgagatctcagagtgctccacggcccaggcatgtcacatccttctctgtgtcttttcttcatttatcaggatcttcaaggaggccgctgcatttccgtgctctttccagataacaaggacgtgtcagtgatgatgagcgagatggacgtgaacgccatcgcaggctcgctgaagctgtacttccgtgagctgcccgagcccctcttcactgacgagttctaccccaacttcgcagagggcatcggtgagcactggaggccttggcctcatgggagacgtctcctccatgtgcactgctgccctcagaggctgtgaaaagtgaggtgtgggaacccgagctgtgcttcctctgccatggtcggaattttaacccaacctcaaaaagcaggggaccaaaactgagcctatcctggaaggccttgcccatccccagagagctccccatccctattcctcaaggaggccaagtgggtgaaatggtcagcactgccgtgctgtggggtcctaaagtctgctgtcctccttcctgcagaccagggctaaacactggtgcccaggtgctcttgccatgggtcctggtccagccaagcatggtttcaaacatgacctgacccttagtcaacctggaggctgatgtctagagtgggtgctgatgcgtgcagtacctgtggcctgtgcatcacccttagggcaggtctgcctcccgggcccatgcacagaggacctggtctcccagcctgcaggtgcccctgtggtgtccaggacaactagggggtctctgcgtacttggtggggctgggaccctcccacttcccacctccttgtgtccctcactcccctgtttcattccatgctgagcctcccctgccttgggctccctggggagggggtggtggcaggagttgcccaagggctgctctgcccatcagcagctgctctagcggctcctcctgctgctgttcgccgggtgctgctgaccccaaggctggagtcagcttgcagcacagccagggtcgaggtcactccctccctgaggactctagcacggcacagcccctctgcctctctcctggtggtggcgttgaaacagcaccctctgcttcggtcctcgacaggatggcagagaaggaggcagtcaataagatgtccctgcacaaccttggcacggtctttggccccacgctgctccggccctccgagaaggagagcaagctccctgccaaccccaagcaagcccatcaccatgactgacagctggtccttgaaggtcatgtcccaggtatgggaagacaggctccagcccatgcaaccccagcctgacagaggtggcctctgcctgccccacccccagtcctgcccatcttccgacttgcattgtatgtggtggtggctgagattcagagacagggacttgcctaggtttgcatggatgggagtgatagggggtgcccaggccacctcctggtcctgctggtgcaccttgctgggggcttaaaaccaccccaagtgttccggtgtggtggctcatgcctgtaatcccagcactttgggaggccgaggcaggacaactgaacccaggtgtttgagaccagtctgggcaatgtagcaaacctcatctccagaaaaaatacaaagaaaaattagtcaggcattgtggcacacatctgtaatcctaggtatctgggaggctgacacaggaggattgcttgagcccaggagttagaggctgcagtgatccatgatggagccactgtactccagcctgggggacagagcaaggccctgtgcatctctaaaataaataaccacccctcacccaacaagtcatgccttgtcaggaccccaccccacccccgtcccactgtaaggggttcatgacaccagcaggggtttctagcacctgaggtggacttgggagcttgggccccaaagacctccccaccagcagctgtgagccccgctctgagccactctcctcttccccactccgcgagggcaggtcgaggtgctgctgtacttcttgcggctggaggccatccctgccctggacagcaagggacagagcatcctgttctccaccgatgtctaaaggtcccagtccatctcctggaggcggacagacggcctggaaacctctggctaatcaggccatctaataagatgctggaatgtaatcctggacaatccgtgtcctggcagcatttggtcttcctctaagcgcctggctccgctgttctcaggagtgggttctgaagtctctatctgggcccggtaggctcccttgtcctggcttccatctctgtctcagcgaccattcagccccgcctccc

SEQ ID NO: 12710 - DNA, 1379 bp, Homo sapiens
  SIMILAR (88)..(495): 861254mologous to Homo sapiens Sequence encoded by the breakpoint cluster region (bcr) ofchromosome 22 on pVI-3,accession number P60303,Smith-Waterman Score=584.
gggttcaaatctgtactgcaccctggagggggattcctttgggtattttgtgaataaagcaaagacgcgcgtctacagggacatcatgctgatccaaactggaacgaggaatttgagatagagctggagggctcccagaccctgaggatactgtgctatgaaaagtgttacaacaagacgaagatccccaaggaggacggcgagagcacggacagactcatggggaagggccaggtccagctggacccgcaggccctgcaggacagagactggcagcgcaccgtcatcgccatgaatgggatcgaagtaaagctctcggtcaagttcaacagcagggagttcagcttgaagaggatgccgtcccgaaaacagacaggggtcttcggagtcaagattgctgtggtcaccaagagagagaggtccaaggttgccctacatcggtgcgccagtgcgtggaggagatcgagccgccgaaggcattggaaggaggttgggcatctaccgcgtgtccggccggtgtggccacggacatccaggcactgaaggcagccttcgacggcaataacaaggacgtgtcggtgatgatgagcgagatggacgtgaacgccatcgcaggcacgctgaatctgtactttcgtgagctgcccgagcccctcttcacttgacgagttctaccccaacttcgcagagggcatcgggtggcagagaaggaggcggtcaataatatgttctctgcacaacctcgccacggtctttggccccacgctgctccggccctccgagaaggagagcaagctccctgccaaccccagcccagcctatcaccatgactgacagctggtccttggaggtcatgtcccaggtccaggtgctgctgtacttcctgcagctggaggccatccctgccccggacagcaagagacagagcatcctgttctccaccgaagtctaaaggtcccagtccatctcctggaggcggacagatggcctggaaacctctggctaatcgggccatccgtagagcgggaaccttcctgaggtgtccttgggccacccccaagtgttgggccatctgccaagagacagcgacccaaagccgaaggacaggtggcctggaaagatcccgcccaggtctgggagccccaggctggcctcagactgtggttttttatgtggccaccccaggggggccccaagccagtttcatcttcagaggccaggcctgaccctgggagacagggtgaagggagtggtttttatgaacttaacttagagtctaaaagatttctactggtttcaattgtcaagatgcggcctctctggggagaagggaacgtgacttggatttcctcaatgttgtatctttgaataaaacgttg

SEQ ID NO: 12711 - DNA, 1365 bp, Homo sapiens
  SIMILAR (285)..(641): 941254mologous to Homo sapiens breakpoint cluster region protein,accession number U07000,Smith-Waterman Score=558.
ataacaaggacgtgtcagtgatgatgagcgagatggacgtgaacgccatcgcaggcacgctgaagctgtatttccgtgagctgcccgagcccctcttcactgacgagttctaccccaacttcgcagagggcatcgggtcctcactggcggccagcgctgtgggtgtgacgatgatgacaagcctaaactgcgcaaggactcgtgtcccgggcgctccatgtgaccacctcgggagaggtctccggcttgtcgtaacccagaggagtgacccactgcctcctgcagctctttcagacccagttgcaaagaagagctgcatgctcaacctgttgtcgtccctgccggaggccaacctgctcaccttccttttccttctagaccgcctggaaaggatggcagagaaggaggcagtcaataagatgtccctgcacaaccttggcacggtgtttggccccacgctgctccggccctccgagaaggagagcaagctccctgccaaccccagccagcccatcaccatgactgacagctggtccttggaggtcatgtcccaggtcgaggtgctgctgtacttcctgcagctggaggccatccctgccccggacagcaagagacagagcatcctgttctccaccgaagtctaaagggtccccagggctggtggttgcctttgggtctacagctacgtcttacccgcctcctgcctcaacagcctgtgtggtggcaaagccggtgtggggctggggaacgcaggcgttctcccaggagggggaccctggctctcccttctgcaatgccaggcgaaggcctagatgcccagtgtgaccttcccacaaggcgtggcttccagacttccccggccggaagtgatgctttttttgccttgggccctgggtttgaagcagcctggctttctcttggtaagtggctggtgtcttagcagctgcaatctgagctcagccacctacacaccaccgtgggccgacactttcatttaaaaagttttcctgagacgacttgcgtgcatgttgacttcatgatcagcgccgctgggaagaacccctgagccggtggggtggggctgtggccaccgctctggcacgagcccctcagtcttgggtggtttctgcctggtccgggatttggtgttgctgctgagtccagcctttccaccacctccgcatgggctgtgggtgttgtcagctgcctcccgccttggcttcagtagctcacccagcttacaggggagctgccctgggctggagatgggcatgcaccctgggtcctacttgaatgaatgcagtttgaggagacccggccatatacactgggccacgggttaccttcggcaatgcccacatcagc

SEQ ID NO: 12712 - DNA, 400 bp, Homo sapiens; identical to SEQ ID NO: 212
  SIMILAR (171)..(260): 1001254mologous to Homo sapiens peptidylprolyl isomerase,accession number X52851,Smith-Waterman Score=169.
  misc_feature (1)...(400): n = a,t,c or g

SEQ ID NO: 12713 - DNA, 489 bp, Homo sapiens
  SIMILAR (918)..(7): 901254mologous to Homo sapiens putative p150,accession number U93563,Smith-Waterman Score=1499.
atggtcaaccccaccgtgtccttcaacatcactgtcaatggtgagcccttgggctgtgtctccttcaagctgtttgcagacaagtttccaaagacagcagaaaactttcgtgctctgagcactggagagaaaggatttgattataaatgttcctcctttcacagaattattccagggtttatgtgtcagggtggtgacttcacacgccataatggcactggtggcaagtccatctacggggagaaatttgatgatgagaacttcatcctaaagcatacagtgctgggattacggcatgagccacctagcccgggcaattcccagtttttcatctgcactgccaagactgagtggttggatggcaagcccatggtctttggcaaggtgaaagatggcatgaatattgtggaggccatggagcacttcgggtctgggaatggcaagaccatcaagaagatcaccatcgctgactgtacacaacttgactaa

SEQ ID NO: 12714 - DNA, 536 bp, Homo sapiens
  SIMILAR (125)..(535): 721254mologous to Homo sapiens Human tumour-associated protein PRO344,accession number Y06481,Smith-Waterman Score=474.
gcggccgcagctccagctcccggtgtccgggactcgggtctcccgccagggggcgccactccctcgcgctttgcagccctgagcgggggaggggcccaggcggcgggagcccccttggccagccccccagatctgccctgcgggaaggggtggaggaggtacccgtgcgggaggaggcgctggccgaagctcaggcaggggcggggaggggtacggtgaccttagagtcgccgccccgctgcgggctgagccgccgctactctcaacctgccgccccgcttaccccgcaggactgccgggacctcgaggggaccccgggccgcgaggagaggcgggacccgcggggcccaccgggcctgccggggagtgctcggtgcctccgcgatccgccttcagcgccaagcgctccgagagccgggtgcctccgccgtctgacgcacccttgcccttcgaccgcgtgctggtgaacgagcagggacattacgacgccgtcaccggcaagttcacctgccaggtgcctggggtctactacttcg

SEQ ID NO: 12715 - DNA, 1082 bp, Homo sapiens
  SIMILAR (574)..(3024): 861254mologous to Homo sapiens putative p150,accession number U93567,Smith-Waterman Score=3636.
cccagcctctgcccggggcaccccggccttccaggcacgccgggccaccatggcagccagggcttgccgggccgcgatggccgcgacggccgcgacggcgcgcccggggctccgggagagaaaggcgagggcgggaggccgggactgccgggacctcgaggggaccccgggccgcgaggagaggcgggacccgcggggcccaccgggcctgccggggagtgctcggtgcctccgcgatccgccttcagcgccaagcgctccgagagccgggtgcctccgccgtctgacgcacccttgcccttcgaccgcgtgctggtgaacgagcagggacattacgacgccgtcaccggcaagttcacctgccaggtgcctggggtctactacttcgccgtccatgccaccgtctaccgggccagcctgcagtttgatctggtgaagaatggcgaatccattgcctctttcttccagtttttcggggggtggcccaagccagcctcgctctcggggggggccatggtgaggctggagcctgaggaccaagtgtgggtgcaggtgggtgtgggtgactacattggcatctatgccagcatcaagacagacagcaccttctccggatttctggtgtactccgactggcatcagctcccccagtctttagcttagtgccccactgcaaaagtgagctcatgctctcaactcctagaaggagggtgtgaggctgacaaccaggtcatccaaggagggctggcccccctggaatattgtgaatgactagggaggttgggggtagagcactctccagtcctgctgctggcaaggaatggggaacagtggctgtctgcgatcaggtctggcagcatggggcagtggctggatttctgcccaagaccagaggagtgtgctgtggtgggaagttgtaagtcccccagttgctttggtccaggagcccacggtggggtgctctcttcctggtcctctgcttctctggatcctccccaccccctcctgctcctggggccggcccttttctcaagagatccactcaataaacctaagaaccctcaaaaaaaaaaaaaaaaagg

SEQ ID NO: 12716 - DNA, 357 bp, Homo sapiens
  SIMILAR (9)..(353): 701254mologous to Bos taurus xenobiotic/medium-chain fatty acid:CoA ligase form XL-III,accession number AJ132751,Smith- Waterman Score=459.
cattgttgaaataccccattaaccacttttggggggtatcatctatatatcgaatgattctgcagcaggatttcaccagcatcaggttccctgccctggagcactgctatactggcggggaggtcgtgttgcccaaggatcaggaggagtggaaaagacggacgggccttctgctctacgagaactatgggcagtcggaaacgggactaatttgtgccacctactggggaatgaagatcaagccgggtttcatggggaaggccactccaccctatgacgtccaggtcattgatgacaagggcagcatcctgccacctaacacagaaggaaacattggcatcagaatcaaacctgtca

SEQ ID NO: 12717 - DNA, 432 bp, Homo sapiens
  SIMILAR (411)..(1): 701254mologous to Bos taurus xenobiotic/medium-chain fatty acid:CoA ligase form XL-III,accession number AJ132751,Smith- Waterman Score=530.
ctccagggcagggaacctgatgctggtgaaatcctgctgcagaatcattcgatatatagatgataccccccaaaagtggttaatggggtatttcaacaatgtctgtatgatgaccttggtgtcaaactgtggcagatggtggataaagactgtacaacccgctgtccatggttctaccagggtccaaatggtagccacaatccatcctgagtccgacaggcaccaggagacatcagatgtcttcaggctccgtaatttcctacttcctgggaaggagggttgtaaggccaacccatgggagtgttttgccatcttggggaagcctgtggtcccactggtgaagaagatgaccattgggtccaaggtctttgacttaacacaggtgtgttctggggatgctgatctgagaaggagaaattagctcgtgccgaa

SEQ ID NO: 12718 - DNA, 1141 bp, Homo sapiens
  SIMILAR (224)..(907): 1001254mologous to Homo sapiens Gene with similarity to rat kidney-specific (KS) gene,accession number AC003034,Smith-Waterman Score=1190.
aatagttcgcagggactggcaggaagtgagtgacatccacttggccatggccaactgtaaaatgaccaaaagcatcaggttccctgccctggagcactgctatactggcggggaggtcgtgttgcccaaggatcaggaggagtggaaaagacggacgggccttctgctctacgagaactatgggcagtcggaaacgggactaatttgtgccacctactggggaatgaagatcaagccgggtttcatggggaaggccactccaccctatgacgtccagtttcatatggaggcctcagttgaaaactgcattattgtgagcatgaacaccgctgaccctggcagccagggcatcacacacagcctcttgctacaggtcattgatgacaagggcagcatcctgccacctaacacagaaggaaacattggcatcagaatcaaacctgtcaggcctgtgagcctcttcatgtgctatgagggtgacccagagaagacagctaaagtggaatgtggggacttctacaacactggggacagaggaaagatggatgaagagggctacatttgtttcctggggaggagtgatgacatcattaatgcctctgggtatcgcatcgggcctgcagaggttgaaagcgctttggtggagcacccagcggtggcggagtcagccgtggtgggcagcccagacccgattcgaggggaggtggtgaaggcctttattgtcctgaccccacagttcctgtcccatgacaaggatcagctgaccaaggaactgcagcagcatgtcaagtcagtgacagccccatacaagtacccaaggaaggtggagtttgtctcagagctgccaaaaaccatcactggcaagattgaacggaaggaacttcggaaaaaggagactggtcagatgtaatcggcagtgaactcagaacgcactgcacacctaaggcaaatccctggccactttagtctccccactatggtgaggacgagggtggggcattgagagtgttgatttgggaaagtatcaggagtgccatgattccaatgttttccttcttttaaattaaattcagttgctctgcttcctccaagtcctctgtatctttagaatttccgcaggtgagcactcaataacgcaagt

SEQ ID NO: 12719 - DNA, 849 bp, Homo sapiens
  SIMILAR (106)..(333): 1001254mologous to Homo sapiens Gene with similarity to rat kidney-specific (KS) gene,accession number AC003034,Smith-Waterman Score=403.
atgtatgcaaatgtacatagcagctttactctaaatagtcaaaacctgaagacaacaatccagatggctttcaacaggctctatgtgaatgctgagcttatagcaggtgacccagagaagacagctaaagtggaatgtggggacttctacaacactggggacagaggtaagatggatgaagagggctacatttgtttcctggggaggagtgatgacatcattaatgcctctgggtatcgcatcgggcctgcagaggttgaaagcgctttggtggagcacccagcggtggcggagtcagccgtggtgggcagcccagacccgattcgaggggagagtaaggggtggaggcagaatggcatctcagcaatgtggctcccgaacatacatgcattgaaaacgggtatccttttgagggacagccgaaattaccgtggatcccctgacgctagtgtcctcgtttccagaagctccctgtcccgtggaaaccttgggtctgacagcatagggcaactggcagccagcattcagcgacagtcccccgtcgcagtagcagtccgaatttgggttgatcagacccaacacaaggccgtggaggctacaaagtccggcggagtcaaaggaatcagaaaagacaagttaagagtgcataaggtgggtccaggggaccaacactggtatggaggctgtgaagaccccaagctctgggagcccacactatttattggtgatcaaacaaagaagcaggtgacattgttgaaataccccattaaccacttttggggggtatcatctatatatcgaatgattctgcagcaggatttcaccaggtatggtagaagtggcttgtaa

SEQ ID NO: 12720 - DNA, 715 bp, Homo sapiens
  SIMILAR (615)..(592): 871254mologous to Homo sapiens Human secreted protein, SEQ ID NO: 4588,accession number G00507,Smith-Waterman Score=41.
  misc_feature (1)...(715): n = a,t,c or g
actttactagtgactctgcatcccaaagtttggcaaaggggttcaggaggggtggggagccatttaagagctgctcacggatcgtgatggcaataaccatgataatcacaggcagcacttaccttggctcgccccagattggatctggtctaggccacttacaagcatcagctccttcacttacaaaaggactggaggaggttagtgcagggagcaccctgattttacacgatttnnnnnnnnnnnnnnnnnnnnnnnnnnnnnnnnnnnnnnnnnnnnnnnnnnnnnnnnnnnnnnncccactgccactccgactgggagccctgccccgtgccctgctgatgttgacactgaccccggctctattatttcagtttttccttgtaatttctgagaatctagcaacaaggtgagcaatgaaaaaaagtacaataggtaaaaatgtgttagaaattatgactgtgatgaaattttcaaactaatgaagaaaatattgccacaattgccaaagcttttaggactcttaaaaatataggaacattgagtattatgaactaaagactcatactattaaaacgggacgggaccaacaaacccgggaaagaagaaaaaaaagaaannnnnnnnnnngggcggcgcgggttatctccttttgagggggtaatttataggggggatggggctgttaaaaccggggcggggaaaaccccggctc

SEQ ID NO: 12721 - DNA, 660 bp, Homo sapiens
  SIMILAR (2113)..(3645): 991254mologous to Homo sapiens IL-4 Stat,accession number U16031,Smith-Waterman Score=2606.
atgtgccaaggggacacctacgcctgggggggacacatgtgccggggaggacacctgcgccgaggacactcgcacgagcgggatactccacggggtccggaacggcctccccgccctccagccagagacagggagagcaaggatgaaagacggcgaccacctcccaaggacccgccggccgtcaggacctgccaccgactcaccctctacggctacgccgccgccgccgccgccgccgccgccgccgccgccgccgccgccgcccccagccgccccctccgccttcgctgcactccgcctccggggtcccggccggaagtggacagcgcgcgggcaacttccgcttccggcaacggcgccggaagcacgggtccgggccctcccgcggggcgggtactcgtctcccggccgagcgacttcagctcggggacctgccccatggccgctccccagcaggacagggaaaccgccgagaccatgttctgcgaacacccaggagcactgctgagtgcaagcatcatgtcgattgcacaagtggattcacgaacaggcaaggacgtgaccagggacaaatgtgggaaggggagaggacgtgaatcagaagcagagatgcttgccgtcctacagcaggcaggacgggtcaggtctgggacgtcctga

SEQ ID NO: 12722 - DNA, 1248 bp, Homo sapiens
  SIMILAR (46)..(1764): 1001254mologous to Homo sapiens mitochondrial matrix protein,accession number M22382,Smith-Waterman Score=2837.
gaattcgaagcacgggtccgggccctcccgcggggcgggtactcgtctcccggccgagcgacttcagctcggggacctgccccatggccgctgcccagcaggacagggaaaccgccgaggtggggggcttcttgtccgtcccagcccccccaactcaggccctctcgctgcccctggcgaccaccgcgtgcgcccttccccagggcgggcgcagtcctggacgcctccgccgagcgtgactgcgtgcattttctctcctttcccttcccaacctgcggagagaagacagccccagagccgctgtctccatcctctgctgatgcctgctgtctttatgttggcctcgtcgtccgcactgcagtgtggcaggggcgtccctcgtttcccgcggactgaggtgggcgccgggcattcagtaaacgaagaaaccaaagcggagaaggttgggaatcaaacgtctgtcatacctgccaccagcagacaagcggctttgggtacctcctggacccaaagacgaactcagcccctccaggagcgcagtcattggcaccctcgtgggaacaatgccagtgggatgggtggccaccggatgtttccggggcccctcagaggcccagcagcgcaggtcttggagaatgaatgtgggtcactgggccgcgctgcagagggccggtcctgagtcgcttcctggaggagaggcccatggccagcacttggcttcgcctggaggaagaagcacgtgctaaaccacgagcgttcatggtttgtctgtttgataaaagatgctggctttgacacaccaactgacaaagtctttcataggttggagctgctaggttgtgcccctgcccctcctgaaaattagccacacgaaaggaagggtctggaaggtggcagggaagccagcagagaccagggaagtggcagcatcatggtgcaggggcacacaagaaggagatggagcttgcgggagcccccactgccactccgacagggagccctggcccgtgccctgctgatgttgacactgaccccggctctattatttcagtttttccttgtaatttctgagaatctagcaacaagttgagcaatgaaaaaaagtaaaaaagttaaaattgtgttagaaattatgactgtaaagaaattttgaaactaatgaagaaaaaattgccaaaattgccaaagcttttaggactcttaaaaatacagtaacattgagtattatgaactaaagactcatactat

SEQ ID NO: 12723 - DNA, 585 bp, Homo sapiens
  SIMILAR (1)..(582): 1001254mologous to Homo sapiens bA12M9.1 (novel RPS9 (40S Ribosomal protein S9) LIKE protein),accession number AL080243,Smith -Waterman Score=1007.
atgccagtggcccggagctgggtttgtcgcaaaacttacgtgaccccgcggagatcctttgagaaatctcgtctcgaccaagagctgaagctgatcgaagagtatgggctccggaataaacgtgaggtctggagggtcaaatttaccctggccaagatccgcaaggccgcccgggaactgctgacgcttgatcagaaggacccacggcgtctgttcgaaggcaatgccctgctgtggcggctggtctgcattggggtgctggatgagggcaagatgaagctggattacatcctgggcctgaagatagaggatttcttagagagacgcctacagacccaggtcttcaagctgggcttggccaagtccatccaccacgctcgcgtgctgatccgccagcgccatttcagggtccgcaagcaggtggtgaacatcccgtccttcattgtccgcctggattcccagaagcacatcgacttctctctgtgctctccctatgggggtggccgcccgggccgcgtgaagaggaagaatgccaagaagggccagggtggggctggggctggagaccacaaggaggaggattaa

SEQ ID NO: 12724 - DNA, 1425 bp, Homo sapiens
  SIMILAR (403)..(2067): 901254mologous to Homo sapiens putative p150,accession number U93564,Smith-Waterman Score=2636.
atggccttcctgatgcacctgctggtctgcgtcttcggaatgggctcctgggtgaccatcaatgggctctgggtagagctgcccctgctggtgatggagctgcccgagggctggtacctgccctcctacctcacggtggtcatccagctggccaacatcgggcccctcctggtcaccctgctccatcacttccggcccagctgcctttccgaagtgcccatcatcttcaccctgctgggcgtgggaaccgtcacctgcatcatctttgccttcctctggaatatgacctcctgggtgctggacggccaccacagcatcgccttcttggtcctcaccttcttcctggccctggtggactgcacctcttcagtgaccttcctgccgttcatgagccggctgcccacctactacctcaccaccttctttgtgggtgaaggactcagcggcctcttgcccgccctggtggctcttgcccagggctccggtctcactacctgcgtcaatgtcactgagatatcagacagcgtaccaagccctgtacccacgagggagactgacatcgcacagggagttcccagagctttggtgtccgccctccccggaatggaagcacccttgtcccacctggagagccgctaccttcccgcccacttctcacccctggtcttcttcctcctcctatccatcatgatggcctgctgcctcgtggcgttctttgtcctccagcgtcaacccaggtgctgggaggcttccgtggaagacctcctcaatgaccaggtcaccctccactccatccggccgcgggaagagaatgacttgggccctgcaggcacggtggacagcagccagggccaggggtatctagaggagaaagcagccccctgctgcccggcgcacctggccttcatctataccctggtggccttcgtcaacgcgctcaccaacggcatgctgccctctgtgcagacctactcctgcctgtcctatgggccagttgcctaccacctggctgccaccctcagcattgtggccaaccctcttgcctcgttggtctccatgttcctgcctaacaggtctctgctgttcctgggggtcctctccgtgcttgggacctgctttgggggctacaacatggccatggcggtgatgagcccctgccccctcttgcagggccactggggtggggaagtcctcattgtgagtatccggccggtggcctcgtgggtgcttttcagcggctgcctcagttacgtcaaggtgatgctgggcgtggtcctgcgcgacctcagccgcagcgccctcttgtggtgcggggcggcggtgcagctgggctcgctgctcggagcgctgctcatgttccctctggtcaacgtgctgcggctcttctcgtccgcggacttctgcaatctgcactgtccagcctag

SEQ ID NO: 12725 - DNA, 1083 bp, Homo sapiens
  SIMILAR (1)..(720): 861254mologous to Homo sapiens makorin 1,accession number AF192793,Smith-Waterman Score=1036.
atggcggaggctgcagctctcagaccaacagccacaacatcaggggcggcagtggcggcagcggcggcggcagcagcggcctcccctaccaggatccccacagtcaccattctgtccccagggggcaggcgagggggccgcggcagcgatggcagcggcggcagctggactaaacaggtcacctgcaggtattttatgcatggggtttataaggaaggagataactgttgcaagttgcatgacctctctgacagtccgtataatgtagtgtacaagagtttgcagccagggtactgtatttatggagactgctgcagatatgaacatagcaagccattgaaacagaaagaagcaactgctacagagctaactacaaagtcatcccttgctgcttcctcaagtctctcatggatagtcggaccacttgttgaaatgaatacgggtgaagctgagtcaagaaattcaaactttgtaactgtaggagcaggttcagagggctgggtgaatgctgttgagtttgttcctgggcaaccctactgtggccgcactgcaccttcctgcactgaagcacccctgcagggctcagtgaccaaggaagaatcagagaaagagcaaactgctgtggaaacaaagaagcagctgtgcccctatgctgcagtgggagagtgccgatatcgggagaacttgtgtgtatatggagattcgtgtgacatgtgtggctgcagtgagtactgtgtggaggagaaagaagagaagcagaaactcattctgaaatacaaggaggcaatgagcaacaaggcgtgcaggtattttgatgaaggacatgggagctgcccgtttggagggaacggtttttataagcatgtgtaccctgatggccatagagaggagccacagagacagaaggaaagagagaacagcagcccctttgacaacgatgaagaagaggttgtcacctttgagctgggtgagttgttgcttatgcttttggctgcagttggggacgatgaactaacagactctgaagatgagagcgacttgtttcatgaggagctggaagatttttatgacttggatctatag

SEQ ID NO: 12726 - DNA, 565 bp, Homo sapiens
  SIMILAR (2)..(205): 1001254mologous to Homo sapiens makorin 1,accession number AF192793,Smith-Waterman Score=380.
gagctgcccatttggagggaactgtttttacaagcatgcgtaccctgatggccgtagagaggagccacagagacagaaagtgggaacatcaagcagataccgggcccaacgaaggaaccacttctgggaactcattgaggaaagagagaacagcaacccctttgacaacgatgaagaagaggttgtcacctttgagctgggcgaggatgttgcttatgcttttggctgcaggtggggacgacgaactaacaaactcttaagatgagtgggacttgtttcatgatgagctggaagatttttatgacttggatctatagcaaccttgcgtggcgtgtgaactggtctgctgacctcagacagcagctgtcccctgtggtggtgtggcagtgcctgtgttctctcctaggcaggcctctcaactccaggtgctgtcctaagaatttttacccagggcctgttttctcaacccctcacctttccctgaggagtgtgttgttttccctgttgaaaaaagttacaaaaataaatctttaaagttagttttttgtaacacgaatttaaaaaa

SEQ ID NO: 12727 - DNA, 823 bp, Homo sapiens
  SIMILAR (1958)..(3484): 891254mologous to Homo sapiens putative p150,accession number U93572,Smith-Waterman Score=2402.
agaccagtgcggtggaattcaagagacaactgccgctactcgcatgacctctctgacagtccgtatagcgttgtgtttaagtattctcagcgagggtactgtatgtatggagaccgctgcagatatgaacatagcaaaccattgaaacaggaagaagcaactgctacagagctaactacaaagtcatcccttgctgcttcctcaagtctctcatcgatagttggaccacttgttgaaatgaatacaggcgaagctgagtcaagaaattcaaactttgcaactgtaggagcaggttcagaggactgggcgaatgctattgagtttgttcctggacaaccctactgtggccgtactgcgccttcctgcactgaagcacccctgcagggctcagtgaccaaggaagaatcagagaaagagcaaaccgcccgtggagacaaagaagcagctgtgcccctatgctgcagtgggagagtgccgatacggggagaacttgtgtgtatctccacgggagattcttgtgacatgtgtgggctgcaggtcctgcattccaatggatcttgcccagagattcgcaggcattatcaaatcgtgcatttgaggcccatgagaaggacatggagctctcatttgccgtgcagcgcagcaaggacatggtgtgtgggatctgcatggaggtggtctatgagaaagccaaccccagtgagcgccgcttcgggatcctctccaactgcaaccacacctactgtctcaagtgcattcgcaagtggaggagtgctaagcaatttgagagcaagatcataaagtcctgcccagaatgccggat

SEQ ID NO: 12728 - DNA, 540 bp, Homo sapiens
  SIMILAR (5)..(214): 671254mologous to Homo sapiens skin-specific protein,accession number AF005080,Smith-Waterman Score=244.
ttcagccccatgcccacctccagtctcttcctgctgtggttccagctctgggggctgctgcagctctgagggtggtggctgctgcctgagccaccacaggccccgccagtccctccgacgccgacctcagagttccagctgctgtggcagtggcagtggccagcagtctgggggctccagctgctgccacagctctgggggctctggctgctgccacagctctggaggctgctgctgacctgggccatgaggagcacggaggagaaggactggcagatcccaggtgctgaagatgtgtgtcagcctgaggcttcttttctctcatttcccatggaaggacttcggaaatgccttaagttcccctctttatcctgctcatgttcactccattgtagggttgaagtctagcttgtgatattttctggcctggctttccctctcagacatagctctttggagaactaggtgttgtaattcagttatgaagctattttctctgtaacaataaagctttttattcctgaaaaaaaaaaaaaaaaa

SEQ ID NO: 12729 - DNA, 1020 bp, Homo sapiens
  SIMILAR (13)..(930): 601254mologous to Arabidopsis thaliana putative translation initiation factor eIF-2B alpha subunit,accession number AC005970,Smith-Waterman Score=841.
atggagatgccagcttccgacgcccaaatccctgccccgcaggtgcggggcgccccggccatagccctggtgggctgtctcagcctcgccgtggagctgcaggcgggcgccgggggaccgggactcgccgcgctcgtggccttcgtgcgcgacaagctgagcttcctcgtcaccgcccggcccaccgctgtcaacatggcccgcgccgcccgcgacctggctgatgttgcagcccgggaggccgaacgggagggcgctacggaagaggcggtccgggagagagtgatctgctgcaccgaggacatgctggagaaagacctcagagacaaccgaagcattggggacctaggagcccgccacctcctggagcgggtggcccccagcggtggcaaggtgactgtgctgacccactgtaacactggtgctctggccaccgctggctatggtacagccctaggtgtgattcgctcactgcacagcctgggccgcctggagcatgccttctgcacagagacccggccctacaaccagggagcccggctgacggcctttgagctggtctatgagcagatccccgccacccttatcaccgacagcatggtggctgctgccatggcccataggggcgtgtcagctgtggtcgtgggagctgaccgcgtggttgccaacggcgacacagccaacaaggtgggcacctaccagctggccattgtcgccaagcaccatggcattcccttctacgtggctgcccccagctcttcatgtgacctccgtctggagaccggcaaggagatcattattgaagagcgaccgggccaggagctgaccgatgttaatggggtccggattgcagcacctgggattggagtttggaatcctgccttcgatgtcaccccccacgacctcatcactggtggcatcatcacagaactgggggtctttgcccctgaggagctccggacagccctaaccaccaccatctcttccagggatggaaccctagatggaccccagatgtaa

SEQ ID NO: 12730 - DNA, 939 bp, Homo sapiens
  SIMILAR (577)..(1200): 991254mologous to Escherichia coli ferrous iron transport protein B,accession number X71063,Smith-Waterman Score=1069.
atggaatactatgcagccataaaaaaggatgagttcatgccctttgtagggacatggatgaagctggaaaccatcattctcagcaaactatcacaaggacaaaaaaccaagcaccacatgttctcactcatagcagcagcccgccagccccacgcggagtgttctactctttccaaagacagcccacatttcggggtctcctgcacccccaaatgtgggattgctgaatccatccacaggggctgcccagaaaaagacaatgacttctgcagggctggggaggctgtccttgtgaaaataactgaatctacccgagtgtgtggcctgtgctggggaaacgtgggtgacttcaatgatgtcaggcaatcagtgcaattgaaatatgtcaaaaatggctccatcaacgcacccggctcatatttagctataaaatcacaaccatctcatccctggaaccaagcatccctggaaccaagcaagatcagtgctgttgatcttcattttgcaattgagaagaagatcctctccactcacaggaaacagcagcaagatggtttccaggcaccagctgtcactgggcttgtactgttacagtccaagctgagcacgcaaggcaggagccacaaggctcggtccccagtgagccgcccgaggacatcttgtggcaccatctgttcgcccccacccaccctcaccaactgccaggctccgattgttgttggtggtggtggccctttcttcgctgggatggtggatggctcggtgagacatcagagagcaactgctcagctctcacacttgacggtggaatcatcaaatgctttagcgatgccatcggccaaaatggggaaatcgaggcaatcagagacgtacgtgacttgttcaacatctccaggctccccattcatccagcggcttgagaagccagcctttggctag

SEQ ID NO: 12731 - DNA, 711 bp, Homo sapiens; identical to SEQ ID NO: 11952
  SIMILAR (367)..(705): 751254mologous to Homo sapiens putative p150,accession number U93563,Smith-Waterman Score=423.

SEQ ID NO: 12732 - DNA, 2763 bp, Homo sapiens; identical to SEQ ID NO: 7453
  SIMILAR (930)..(4): 951254mologous to Escherichia coli DNA helicase II,accession number M87049,Smith-Waterman Score=1532.

SEQ ID NO: 12733 - DNA, 2748 bp, Homo sapiens; identical to SEQ ID NO: 2297

SEQ ID NO: 12734 - DNA, 1965 bp, Homo sapiens; identical to SEQ ID NO: 7403
  SIMILAR (433)..(1446): 921254mologous to Homo sapiens putative p150,accession number U93572,Smith-Waterman Score=1645.

SEQ ID NO: 12735 - DNA, 1833 bp, Homo sapiens; identical to SEQ ID NO: 12318
  SIMILAR (1)..(1062): 951254mologous to Homo sapiens putative p150,accession number U93563,Smith-Waterman Score=1753.

SEQ ID NO: 12736 - DNA, 1101 bp, Homo sapiens
  SIMILAR (723)..(637): 481254mologous to Rattus norvegicus N-methyl-D-aspartate receptor subunit,accession number D13214,Smith-Waterman Score=71.
atgtctaatctctgctctgccctgcacattgcaggcactttacagctgtataacgacatctccaccgtggtggtggccacatttattggctttgtgacattcatcagggcttccttcttattaaaaatgcatgggctgcagctatttggaaggacaccagatatattcactctagcagcagcccgccagccccacgcggagtgttctactctttccaaagacagcccacatttcggggtctcctgcacccccaaatgtgggattgctgaatccatccacaggggctgcccagaaaaagacaatgacttctgcagggctggggaggctgtccttgtgaaaataactgaatctacccgagtgtgtggcctgtgctggggaaacgtgggtgacttcaatgatgtcaggcaatcagtgcaattgaaatatgtcaaaaatggctccatcaacgcacccggctcatatttagctataaaatcacaaccatctcatccctggaaccaagcatccctggaaccaagcaagatcagtgctgttgatcttcattttgcaattgagaagaagatcctctccactcacaggaaacagcagcaagatggtttccaggcaccagctgtcactgggcttgtactgttacagtccaagctgagcacgcaaggcaggagccacaaggctcggtccccagtgagccgcccgaggacatcttgtggcaccatctgttcgcccccacccaccctcaccaactgccaggctccgattgttgttggtggtggtggaagaaagaaaggtgaaacacttgtcaatcaacaaacattcaacatggtgctcgattccacaatgaacacaagaaatatacaaatgattcttgacttcatgaagctcatcgtctgcatgggccctttcttcgctgggatggtggatggctcggtgagacatcagagagcaactgctcagctctcacacttgacggtggaatcatcaaatgctttagcgatgccatcggccaaaatggggaaatcgaggcaatcagagacgtacgtgacttgttcaacatctccaggctccccattcatccagcggcttgagaagccagcctttggctag

SEQ ID NO: 12737 - DNA, 1725 bp, Homo sapiens
  SIMILAR (682)..(2913): 791254mologous to Homo sapiens putative p150,accession number U93574,Smith-Waterman Score=2981.
ctaataagcaacttcagcaaagtctcaggatacaaaatcaatgtgcaaaaatcacaagcattcttatataccaacaacagacaaacagagagccaaatcatgagtgaactcccattcacaattgcttcaaagagaatgaaatacctaggaatccaacctacaagggacatgaaggacctcttcaaggagaactacaaaccactgctcaatgaaataaaagaggatacaaacaaatggaagaacattccatgctcatgggtaggaagaatcaatattgtgaaaatggccatactgcccaagaattggaaaaaaactactttaaagttcatatggaaccaaaaaagagcccgcattgccaagtcaatcctcagccaaaagaacaaagctggaggcatcatgctacctgacttcaaactatactacaaggctacaataacgaaaacagcatggtactggtatcaaaacagagatatagatcaatggaacagaacagagccctcagaaataatgccacatatctacaaccatctgatctttgacaaacctgataaaaacaagaaatggggaaaggattccctatttaataaatggtgctgggaaaactggctagccatatgtagaaagctgaaactggatcccttccttacaccttatacaaaaattaattcaagatggattaaagacttaaatgttagacctaaaaccataaaaaccctagaagaaaacccaggcaataccattcaggacataggcatgggcgaggacttcatgtctaaaacaccagaagcaatggcaacaaaagccaaaattgacaaatgggatctaattaaactaaagagcttctgcacagcaaaagaaactaccatcagactgaacaggccacctacagaatgggagaaaatttttgcaatctactcatctgacaaagggctaatatccagaatctacaatgaactccaacaaatttacgagaaaaaaacaaacaaccccatcaaaaagtgggcaaaggatatgaacagacacctctcaaaagaagacatttatgcagccaaaagacacatgaaaaaatgcgcatcatcactggccatcagagaaatacaaatcaaaaccacaatgagataccacctcacaccagttagaatggcaatcattaaaaagtcaggaaacaacaggtgctggagaggatgtggagaaataggaacacttttacactgttggtgggactgtaaactagttcaaccattgtggaagtcagtgtggcgattcctcagggatctagaactagaaataccatttgacccagccatcccattactgggtatatacccaaaggattataaatcatgctgctatgaagacacatgcacacatatgtttattgtggcactattcacaatagcaaagacttggaaccaacccaaatgtccaacgatgatagactggattaagaaaatgtggcacatatacaccatggaatactatgcagacataaaaaaggatgagttcatgtcctttgtacggacacggatgaagctggaaaccatcattctcagcaaaatatcacaaggagaaaaaaaccaaacaccgcatgttctcactcataggtgggaattgaacaataagaacacatggacacaggaaggggaacatcgcacagcggggcctgttgtggggtggggcgaggggggagggatagctttaggagatatacctaatgttaagtga

SEQ ID NO: 12738 - DNA, 999 bp, Homo sapiens; identical to SEQ ID NO: 11956
  SIMILAR (232)..(870): 991254mologous to Escherichia coli TEM-derived extended spectrum beta-lactamase,accession number AF308742,Smith-Waterman Score=1085.

SEQ ID NO: 12739 - DNA, 759 bp, Homo sapiens; identical to SEQ ID NO: 12322
  SIMILAR (2)..(1603): 951254mologous to Homo sapiens unknown protein,accession number M22333,Smith-Waterman Score=2678.

SEQ ID NO: 12740 - DNA, 1431 bp, Homo sapiens; identical to SEQ ID NO: 2316
  SIMILAR (403)..(969): 591254mologous to Mus musculus reverse transcriptase,accession number U15647,Smith-Waterman Score=645.

SEQ ID NO: 12741 - DNA, 2657 bp, Homo sapiens
  SIMILAR (352)..(870): 911254mologous to Homo sapiens putative p150,accession number U93572,Smith-Waterman Score=813.
atgaacatcgatgcaaaaatcctcaataaaatactggcaaaccgaatccagcagcacatcaaaaagcttatccaccatgatcaagtgggcttcatccctgggatgcaaggctggttcaacatacgaaaatcaataaacatagtccagcatataaacagaaccaatgacaaaaaccacatgattatctcaatagatgcagaaaaggcctttgacaaaattcaacaacgcttcatgctaaaaactctcaataaattaggtattgatgggacgtatctcaaaataataagagctatctatgacaaatccacagccaatattgtactgaatgggcaaaaactggaagcattccctttgaaaactggcacaagacagggatgccctctctcaccacttctattcaacatagtgttggaagttctggccagggcaatcaggcaggagaaggaaataaagggtattcaattacgaaaagaggaaatcaaattgtccctgtttgcagatgacatgattgtacatctagaaaaccccattgtctcagcccaaaatctccttaagctgatagacaatttcagcaaagtctcaggatacaaaatcaatgtgcaaaaatcacaagcattcttatacaccaataacagacaaacagagagccaaatcatgagtgaactcccattcacaattgcttcagagagaataaaatacctaggaatacaacttacaagggacgtgaaggacctcttcaaggagaactacaaaccactgctcaatgacataaaagaggatacaaacaaatggaagaacactccacgctcatgggtaggaagaatcaatatcatgaaaatggccatactgcccaaggtaatttatagattcaatgccatccccatcaagctaccaatgactttcttcacagaattggaaaaaactactttaaagttcatatggaaccaaaaaggagcccgcattgccaagtcaatcctaatttatagattcaatgcccaagaattggaaaaaactactttaaagttcatatggaaccaaaaaggagcccgcattgccaagtcaatcctaagccaaaagaacaaagctggaggcatcacgctacctgacttcaaactatactacaaggctacagtaatcaaaacagcatggtactggtaccaaaacagagatatagaccaatggaacagaacagagccctcagaaataatgccacatatctacaaccatctgatctttgacaaacctgacaaaaacaagaaatggggaaatgattccctatttaataaatggtgctgggaaaactggctagccatatgtagaaagctgaaactggatcccttccttataccttatacaaaaattaattcaagatggattaaagacttaaatgttagacctaaaaccataaaaaccctagaagaaaacctaggcaataccattcaggacatagccatgggcaaggactttatgtctaaaacaccaaaagcaatggcaacaaaagccaaaattgacaaatgggatctaattaatctaaagagcttctgcacagcaaaagaaaccaccatcagagtgaacaggcaacctatagaatgggagaaaatttttgcaatctactcatctgacaaagggcgaatatccagaatctacaatgaactcaaacaaatttacaagaaaaaaacaaacaaccccatcaaaaagtgggcaaaggatatgaacagacacttctcaaaagaagacatttatgcagccaaaagacacatgaaaaaatgctcatcatcactggccattagagaaatgcatatcaaaaccacaatgagacaccatctcacatcagttagaatggcgatcattaaaaagttaggaaacgactggtgctggaggggatgtggagaaataggaagacttttacactgttggtgggactgtaaactagttcaaccattgtggaagtcagtgtggcgattcctcagggatctagaactagaaacaccatttgacccagccacccccattactgggtatatacccaaaggattataaatcatgctgctataaagacatatgcaccaagtatgtgtacctgcggcactattcacaatagcaaacacttggaacccaaccccaaaatgtccatccaatgatagactggattaagaaaatgtggcacatatacacccatggaatactatgcagccataaaaaaggatgagttcatgtcctttgcagggacatggatgaagctggaaaccatcattctgagaaaactatcacaaggacagaaaaccaaacaccgcatgtcctcactcataggtgggaatttaacaatgagaacatttggacacagtgcagggaacatcacacaccagggcctatcatgaggtgtggggctgggggagggatagcattaggagaaataactaatgtaaatgaccagttaatgggcacagcaaaccaacatggcacatgtatacctatgcaacaaacccgcacattgtgcacatgtaccctagaacttaaagtatagtaataaaaaaaattcaccaaacaccacaaaaaaaatcaagattgtcaaagaaaatttccacgtcccccgaaatcaaataaatagttagacaagcaggagttaaccagatatggccccattggcaaagtgtcca

SEQ ID NO: 12742 - DNA, 6334 bp, Homo sapiens
  SIMILAR (1)..(546): 921254mologous to Homo sapiens putative p150,accession number U93569,Smith-Waterman Score=856.
atgggcaaggacttcgtgtctaaaacaccaaaagcaatggctacaaaagccaaaattgacaaatgggatctaattaaactgaagagcttctgcacagcaaaagaaactaccatcagagtgaacaggcaacctacagaatgggagaaaatttttgcaatctactcatctgacaaagggctaatatccaaaatctacaaagaactcaaacaaatttacaagaaaaaaaacaaccccatcaaaaaggaggcgaaggatatgaacaggcacttctcaagagaagacatttatgcagccaacagacacatgaaaaaatgctcaccatcactggccgtcagagaaatgcaaatcaaaaccacaatgagataccatctcataccagttagaatggcgatcattaaaaagtcaggaaacaacaggtgctggagagggtgtggagaaataggaacacttttacactgttggtgggactgtaaactagttcaaccattgtggaagacagtgtggcgattcctcaaggatctagaactggaaataccatttgacccagccaccccattactgaatatatactcaaaggagtataaatcatgctgctataaagacacatgcacatgtatgtttattgtggaactattcacaatagcaaagacttggaaccaagccaaatgtgcaacaatgatagactggattaagaaagtgtggcgcatatacagcatggaatactatgcagccataaaaaaggatgagtttatgtcctttgtagggacatggatgaagctggaaaccatcattctcagcaaactatcgtcttcgctgaaacatgggcactcgtgggaagtgctttctgttccccaggctcagttattttcatatcttcagctgctgctattacattcccatctcttggaaggagccagagccagagaaatacagggttcctctgtggccaagggaaaaatgcctgccaagaatgctgaacttctggtgaagaaccagatgatttcttggattggccagattaattccaggcccaaggagcaaaagaatcctaaaacagagacagaggctgtgagaagcgaaaggcgctgtggatgttgctgccctagcgtttggaagcccgaacattcacatgacttgcttcaatctcatagagagccagcagctgagctgtgggtccaagtgtcaggacacctcgcccatatctctgtgtgcgaaaggatgtgcatgatgtggtcccaatcctcaggcccagtgctacttctctattcatgccgagagcagcaggccagggaggccagaaagcaggtgggacagagaaatcttcaggcccatgaaaagatgatgtgtagagattacagccaccaaatggcttcagaattattcactgagtgcaatagacctgtcgaaaagggtgtccacatttgtcaaaaaggaacactttccagttccaaaattagaggtgaaacctgttgtacccagctctgccgaacattccacactcctcagtggaggaaggagttggctccatctaggcgaggtctgaggatctggaaggtgctcagctcccatagctattggcacgtttatttacatgcagatctaacacctacagaggacttaagttcacagaggcatgaggtggagagtaacaaagcatctgctattcaacaagaagagctaactatcctaaatatatatgcacccaatacaggaggacccagattcataaagcaagtcctgagtgacctacaaggagacgtagactcccacacaataataatgggagactttaacaccccactgtcaacattagacagatcaacaagacagaaagttaacaaggatacccaggaattgaactcagctctgcaccaagcagacctaatagacatctacagaactctccaccccaaatcaaaagaatttacatttttttcagcaccacaccacacctattccaaaattgaccacatacttggaagtaaagctctcctcagcaaatgtaaaagaacagaaattataacaaactgtctctcagaccacagtgcaatcaaactagaactcaggattaagaaactcactcaaaactgctcaactacatggaaactgaacaacctgctcctgaatgactactgggtacataacgaaatgaaagcagaaataaagatgttctttgaaaccaacgagaacaaagacacaacataccagaatctctgggacacattcaaagcagtgtgtagagggaaatttatagcactaaatgcccacaagagaaagcaggaaagatccaaaattgacaccctaacatcacaattaaaagaactagaaaagcaagagcaaacacattcaaaagctagcagaaggcaagaaataactaaaatcagagcagaactgaaggaaataaagacaaaaaaaaaaaccctccaaaaaattaatgaatccaggagctggttttttgaaaggatcaacaaaattgatagaccgctagcaagactaataaacaagaaaagagagaagcatcaaatagacgcaataaaaaatgataaaggggatatcaccaccgatcccacagaaatacaaactaccatcagagaatactacaaacacctctacgccaataaactagaaaatctaggagaaatggataaattcctcgacacatacaccctcccaagactaaaccaggaagaagttgaatctctgaatagaccaataacaggctctgaaattgtggcaataatcaatagtttaccaacaaaaaagagtccaggaccagatggattcacagccgaattctaccagaggtacaaggaggaactggtaccattccttctgaaactattccaatcaatagaaaaagagggaatcctccctaactcatttcaggaggccagcatcatcctgataccaaagccaggcagagacacaaccaaaaaagagaattttagaccaatatccttgatgaacattgatgcaaaaatcctcaataaaatactggcaaaccgaatccagcagcacatcaaaaagcttatccaccatgatcaactgggcttcatccctgggatgcaaggctggttcaacatacacaacatacacaaattaataaacgtaatccatcacataaacagaaccaacgacaaaaaccacatgattgtctcaatagatgcagaaaaagcctttgacaaaattcaacaacccttcatgctaaaaactatcaataaaataggtattgatgggatgtatttcaaaataataagagctatctatgacaaaaccacagccaatatcatactgaatgggcaaaaactggaagcattccctttgaaaaccggcacaagacagggatgccctctctcaccgctcctattcaacatagtgttggaatttctggccagggcaatcaggcaggagaaggaaataaagggtattcaattaggaaaagaggaagtcaaattgtccctgtttgcagatgacatgattgttgatctagaaaaccccatcgtctcagcccaaaatctccttaagctgataagcaacttcagcaaagtctcaggatacaaaatcaatgtgcaaaaatcacaagcattcttatacaccaataacacagacaaacaagagagccaaatcatgagtgaactcccattcacaactgcttcaaagagaataaaatacctaggaatccaacttacaagggatgtgaaggacctcttcaaggagaactacaaaccactgctcaatgaaataaaagaggatacaaacaaatggaagaacgttccatgttcatgggtaggaagaatcagtatcgtgaaaatggccatactgcccaaggtaatttatagattcaatgccatccccatcaagctaccaatgactttcttcacagaattggaaaaaactactttaaagttcatatggaaccaaaaaagagcccacatcaccaagtcaatcctaagccaaaagaacaaagctggaggcatcacgctacctgacttcaaactatactacaaggctacagtaaccaaaacagcatggtactggtaccaaaacagatatatagaccaatggaacagaatagagccctcagaaataatgccgcatatctacaactatctgatctttgacaaacctgacaaaaacaagaaatggggaaaggattccctatttaataaatggtgctgggaaaactggctagccatatgtagaaagctgaaactggatcccttccttacaccttatacaaaaattaattcaagatggattaaagacttaaatgttagacctaaaaccataaaaaccctagaagaaaacctaggcaataccattcaggacacaggcatgggcaaggacttcatgtccaaaacaccaaaagcaatggcaacaaaagccaaaattgacaaatgggatctaattaaactaaagagcttctgttctttgctggggtatctgaagactgaaaacacagcaaaagaaactaccatcagactgaacaggcaacctacagaatgggagaaaatttttgcaatctactcatctgacaaagggctaatatccagaatctacaaagaactcaaacaaatttacaagaaaaaaacaaacaaccccatcaaaaagtgggtgaaggatatcaacagacacttctcaaaagaagacatttatgcagccaaaaaacacatgaaaaaatgctcatcatcactggccatcagggaaatacaaatcaaaaccacaatgagataccatctcacaccagttagaatggcgatcattaaaaagtcaggaaacaacaggtgctggagaggatgtggagaaataggaacacttttacactgtttggtgggactgtaaactagttcaaccattgtggaagtcagtgtggcgattcctcagggatctagaactagaaataccatttgacccagccatcccattactgggtatatactgggtgtatacccaaaggattataaatcatgctgctataaagacacatgccacaccgtatgtttattgcagcactattcacacaatagcaaaaacttgggacccaaccccaaatgtcccatccaatggatagactggattaagaaaatgtggcacatacacacccatggaatactatgcagccataaaaaataatcgagttcatgtcctttgtagggacatggatgaagctggaaaccatcattctcagcaaactatcacaaggacaaaaaaaccaaacaccgcatgcttctcactcatagggacacggatgaagctggaaaccatcattctcagcaaactattgcaaggacaaaaaaaccaaacaccgtatattctcactcatagaatcagttttgaggatgtgaggaattacatgccactggcagtaattcactcagatgagagtccaattcttcctctccatgaacagcaagatgccagtgagaatggatggattaaggatacagagagggatgcggatttggagatatatattgtgtctggaattggttcctttcggtgggttcttggtctcgctgacttcaagagtgaagccgcagacccttgcggaatgaagctgcagaccttcgcagtgagtgttacagctcttaaaggtggcgcatccagagttgttcattcctcctggtgggtttgtgttctcactgacttcaggagtgaagctgcatacctgagcgttacagctcttgaaggtggcgcatccagagttgctcattcctcccggttcgtggtctcactgacttcaggagtgaagctgcagaccttcaccgtgaatgctacagctcataaaggtagtgcggacccaaagagtgagcagcatcaagatttattgcaaagagcgaaaaaacacaccttccacagcatgaaaggggaaccaaggcgtgttgttgctgctggctgggggggtgcaatcaaggctgattccaataaccttattctcttatttcagactattgaaaaatattgtccttggttccctgacaaaggttctgtggacctgttagactgggatagagttggcaccactctctgccaactcatgagagatggtgttttacttcctatttctgtttggactgactgggctcttattcgtgttgctttacttccttttcagtctggtgatactcttcaactgccacaagttaacgcggatgttgaaccactccctttacctcggtgcattggcggcatcacgggaccagaaggcggtgacccccctggacccagctttcactatcttgtgggtgtctattatttcttgacctgccgatccacctgggaacaaagaaagagccccgttgcattgcgggctgctggccagatcccgcaataa

SEQ ID NO: 12743 - DNA, 1230 bp, Homo sapiens
  SIMILAR (388)..(681): 671254mologous to Homo sapiens PRO2221,accession number AF116695,Smith-Waterman Score=336.
ggaccaagaggaacaggcccaaaaggaaaagcgagatcagagaaaggctgcagccttagtcatggccctcagacaaacaaacctttggtggttcagaaaggacagaaaatggagcaggccaatcacccggtagggcttgttatcagtgtggtttacaaagacattttaaaaaagattgtccaacgagaaacaagccaccccctcatccatgtccgctatgccgaggcaatcactggaaggcgcactgccccggaggacaaaggttctctggggagggatatgttagccaaagctggagctattatctacatgaatatggggaacaagttacccatttggtgtcacctacttgaggaaggaatctaccttgaagtctgggcattggaaggacaatttggaagggcaaaaaatgcctgcccagtccaaatcaggttaaaagatcccaccacatttccttatcaaaggcaatatcccttaaggcctgaagctcataaaggattacaggatattgttaaacatgtaaaagctcaaggcttagtaaagaaatgcagcagtccctgcaacaccccaattctaggagtacaaaaaccgaacggtcagtggagtctagtgcaagatcttagactcatcagtgaggcagtaattcctctatatccagttgtacccaacccctataccctgctctctcaaataccagaggaagcagaatggttccctgttctggacctcaaggatgccttcttctgtattcccctgcactatgactcccatgactcccagtttctctttgcctttgaggatcccacagaccacacatcccaacttatatggaccgtcttgccccaagggtttagggatagccctcatctgtttggtcaggcactggcccaagatctaggccacttctcaagtccaggcactctggtccttcagtatgtggatgatttacttttggctaccagttcggaagcctcatgccagcaggctactctagatctcttgaattttctagctaatcaagggtacaaggcatctaggtcaaaggcccagctttgcctacagcaggtcaaatatctaggcctaatcttagccagagggaccaggacccttggcaaggaacgaatacagcctatactggcttatcctcaccctaagactttaaaacagttgtgggggttccttcaaatcaccgcttttgccaactatggatccccagatagagcaagatag

SEQ ID NO: 12744 - DNA, 411 bp, Homo sapiens; identical to SEQ ID NO: 10564
  SIMILAR (601)..(711): 911254mologous to Homo sapiens Human secreted protein, SEQ ID NO: 7003,accession number G02922,Smith-Waterman Score=178.

SEQ ID NO: 12745 - DNA, 307 bp, Homo sapiens
  SIMILAR (183)..(7): 741254mologous to multiple sclerosis associated retrovirus protease,accession number AF009666,Smith-Waterman Score=230.
tatctgtagaaaagtctcccaattacaactgaggaggtgggagaaatacctggttacaggctgtcccaggattccccggatggtaacggaccttgaggacagctgtctgggacaggagattaacactgagaaagccgcaccattgtccaggaggaagtcaatttcctggccctcaacggcaagtgattggcctgctccattttctgtcctctctgaatcaccaaggttggtttgtctgagggccatgactaatgctgcagcctttctctgatcttgcttttccttttgggcctcttcctcttgatcc

SEQ ID NO: 12746 - DNA, 691 bp, Homo sapiens
  SIMILAR (10)..(519): 321254mologous to porcine endogenous retrovirus viral polyprotein,accession number AJ133818,Smith-Waterman Score=159.
atgtccaccataactcagcgaaaggaagaaaatccttctgtcttccttgagtggctatgggaggccttaagaaaatatactcccctgtcacccgactcactcgagggtcaattgatcctaaaagataagtttattacgcaatcagccacagatatcagcagaaagctccaaaaccgagccctggtccctgaacaaaatctggaggtattattaaacctggcaaccttggtgttctatactagggaccaagaggaacaggccaaaaaggaaaagcgagatcagagaaaggctgcagccttagtcatggccctcaaacaaacaaaccttggtggttcagagaggacagaaaatggagcaggccaatcacctggtatggctttttatcagtgtggtttgcaaggacaccttagaaaagactgtccaacaagaaacaagctgccccctcgcccatgtccactatgccgaggcaatcactggaaggcgactgcaccagaggacaaagaggatggagaaccaatcaagcatgactgccaacaaattatagtccagagttatgctccccaagaggatcgcttagaagtccccttagctaatcctgaccttaacctatatactgatggaagttcatttgtggagaatgggatacgaagagcaggttatgccatagttagtgatgtaacaatacttgaaa

SEQ ID NO: 12747 - DNA, 626 bp, Homo sapiens
  SIMILAR (205)..(555): 1001254mologous to Homo sapiens KAL,accession number M97252,Smith-Waterman Score=624.
atggaatactatgcagccatgaaaaggaacaagatcatgtcctttgcagggacatggatggagctggaagccattatcctcagcaaactaatgcaggaacagaaaacgaaagactgcatgctctcagttctaagtgggagccgaaggatgagaacacatggacacatggaggggagcaacacacaccagggcctgcttgggggagatccatctgccccaccagcaccggctaacctccggctggccaactccaccgtcaacagtgatgggagtgtgaccgtcactatagtttgggatctccccgaggagccggacatccctgtgcatcattacaaggtcttttggagctggatggtcagcagtaagtctcttgtcccaacaaagaagaagcggagaaagactacggatgggtttcaaaattctgtgatcctggagaaactccagccagactgtgactatgttgtggaattgcaagccataacgtactggggacagacacggctgaagagtgcaaaggtgtcccttcacttcacatcgacacatgcaaccaacaacaacagaactacaggaaacagtggaagcagaaatgaccaacatggagttggggaatgagagtcacatcatcc

SEQ ID NO: 12748 - DNA, 2997 bp, Homo sapiens
  SIMILAR (1938)..(1042): 751254mologous to multiple sclerosis associated retrovirus polyprotein,accession number AF009668,Smith-Waterman Score=1186.
tcactccaggggtcctcggtagaagttgttagctgagcttatttggggttccatttgtaagatcatctgtagcttgatggccttgatcctagaggaaacaaatttgacaagagggttaaaaatacagggcccaaaggcgaatgatagcaagatggctgccacaggacctagaaaggggagaagccatgttgcccaactccagtggttggtataagagtttgaaaggcattgtctgatttcagaagccttttcctgtaaatgccgggcagcatctcttactatcgctgactggttagtataaaaacaacactcttcgcctaagaaggtgcagagtcctcctttctcagcagtgaggaggtctaagccttggcagttttggagagtcactgctgccaaacagtctatttgggattgtagagtaaggatagattttgttatttcttgcaaactgagaaatcctttgagagtgtgtggtagtaggatactgaagtagataaactggctattccagttcctgtagcagtagccattcctagcccttctgatggctttggcagtgtaagactgccacctctttgggtttttgcactgtgtgcaataactccataatttccttgtggtatttaatggggtgcccccagaggttaggaactccctttctttccatattgcagcatgggcatgtaggattagataagcatacttgctatctgtatacacatttattctttttccttttcccagttctaaggctcgggtaagtgccactagttctgctaactgggtgctagtccttaggtatgccactggttgtggggttgtcctgtgagtctgagtaaggactccaagagctatccctgctctctctatgacatataaagcgaagttttgtcctgtgggaaggcttaaagctggagcttgtactagggcctgctttaaggtttcgaaggctgtttctgcctctggttcccattctactaggtgagtatttgccctctccatctccttgattagagtatagagggtcttggctatctcgctgtattgaaggaccagagtgcctggacttgagaagtggcctagatcttgggcctgtgcctgaccaaacagatgagggctatctctaaacctttggggcaagaccatccacataagttgggatgtgtggtctgtgggatcctcaaaggcaaaaagaaactgggagtcagagtgcaggggaatacagaagaaggcatccttgaggtccagaacagtgaaccattctgcttcctctggtacttgagagagaagggtataggggttgcgtacaactggatatagaggaattactgcctcattgatgagtctaagatcttgcactagtctccactgactgttcagtttttgtactcctagaattggggtgttgcagggactgctgcattttcttactgagtcttgagcttttaaatgtttaacaatatcctgtaatcctttatgagcttcaggccttaagggatattgcctttgataaggaaaactgatggggtcttttagcctgatttggagtggatgggcattttttgcccttccaaattgtccttccaatgcccagacttcagggttgattccctcaagtaggggacaacaaatgggtaacttgttccctgtcttcatggagataatagctccagctttggctaatatatccctccctaataagggtgtgggactttcaggcataacaagaaaggcatgtgaaaagagcaaagtctcccaattacaactgaggaggtgggagaaatacctggttacaggctgtcccaggattccttggatggtaacggaccttgaggacagtcgtccaagacaggggattaacactgagaaggtcgtgccagtgtccaggaggaagtcaatttcctggccctcaatgattaaacatacccagggctcagtgagggggtgatgacatgaacgggtgcttgccgcagtcatcctcagtcctgtcattggatcatctggttgggggcttctggcccagagaagctttgccctctgggtagtgtgacttccagtgattgcctccgtatagtggacatggacgatggggcggcttgtttctcgttggacaatcttttttaaggtgtccttgcaaaccacactggtaacaagccccaccaggtgattggcctgctccattttctgtcctctttgaaccaccaaggtttgtctgagggccatgactaaggctatggcctttctctgatctcgcttttccttttgggcctgttcctcttggtccctattttggagctgtctcctgatatctgcagctgactgggtaataaacttatcttttagaatcaattgaccctcgagtgattcgggtgacaggggagtatattttcttaaggcctctcttagccgctcgaggaaggcagaaggcttttcttcttgtccctgagttatagtggacatcattgaataattcatgggctttttcctaattccctttagtccttcaagaacacaggtcaacagatgtttatgactccagtccccatgatctgagtcaaagtcccagtggggatccatagtggggatggcttgctgaccagtaaggaatttgtccctttctttggctgtcattctatcatttacttgactaagataccaggtatctccaaactctcgggctgcagctaaagctgcattcttttcaataaaggctaggatttgatctaacaatagcatgacatctctccaagcgagatcgaatgtttgccctagaccctgtaggacatctttgtacctatcaggatcatctgaaaacttccccaggtctgccttgatctgctttaaatcagagagggagaaggggacatggagaacttttgtgtctagcgtgaaggtctgcagcttcactcctgaagtcagcgagaccacgaacccaacagaaggaagaaactctggacacatccgtacatcagaaggaacaaactctggacacaccat

SEQ ID NO: 12749 - DNA, 4195 bp, Homo sapiens
  SIMILAR (151)..(1437): 941254mologous to Homo sapiens KAL,accession number M97252,Smith-Waterman Score=2160.
gtcggcgaggagggtccggccggagttgaaggattgaactttccggctcagtcgcggcggctgcctggtcctcagcagtgcagccccggcgcggagcagggagcctcggcccgcgcccggcgccctcgccctcgccctcgacccgcagccatggtgcccggggtgcccggcgcggtcctgaccctctgcctctggctggcggcctccagcggctgcctggcggccggccccggcgcggctgctgcgcggcggctggacgagtcgctgtctgccgggagcgtccagcgcgctccgtgcgcctccaggtgcctgagcctgcagatcactcgcatctccgccttcttccagcacttccagaacaatggttccctggtttggtgccagaatcacaagcaatgttctaagtgcctggagccctgcaaggaatcaggggacctgaggaaacaccagtgccaaagcttttgtgagcctctcttccccaagaagagctacgaatgcttgaccagctgtgagttcctcaaatacatcctgttggtgaagcagggggactgtccggctcctgagaaagccagtggatttgcggccgcctgtgttgaaagctgcgaagttgacaatgagtgctctggggtgaagaaatgttgttcgaatgggtgtggacacacctgtcaagtacccaagactctgtacaaaggtgtccccctgaagcccagaaaagagttacgatttacagaactgcagtctggacagctggaggttaagtggtcctcgaaattcaatatttctattgagcctgtgatctatgtggtacaaagaagatggaattatggaatccatcctagcgaagatgacgccactcactggcagacagtggcccagaccacagacgagcgagttcaactgactgacataagacccagccgatggtaccagtttcgagtggctgctgtgaatgtgcatggaactcgaggcttcactgcccccagcaaacacttccgttcttccaaagatccatctgccccaccagcaccggctaacctccggctggccaactccaccgtcaacagtgatggggagtgtgaaccgtcactatagtttggggatctccccgaggagccggacatccctgtgcatcattacaaggtcttttggagctggatggtcagcagtaagtctcttgtcccaacaaagaagaagcggagaaagactacggatgggtttcaaaattctgtgatcctggagaaactccagccagactgtgactatgttgtggaattgcaagccataacgtactggggacagacacggctgaagagtgcaaaggtgtcccttcacttcacatcgacacatgcaaccaacaacaaagaacagctggtgaaaaactagaaaaggtggaattcaaacacaactcccttttcaaagacgacgacccactcgcccgctggaagtcggagctcccttctatcaggatggccaactgcaagttaaagtctactggaagaagacagaagatcccactgtcaaccgatatcatgtgcggtggtttcctgaagcgtgtgcccacaacagaacaaccggatcagaggcatcatctggcatgacccacgaaaattacataattcttcaagatctgtcattttcctgcaagtataaggtgactgtccaaccaatacggccaaaaagtcactccaaggcagaagctgttttcttcactactccaccatgctctgctcttaaggggaagagccacaagcctattggctgcctgggcgaagcaggtcatgttctttctaaggtgctagctaagcctgagaacctttctgcttcattcatcgtccaggatgtgaacatcaccggtcacttttcttggaagatggccaaggccaatctctatcagcccatgactgggtttcaagtgacttgggctgaggtcactacggaaagcagacagaacagcctacccaacagcattatttcacagtcccagattctgccttccgatcattatgtcctaacagtgcccaatctgagaccatctactctttaccgactggaagtgcaagtgctgaccccaggaggggaggggccggccaccatcaagacgttccggacgccggagctcccaccctcttcagcacacagatctcatcttaagcatcgtcatccacatcattacaagccttctccagaaagatactaaactgttcaaaaagattttgtgaaattgcacagatgtgtaagcttgttgaacttcggccacgagacatgcacacttccagaggcagtgggaactgctcagaggcccggactctcctatgtgactttagtgcaggaagaacttctgtcaatcatggacgcatctggagacaagtgagaaacagtagattggtgaagacagacaccagttccctacaagcatggagaaaatgaagaataggcctgtttaatgctaaattttgttttcatgtatggtgtcgctcatttctattgaattacaacagaactcagttttccctgaatttggagcaccaaactccgccccaaaaaggagagtaacaaatacacaattcacacataacactaagcgtaaatctaatcaataaaatatatttttgactaaattattgattcgatatgaaaaatcaactaagattacacagctttgtttttttgaatctttcctaagatcatttttatcctaggtgatttttaaatgaaaatgtgtaatctaaaatataccagcgaatttaaatctaaaaatgctcctactttaagtaccttgtgctgctctttatgcaaaggtaaatcaaagttccctctataaattatgatttacaaaagacacccaagccagaggaactcaatgaaataagctgctaatcagattttaccttggagaaatgaaaattatttcttggggatgccttttaatatttgatcctattatgtgagagattttcctgatatgttatcttatttatattttcccttattttcctcaatgcagataatagcttttggtgcacttttgtttcaccatctgaaaattcacaaaacttcttgcttcaaatgaaaaaatcccaactattgagcatgtttaaatctttgcagagatttgccttttcttaatcaaagaaaggtctttgtgtgctagaatattattggtaatgttttaaaaattcctttgattgatagagaaggacagttatttgcatttaattcacccatatgctttcaaatctagtatatcttactttttggaaatgttttatgctacaaattagtgccttgtagcatgaacttaagtcaaaacgtgttatcaatatagagtgttgcagtgtatattgtaacaacctaaaacgcagagaagtttaatttaatactgttttttttcttgaaggaatactcacatacatggtttgaaatgtgcatagatatgcatgtctatataattataaatgcatgtgtatatatatgcaaatatatgtacatatacatgtatatacacacagacacatgcatatacatgaatataccttgagcatgaatccctggagaaatcgttttcgtaggctcaccaatggtgagtaaagatacagctcttttaaaggtcataaggataatatattttccccatcaatgctgattctgagaaaagagcaatttatcaaaattaaacactgtaaaagaaaggtgtccatatgtctttacctacctaagtaaaacaggaagaaaatcagtaacattatccttaggttttgacaatggtacttgcttcttgttgttttattgtttcctgaattcatgcagatgcctggccattcctgggaagagtggataactcagaagtcactgtactccacagagcctcactgcagtgtcttaaaggtagatgcaaattaaaatgcaggaaaaaaaaacttttctgatgttgatgcatgtctttgggaaacacatttataaacatggatacctgataatagatattgaaacccatttcctgtgtgttaaaatatttaaaaagtggatattccaggaatgttttgcagctttgtacaagtaacataaattggagacctcagaatgaaagttcatgttggttctgaatggttcactgcagctcctgtcacaagctgggatggatttatcacattgagttatgaaattacctggttctaagaatttttgagggaattcc

SEQ ID NO: 12750 - DNA, 1413 bp, Homo sapiens
  SIMILAR (58)..(336): 711254mologous to Homo sapiens putative adhesion molecule= ADMLX,accession number S60088,Smith-Waterman Score=343.
atggagacaccagggaaagcatttaggcaaatagacaggaaaacgtcagcagcatcatggttttcctttccaagaaccagtgtgactgggctgaggggtggaggtgataaaatgaaaggtgctctgggagatccatctgccccaccagtgccagctaacctccggctggccaactccaccgtcaacagtgatgggagtgtgaccgtcactatagtttggggtctccccgaggagccggacatccttgtgcatcactacaatgtcttttggagctggacaatcagcagtaagtctcttgtaccaacaaagaagaagcagagaaagactacggatggggactggcaggcagcaccacctgcgactgggtgcaggatccactgggtgaagccagctgtgctcctgagtctggtgggaacttggagaacctttatgtctagccaagggattgtaaatacaccagtcagcactctgcatctagctcaagtgagaccaagaacccaccaattctggacagattttggtgaccacgaagggaccatcaccaatcgccaagcgagttcagggactaaataccaggcacctgtcggccagttaaaagcgactagcatggccgctggactaaagacacaggtgtcatgctttctgggaaagggctctctaatgacccccggactgttcggcgttgggaccgttggaggacaggcaagggtgcaggttttcaagaatgtgtcagtaagtgctgctaaatccgaccttccctggtcctccatctggtctgggaggaaaactagtgtttctgctgctgcgtcgctgttaggaggaggagaatttggcccaacccggatacatatccccttctccctctctgatttaaagcagatcaaggcaggcctggggagattttcagatgatcctgatagggaccaagaggaacaggcccaaaaggaaaagcgagatcagagaaaggctgcagccttagtcatggccctcagacaaacaaaccttggtggttcagagaggacagaaaatggagcaggccagtcacctgagagagcagggatagctcttggagaccttattcagactcgtgggaaaaccccacaaccagtggcatacctaagtaaggaaatagatgcagtagcaaaagtctggcctcactgtttaaagttagttgctgcagtggccgtctttgtgtcagaggctatcaaaataatacaaggaaaggatctcactgtctggactactcatgaggaacctgtgggatcatcagctcagcagtcccaacatcagccagaccagcctcgatacacctgtaaactgttggaggacttgcacctcctatttcggaaagaaatatcccagacgaaaaaggctcctatcctttttgatcctgtgatcaaaagagaaaagtag

SEQ ID NO: 12751 - DNA, 460 bp, Homo sapiens
  SIMILAR (8)..(136): 951254mologous to Mus musculus F-box protein FBL12,accession number AF176525,Smith-Waterman Score=232.
  misc_feature (1)...(460): n = a,t,c or g
ttcccgggtcgagatcttctcttacctcccggtacgggaccggatccgcatctccagggtctgtcaccgctggaagaggctggtggacgaccggtggctgtggcgacatgtcgacctgacgctctacacggtacgcgcagctggccgggcgggcctgggccgcggtcgcggtgcccggaccccgaagaccacctctcccaccctgggactgtgtgtcggggcccgggctggggatttagagccaggcgatccggggcctatctcggcatcatcgcttaccagctcctcttcgacctcaggnnnnnnnnnnnnnnnnnnnnnnnnnnnnnnnnnnnnnnnnnnnnnnnnnnnnnnnnnnnnnnnnnnnnnnnnnnnnnnnnnnnnnnnnnnnnnnnnnnnnnnnnnnnnnnnnnnntttatcattcgataaatgctaatttatgactatgttatcaagttt

SEQ ID NO: 12752 - DNA, 571 bp, Homo sapiens
  SIMILAR (61)..(480): 951254mologous to Mus musculus F-box protein FBL12,accession number AF176525,Smith-Waterman Score=721.
gcgactttggcgaactgccggactcggtcctgctcgagagtttctcttacctcccggtacgaccggatccgcatctccagggtctgtcaccgctggaagaggctggtggacgaccggtggctgtggcgacatgtcgacctgacgctctacacgatgcgacctacagtcatgtggcacctccttcgaaggtacatggcatcccggctccattccctgcggatgggtggctacctgttctctggctcccaggccccccagttgtcccctgctctgttgagagccctgggccagaagtgccccaacctgaagcgcctctgcctgcacgtggccgacctgagcatggtgcccatcaccagcctgcccagcaccttgaggaccctggagctgcacagctgcgagatctccatggcctggctccacaagcagcaggaccccaccgtgctgcccctgcttgaatgcatcgtgctggaccgcgtcccgccttccgtgacgagcacctgcagggcctgacgcgcttccgggccttgcgctcgctggtgctgggtggtacctacgtgtgacgagacagggt

SEQ ID NO: 12753 - DNA, 515 bp, Homo sapiens
  SIMILAR (33)..(197): 921254mologous to Mus musculus F-box protein FBL12,accession number AF176525,Smith-Waterman Score=277.
aaccggaagcggaagtgcgtgtcggcgggatcatggcgactttggtcgaactgccggactcggtcctgctcgagatcttctcttacctcccggtacgggaccggatccgcatctccagggtctgtcaccgctggaagaggctggtggacgaccggtggctgtggcgacatgtcgacctgacgctctacacggtacgcgcagctggccgggcgggcctgggccgcggtcgcggtgcccggaccccgaagaccacctctcccaccctgggactgtgtgtcggggcccgggctggggatttagagccaggcgatccggggcctatctcggcatcatcgcttaccagctcctcttcgacctcagggcctcaatttcctcatccctgcaatggggataaaggacagtacctgcctcacggggctattatgggacttcactgagatcacgcagggaaagggcttagaacagtctggcacatatttatcattcgataaatgctaatttatgactatgttatc

SEQ ID NO: 12754 - DNA, 1111 bp, Homo sapiens
  SIMILAR (1)..(159): 941254mologous to Mus musculus F-box protein FBL12,accession number AF176525,Smith-Waterman Score=271.
atggcgactttggtcgaactgccggactcggtcctgctcgagatcttctcttacctcccggtacgggaccggatccgcatctccagggtctgtcaccgctggaagaggctggtggacgaccggtggctgtggcgacatgtcgacctgacgctctacacgactctagagtttaacgtcttcagtgggaatcagcatggacgttcagaacagtccctccttaaacacaaagacatttcctacctcatacctcataatcacatgatagaagggcctgtgcgacagaggaagaccctgacctataaaaacgcaaacaaagtagtgaagagagatgtatcagttatctactgccgtataacaaaccaccaggaaacagcgcatcctcgtacaagccgcatgaatgcagaggaaagcgagcagaggcatttcgaggtcccgcccaacagactccctccatcgtggtcccgcccccaccccaagccgccgccgggttctgcccccacggtgcccagtgaagccggagggacggggtccaaccgttgtcggctgcgcggaaactgggacttctccccagggtcgtggaggacgcggccgccgaccctcccaccgcctcacgcctcggagaccgggtccagagccctcagccgcttccgagccccgagaggggaatcagaagtgcgcgtgatcagagcggcacccccttcccaggaaccgcagctgaaccaacggtttcccctgcaccagcctttgcgaccagaccagaagaccatgtagcaccaaaaagatagctgcaaagcggaataaagttggggaaaacaatctgctggccggaagagagtaagatgcaggaggatgattgccggttctccgcagcacgagtcagggaggccatgagatggaagagccaccccacaatgggaagaacctggagacaaggttctcccttgtctatgcccaagagaagccacccttcaggagagagtttctgagtttcatgaacttggggaacattctaaacctattcaaaatatgcttactcacagagaggtctcacaagtaggcacgtcgtccataaatgagactcgcatgttgaatatttacacagaattcagtt

SEQ ID NO: 12755 - DNA, 413 bp, Homo sapiens
  SIMILAR (105)..(413): 971254mologous to Homo sapiens The sequence from bp313 to bp1374 is almost identical to human farnesyl pyrophosphate synthetase mRNA,accession number D14697,Smith-Waterman Score=515.
gggggaacaggtgagagaggatgtgtgctgggccttggaggaagggggccgagaccgggccttacttctgtaacgatactgtgaggcatcggaaggccagcctgttgtgtccgttttgaagaatgaacggagaccagaattcagatgtttatgcccaagaaaagcaggatttcgttcagcacttctcccagatcgttagggtgctgactgaggatgagatggggcacccagagataggagatgctattgcccggctcaaggaggtcctggagtacaatgccattggaggcaagtataaccggggtttgacggtggtagtagcattccgggagctggtggagccaaggaaacaggatgctgatagtctccagcgggcctggactgtgggctggtgtgtggaactgctgcaagcg

SEQ ID NO: 12756 - DNA, 798 bp, Homo sapiens
  SIMILAR (445)..(795): 831254mologous to Homo sapiens farnesyl pyrophosphate synthetase (EC 2.5.1.1),accession number J05262,Smith-Waterman Score=517.
atgaatggggaccagaaatcagatgtttatgcccaagaaaagcaggatttctttcagcacttctcccagatcgttggggtgctgactgaggatgagatggggcactcagagataggagatgctattgcccggctcaaggacgtcctggagtacaatgccattggaggcaagtatcaccggggtttgacggtgctagtagcgttccaggagctggatgccatcaattatgctatccttctggaagcatgtatctactacctgctgaagctctattgccaagcacagccctattacctgaacctgatcgagctcttcctgcagatttcctgtcagcctgagattgggcagaccctggacctcatcacagcccctaggacaatgtggattttggcagattcactgaaaacagcacgccaatgcttagaagatcctactggagatcgagagttttttcaaattcaggatggttaccttgacctctttggggaccccactgtgacccgcaaagttggcactgacatccaggacaacaaatgcagctggctggtggttcagtgtctgcaacgatccactctggaacagtaccagatcctgaaggaaaattacggacagaagaaggccaagaaggtagtccaggtgaaggcactgtatgaggagctggatctgccggccgtgttcttgcagtatgaggaagacggttacagccacattatgggtctcactgaacagtacgcagcgcccctgctcccagccatgtttctggggcttgtgtacaaaatctacaagcagaaaaagtga

SEQ ID NO: 12757 - DNA, 409 bp, Homo sapiens
  SIMILAR (1)..(213): 881254mologous to Homo sapiens farnesyl pyrophosphate synthetase (EC 2.5.1.1),accession number J05262,Smith-Waterman Score=322.
atgaatggggaccagaaatcagatgtttatgcccaagaaaagcaggatttctttcagcacttctcccagatcgttggggtgctgactgaggatgagatggggcactcagagataggagatgctattgcccggctcaaggacgtcctggagtacaatgccattggaggcaagtatcaccggggtttgacggtgctagtagcgttccaggagctggatgccatcaattatgctatccttctggaagcatgtatctactacctgctgaagctctattgccaagcacagccctattacctgaacctgatcgagctcttcctgcagatttcctgtcagcctgagattgggcagaccctggacctcatcacagcccctaggacaatgtggattttggcagattcactgaaaacag

SEQ ID NO: 12758 - DNA, 876 bp, Homo sapiens
  SIMILAR (2)..(409): 831254mologous to Homo sapiens The sequence from bp313 to bp1374 is almost identical to human farnesyl pyrophosphate synthetase mRNA,accession number D14697,Smith-Waterman Score=591.
agaccagaaatcagatgtttatgcccaagaaaagcaggatttcgttcagcacttcccccagatcattagggtgctgagtgaggatgagatggggcactcagagacaggagatgctgttgaccggctcaaggaggtcctggagtacaatgccattggaggcaagtatcaccaggatttgatggtgctagtagcattctgggagctggtggagccgaggaaacaggatgctgatagtctccagcaggccctgaccgtgggctggtgtgtggaactgctgcaagctttcttcctggtggcagatgacatcatggattcatccgtctcccgccggggacagatctggtggtatcagaagccgggcatgggtttggatgccatcaatgatgctatgcttctggaagtatgtatatgtacagcaggaattgatggcgacaaggagcatgctaatggcaagaagatcctgctggagatgggagagttctttcagattcaggatgattaccttgacctctttggggaccccagtgtgaccagcaaagttggcactgacatccaggacaacaaatgcggttggctggtggttcacctgaaggagaactaccggcagaagaaggccaagaaggtggcccaggttaaggcactatctgaggagctgaatctgctggccgtgttcttgcaatatgaggaagacagttacagccacattatgggtctcattgaacagtacgcagcacccctgaccccagccatctttctggggctggtgcgcaacagaggctcctcttggcttctagaggctatccacattcccttccatgtggcctccgccatcttcaaagccagcaatgaagaacctgccttgtgttgaatccctct

SEQ ID NO: 12759 - DNA, 1190 bp, Homo sapiens
  SIMILAR (118)..(717): 841254mologous to Homo sapiens The sequence from bp313 to bp1374 is almost identical to human farnesyl pyrophosphate synthetase mRNA,accession number D14697,Smith-Waterman Score=869.
  misc_feature (1)...(1190): n = a,t,c or g
aacaggtgagagaggatgtgtgctgggccttggaggaagggggccgagaccgggccttacttctgtaacgatactgtgaggcatcggaaggccagcctgttgtgtccgttttgaaggatgcccctgtcccgctggttgagatctgtgggggtcttcctgctgccagccccctactgggcaccccgggagaggtggctgggttccctacggcggccctccctggtgcacgggtacccagtcctggcctggtacagtgcccgctgctggtgccaagcgtggacagaggaacctcgagccctttgctcctccctcagaatgaacggagaccagaattcagatgtttatgcccaagaaaagcaggatttcgttcagcacttctcccagatcgttagggtgctggacttgaggatgagatggggcacccagagataggagatgctattgcccggctcaaggaggtcctgggagtacaatgccattggaggcaagtataaccggggtttgacggtggtagtagcattccgggagctggtggagccaaggaaacaggatgctgatagtcttccagcggggccctggactgtgggctggtgtgtggaactgctgcaagctttcttcctggtggcagatgacatcatggattcatcccttaccccgccggggaacagatcttgctggtatcagaagccgggcgtgggtttggatgccatcaatgatggtnaacctcctggaagcatgtatctaccgcctgctgaagctctattgccgggagcagccctattacctgaacctgatcgagctcttcctgcagagttcctatcagactgagattgggcagaccctggacctcctcacagccccccagggcaatgtggatctttgtcagattcactgaaaagaggtacaaatctattgtcaagtacaagacagctttctactccttctaccttcctatagctgcagccatgtacatggcaggaattgatggcgagaaggagcacgccaatgcccaagaagatcctgctggagatgggggagttctttcagattcaggatgattaccttgacctctttggggaccccagtgtgaccggcaaaattggcactgacatccaggacaacaaatgcagctggcttggtgggttcagtgtctgcaacgggccactccagaacagtccagatcctgaggg

SEQ ID NO: 12760 - DNA, 464 bp, Homo sapiens
  SIMILAR (233)..(358): 921254mologous to Homo sapiens ribosomal protein L21,accession number X89401,Smith-Waterman Score=209.
  misc_feature (1)...(464): n = a,t,c or g
atttgaaatcgattatcactctgaatacgccaagcttggcacgaggggcactcgagcttaatgatgactgttttttttgattgcttgaagctttgttaaaaacacatttcaccggctctgaaagctcttgagttgccatttgaaagaaatcttataatactttacagttacttaaagtcagaattttaaaggaaggggaaatgctggtatataacattggtttctttaatagggaatgggtactgttcaaaaaggaatgccccacaagtgttaccatggcaaaactggaagagtctacaatgttacccagcatgctgttggcattgttgtaaacaaacaagttaagtaagtagtgttgtagttctttgtggctaaccagtattccctcatatacccccttttcactttgccagttggacttatgtctttattggtcattcaagnggggcaaaggaaatatcctt

SEQ ID NO: 12761 - DNA, 1038 bp, Homo sapiens; identical to SEQ ID NO: 6439
  SIMILAR (1)..(465): 921254mologous to Homo sapiens ribosomal protein L21,accession number X89401,Smith-Waterman Score=752.

SEQ ID NO: 12762 - DNA, 665 bp, Homo sapiens
  SIMILAR (73)..(561): 431254mologous to Mus musculus ribosomal protein L21,accession number U93863,Smith-Waterman Score=228.
atccttaattaaattaatcccccccccccgccctttcggccggaactgccatcttccagtaattcgccaaaaatgacggaccacaaaggggaaagaggagaggcaacccgatatatgttctctaggccttttaagaaaacaatgggagttgttcctttgggccacaataattagcgattctaataagaagggtgatattgtagacactcaagggaatggggtactgtgtccaaaacggaatgcccccacaagtgttacccatggccaaaactggaaggagtcttacaattgttaccccagcatgcttgttgccattgttgtaaaccaaccagttttagggcaaagttttttcccaagagaataaattgtgcgtattgagcacattaagcacttctaagagcccgagataagcttcctgaaaccgttttgaaggaaaatgattcagaaaaagaaagaagcccaaatgagaaaggtacctggggttccaacttaaagcgccaccttgctccaccccagaagaagcacactttgtgaagaaccaatgggaaggagcctgagcttgctggaacctattccctatgaatttcatgggcataattaggtgttaaagaaataaaataaaagacctctggactatttaaaaaaaaaaaaaaaaaaaggccagg

SEQ ID NO: 12763 - DNA, 457 bp, Homo sapiens
  SIMILAR (10)..(162): 941254mologous to Homo sapiens Human secreted protein, SEQ ID NO: 4814,accession number G00733,Smith-Waterman Score=238.
cagaggccatctgaagccaaagagataaaactttatgcccagattccccctatagagaagatggatgcatccttgtccatgcttgctaattgcgagaagctttcactgtctacaaactgcattgaaaaaattgccaacctgaatggcttaagaggcagtaggggacacattagaagaactgtggatctcctacaattttattgagaagttgaaagggatccacataatgaagaaattgaagattctctacatgtctaataacctggtaaaagactggggtactccagtaattaaaggggatgaggaagaagacaactaatgccacgctttccactgtgtgttaacttatttaaatgtcataagaacaatagataaattttatataattgtctattttaaagattctgtatgggccaaaagtttcttaagataaaacagatcactcattctcaaaaaa

SEQ ID NO: 12764 - DNA, 719 bp, Homo sapiens
  SIMILAR (12)..(254): 801254mologous to Homo sapiens crystallin beta-B2,accession number L10035,Smith-Waterman Score=345.
gcggccgccacgcagtcccacaatgccccgctcgcaccaccctgagggcggagagaaaggaccgctgccggggatagggcttccgccgagagcgccgagaagtgcgcacgcgcactgaccccgcgggccctagcaaccagagcagtgacagtagcaaccgccggaatggaagctttcactgtctacaaactgcattgaaaaaattgccaacctgaatggcttaaaaaacttgaggatattatctttaggaagaaacaacataaagaacttaaatggactggaggcagtaggggacacattagaagaactgtggatctcctacaattttattgagaagttgaaagggatccacataatgaagaaattgaagattctctacatgtctaataacctggtaaaagactgggctgagtttgtgaagctggcagaactgccatgcctcgaagacctggtgtttgtaggcaatcccttggaagagaaacattctgctgagaataactggattgaagaagcaaccaagagagtgcccaaactgaaaaagctggatggtactccagtaattaaaggggatgaggaagaagacaactaatgccacgctttccactgtgtgttaacttatttaaatgtcataagaacaatagataagttttagagggttgtccgttttacagattaatgtatgcaacaacagtttcttaagataaaacagatcactcatt

SEQ ID NO: 12765 - DNA, 957 bp, Homo sapiens
  SIMILAR (316)..(170): 571254mologous to Homo sapiens PRO1546,accession number AF116638,Smith-Waterman Score=134.
atggccaatgagcctttcctgaggaagaatgggaagcgggcccggggcatgcggcacgccactccccgcagagtgctccacacgacccagattgcaggcctgctggggaggaagaagctccaggcaccatcccctgagccccagcagtcctgtgacatggtgccgttcccccccaccattggacaggagagccaactgaggaaccgggaggggggcctggccctggtgattgcccccagcttggcgggcgtggtcagatggggagagggctgtgcccagcccaaccggcctggcatctacacccgtgtcacgtactacttggactggatccaccagtatgtccccaaaaagccgtgtgcggctgccgtgagggaggagggtgcccggccgtgggtgcactgctggccccgcatgctggtgttgtccttattggtcaccaggaaaaacactgaacctccagttctgagccttggctaccccacgtgctggcgtgcaggcggccacgtctgtgcctgggaggccacatcctggctgggcagacactacccccaactcggctccgtctccgagcgccagctgggtctgaggcgtctgttctggctcttctcgcccacagacgagagggtcagggcagagcaaggccagggagcagtgtccacgggtgggggcatgttcacagcaggcggcgcaggacgacctggggtcaagtgcggatggggttccgtgggcccccgccagtgctgtggagtccgagtgggtcggctcaaggtcctgggtccccagcagccttcactgaactctgaagccagcctgcaggtgtcagacgtcaccgggatgatgctggggtggacggggccccgggcgcagggcgtgggccgcacacggtgggtgtcaggggcgagagtggctgcgtgctcgatccggctggcccagggcgagtctgcctttcctgcctga

SEQ ID NO: 12766 - DNA, 489 bp, Homo sapiens
  SIMILAR (475)..(570): 811254mologous to Homo sapiens PRO1546,accession number AF116638,Smith-Waterman Score=150.
atggaagaccaagtgaaaaagacaaggaaagagcaaccagtaagagacctagatatccaaatacaacaagctcaaagaacatctgggaaattcatcacaaaaagatcattgccgaggcacattatcatcaggttatctgaagtcaacacaaaggaaagaatcttaagagctgtgagacaaaagcaccaggtaacctataaaagaaaacctatcaaattaacagcaaatttctcatcagaaacccttcaagctagaagggattggggctttaccttcagctcccttaaacaaaacaattatcagccaagaattttgtatccagtgaaacaaagcttcataaatgaaggaaagatacaatcttttacagaccaacaaatgctgagagaatatgccattaccaagccagcgctacaagaactgctgaaaggagctctgagccttgaaacaaaacctggaaacacatcaaaacagaacctctttaaagcataa

SEQ ID NO: 12767 - DNA, 367 bp, Homo sapiens
  SIMILAR (1)..(219): 601254mologous to Murine leukemia virus gag-pol polyprotein,accession number U13766,Smith-Waterman Score=224.
ccacggaccaaggactaccggccggtacaggatttgcgcttgctccatcaagctacactgactttacatccaacagtacctaacccgtccacattattggtgttgccgccagctgaagacagctggttcaccttctggaacctgaaagacgctttctttcctatcagattagcccctgagaggcagaagctgtttgcctttcagtgggaagatccggagtcagagagccctgtcgagcctgattgtgtagaagtgttggattcagttgactctagcagacctgacctccgggaccaagcttgggcatcagtagactgggaactatacgtgtatgggagcagcttcttcaacccccaaggagagagag

SEQ ID NO: 12768 - DNA, 190 bp, Homo sapiens
  SIMILAR (181)..(38): 331254mologous to Homo sapiens bA93B14.1.1 (solute carrier family 21 (organic anion transporter) member 12, isoform 1),accession number AL357033,Smith-Waterman Score=59.
ctaatatccagagcgaaagaggatgatatgactctcaatatcgcagagggtgtacacccctcctataatattgttctgaataccctccacactttggcatctctgtgaagtccacttggagaccttcaaagggggctgctccataagctcgtatgccgggcggaacggctggaccttgcctcgcatcatg

SEQ ID NO: 12769 - DNA, 2379 bp, Homo sapiens; identical to SEQ ID NO: 3583
  SIMILAR (31)..(192): 291254mologous to Mus spicilegus MHC class II,accession number U88943,Smith-Waterman Score=69.

SEQ ID NO: 12770 - DNA, 977 bp, Homo sapiens
  SIMILAR (370)..(1314): 551254mologous to Rattus norvegicus tumor suppressor pHyde,accession number AF335281,Smith-Waterman Score=929.
atgaggggagctcagaaggccacaaacgttaacaagctctctgaggacattcagggtaaagaagaaagtccaacacaattctacgagagactgtgggaggcctatcgtatgtatactccctttgatcctgatagccctgaaaatcagcgcatgattcccatggctttagtccgtcaaagcgcagaagacatgagaagaaaactgcagaaacaggctgggcttgcagggatgaatccatcccaattactagaaatagctagccaggtgtttgtaaacagggatgcagtaagccgtaaggaaaacggcaaagagaatggaggtcaggcccggcgatatgccgacctgttttcacggaccaagaactaccagccggtacaggatttgcgcttgcttcatcaagctaaactgactttccatccaacagtacctaacccgtccacattgttggggttcccgccagctgaggacagctggttcacctgcttggacctgaaagatgctttctttcctatcagattagcccctgagaggcagaagctgtttgcctttcagtgggaagatccggagtcaggatggcccccctgttggagggccttggcagcaactgccctgctagtacaagaagcaaataagctgactcttgggcaaaaactgaacattaaggcctcccgtgctgtcgtgactttaatgaatactaaaggacatcattggctaacgaatgccacactcaccgactaccagactttgctctgtgaaaatccccgtataaccattgaagtttgtaacaccctccaccccgccaccttgctcccggtatcaaagagccctgtcaagcctggttgtgtagaagtgttggactcaattgactctagcagacctgacctctgggaccagccttgggcatcagtagactgggaactatacttggatgggagcagcttcttcaacccccaaggagaggtggagggtatgcaggg

SEQ ID NO: 12771 - DNA, 811 bp, Homo sapiens
  SIMILAR (432)..(292): 721254mologous to Homo sapiens unknown,accession number AF149422,Smith-Waterman Score=169.
ctaatatccagggacggagaggatgatatcactcccaatatagccgggggtgtacaccccttgtgtgacattgctcctaaagcgcagcgggggagaggaagatattacagccaatatcgcaggggatgtacacccccttgtgacattcttccttctatccctgactttccatccaacagtacctagcccgtccacattgttggggttgctgccagccgaggacagctggttcacctgcttggacctgagagacgctttctttcctatcagattagccccggagagccagaagctgtttgcctttcagtgggaagatccggagtcagcccttgccaaaacggtgaggcagcgttgtgtcagctgccgacagcatcatgcgaggcaaggtccagccgttccgcccggcatacaagcttatggagcagccgcctttgaagatctccaggtagacttcacagagatgccagagtgtggagggaataagtatttaccagttcttgggcgtacctactctgggtgggtggagacctatccaacaagagctgagaaagctcgtgaagtaacccgtgtgcttcttcgagatctgattcctagattggaactgcccttccggatcggctcagataacgggcctgcgtttgtggctgacttgctacagaagacggcaacggtattggggatcacacggaaactgcatgccgcctcccggcctcagagttccggaaagggtattcagaacaataggacaggaggggtgtacaccccctgtgatattgagagtcatgtcatcctctttcgctctggatattag

SEQ ID NO: 12772 - DNA, 1267 bp, Homo sapiens
  SIMILAR (1)..(300): 411254mologous to Feline leukemia virus gag-pol precursor polyprotein gPr80,accession number AF052723,Smith-Waterman Score= 214.
atgaggggagctcagaaggccacaaacgttaacaagctctctgaggtcattcagggtaaagaagaaagtccagcacaattctaccagagactgtgtgaggtctatcgtatgtatactccctgtgatcccgatagccctgaaaatcagcacatgattcacatggctttagtccgtcaaagcccagaagacatgagaagaaaactgcagaaacaggctgggcttgcagggatgaatccatcccaattactagaaatagctagccaggtgtttgtaaacagggatgcagtaagccgtaaggaaaacggcaaagagaatggaggtcaggcccggcgatatgccgacctgtttagccctgtcgagcctgattgtgtagaagtgttggactcaattcactctagcagacctgacctccgggaccagccttggccatcaggagactgggaactatatgtggatgggagcagcttcttcaacccccaaggagagagaggtgcagggtatgcagtgataaccctggacactgttgttgaagccacatcgttgccccaggccacttcaggccagaaagctgaactcattgctttcattggggccttagaactcagtgaagcacctgatcttgtacctacttattctaaagaagaaaatgactttctccaggcagagggaggacaagtgatggaggaaggattgattcggttaccagatgggagagtagctgtgccacagctgctaggagctgcagttgtactggctgtccatgaaaccacccatctaggtcaggaatcacttgaaaagttgttaggctggtatttctacatctcgcatttgtcagcccttgccaaaacggtgacccagcggtgtgttacctgccgacagcataatgcgaggcaaggtctagctgttccacctggcatacaagcttatggagaagccccctttgaagatctggatccaggtggacttcacagagatgccaaagtgtggaggtaacaagtatgtactagttcttgggcgtacctactctgggtgggtggaggcctatccaacacgaactgagaaaactcgtgaagtaacccctgtccttcttcgagatctgattcgtagatttcgaccgcccttatggatcggctcagacaacgggcctgcatttttggctgccttggtacagaagacggcaaagggtattcagaacaatattacaggaggggtgtacaccctctgcgatattgacagtcatatcatcctctttcgctctggatattag

SEQ ID NO: 12773 - DNA, 996 bp, Homo sapiens
  SIMILAR (1)..(1155): 981254mologous to Homo sapiens putative p150,accession number U93563,Smith-Waterman Score=1958.
atgctgacaggaggcgtgagagactcccgaatccgagacaaaggactttattatcacagcaacagcaatagccagacaatcaaggtttttgcaccagtgccctcagcctcagtttccacaggaccacatgaagagggccagccacggaccaaggactaccggccagtacaggatttgtgcttgcttaatcaagctacactgactttacatccaacagtacctaacccgtccacattgttgggtttgctgccagctgaggacagctggttcacctgcttggacctgaaagacgctttctttcctatcagattatcccctgagaggcagaagctgtttgcctttcagtgggaagatccggagtcaggtgtcactaatcagtacacttggaccgggcttccccaagggttcaagaactcccccaccatcttcgggaaggcgttggctcgagaccatcagaagtttcccaccagagacctaggctgcgtgttgctccagacccccatcgcattggcgggaggcatcccccaggaggaggggactgagagccagcccctcttccccccctggctcttaggacccccatcacagcggggggaggcaccccccgggaggcggggactgagaaccagcccctattccccccctggctttgggaccctcatcgcagagagccctgtcgagcctgattgtgtagaagtgttggactcaattgactctagcagacctgacctccgggaccagccttgggcatcagtagactgggaactatacgtggatgggagcagcttcttcaacccccaaggagagagagaggctcgaaaagcagcatctgccccctttcgggcatcagtgctccctcaagcacctgatcttggacctacttcttctaaagaagaaaaggactttctccagggtattcagaacaataggacaggaggggtgtacaccctctgcgatattgagagtcatatcatcctctttcgctctggatattag

SEQ ID NO: 12774 - DNA, 1950 bp, Homo sapiens
  SIMILAR (205)..(1083): 911254mologous to Homo sapiens putative p150,accession number U93564,Smith-Waterman Score=1368.
ccatcctaatacgactcactatagggctcgagcggccgcccgggcaggtgttggctggaggggctgctgctgggaacacctggagtctccgcgggcagatctcatattttggattctggatatattataatgagtgacactttgacagcggatgtcattggtcgaagagttgaagttaatggagaacatgcaacagtacgttttgctggtgttgtccctcccgtggcaggaccctggttaggagtagaatgggacaatcccgagagaggaaagcatgatgggagccacgaagggactgtgtattttaaatgcaggcacccgacaggaggatcctttattcgtccgaacaaggtaaattttggaacagactttcttactgcaattaagaaccgctatgtgttagaagatggaccagaggaagatagaaaagagcaaattgttacaattggaaataaacctgtggagactatcggttttgactctattatgaaacagcaaagtcagctgagcaagttgcaagaagtttctctgaggaactgtgcagtaagttgtgctggtgaaaaaggaggagttgctgaagcatgtcctaatatcagaaaggtagatttgtcaaaaaacctgttgtcatcatgggatgaagtgatacacattgctgatcagctcagacacctggaagtccttaatgtcagtgaaaataaactaaaatttccctccggttcagtattaactggaacgctttctgtactgaaggttttagtcctcaatcaaacaggaataacgtgggctgaggtgctgcggtgtgtcgcggggtgcccaggcctggaggaactctaccttgagtctaacaacattttcatttccgaaaggccaacagatgttctccagacagtcaagttattagatctttcctctaatcaattaattgatgaaaatcagctgtatctgatagcccacctgcccaggttagaacaattaatcctctctgacactggaatttcttctctacattttccggatgctggaattgggtgcaaaacggtccatgttcccatccttgaagtacctggtagtaagacgacaatcagatatcacaatggtcgtttttcaatgagctagagaagttaccaagtctacgggctttggtcctggcctaagaaaccccctgaccaaagaggacaaagaaagcagagacggcgcgactactcattatcgccagccattgggcagctgaagacgctgaacaaatgtgagattctccccgaggagaggcggagagctgagcttgactacccgaaaagcttttggaaatgagtggaaacaggctggtggacaataaggatcccggaaaaaaacagactcagcgaagaattcctcacagcccatcccagataccagttcctctgcctgaaatatggtgcacctgaagatttgggacttcaaaacacagcaaccacttatgctgaaaaaccagctactaacactgaagataaaattaccctcatcaactttgattcagaaagtcctgggagaaacaactgccgggggttccatgacaattcaaaaggtgaaggggattgctgtcacgtcttctcaaagttcctgtgtcagaccttctggttgtcctatgaaagtcccaaaaagccgggcagagaaatcgagcttggaaaatgacctaaagtcattacagttttattctgtggaaaatggagattgtctattagtgcgatggtgacaaccaactaataaaatttaaagaccacactgcttatcgtgtctggggttcaccggaaataaatgattcactggaacaattctactgtcaaaacaaagggggtttacaacttgtcctaagtataacaagggatgtattttttgttgggaagtgaccatttctaggcttatacataatagcaataataaaggctttgaacctacagaaaaaaaaaaaaa

SEQ ID NO: 12775 - DNA, 1709 bp, Homo sapiens
  SIMILAR (1034)..(1936): 881254mologous to Homo sapiens putative p150,accession number U93564,Smith-Waterman Score=1405.
atgatggcaattcaatgtgataagtgctctgagaaaggaatgcacaggatgtttgagcagcccaaagcagggggctccatgacaattcaaaaggtgaagggattgctgtcacgtcttctcaaagttcctgtgtcagaccttctgttgtcctatgaaagtcccaaaggcaagcccttaaagaagaagacaagagatacagggaaagctaaagtagtgttcagggtggtggaacccactaacaaaacaatccgctgggcaccgctacctgccctttttcactcatgggagatttctgagactcagagggataagagatttgcaaagcgtgagacacaaacagttgcagatacagacagaacacttgctttctcagaccggcagatgcatacaatggcaaggccacctgatacaccagtcctgttcatttggaaaagggacaactccttcacattcacaagctgggctgaaggtgatgctctcttacacaaccttcattctcgccctcaaagacttattgatcatataaggaatctccatgaggaagatgccttactgaaggaggaaagcagcatctatgatgatattgtttttgtggatgttgtcgacacttatcgtaatgttcctgcaaaattattgaacttctatagatggactgtggaaacaacgagcttcaatttgttgctgaagacagatgatgactgttacatagacctcgaagctgtatttaataggattgtccaaaagaatctggatgggcctaatttttggtggggaaaactgaattgggcagttgaccgaaccggaaagtggcaggagttggagtacccgagccccgcttaccctgcctttgcatgtgggtcaggatatgtgatctccaaggacatcgtcaagtggctggcaagcaactcggggaggttaaagacctatcagggtgaagatgtaagcatgggcatctggatggctgccataggacctaaaagataccaggacagtctgtggctgtgtgagaagacctgtgagacaggaatgctgtcttctcctcagtattctccgtgggaactgacggaactgtggaaactgaaggaacggtgcggtgatccttgtcgatgtcaagcaagataacagggacttgaattagcagagtctaaattcaggggcaggcaaacgataatctgagtgcaagtctgaggagtcccagggtttagcagtagactgtatggtctttcaagagagttccagactggcactttcacccagaaccaatgcggtgtttcttaatgtttgcacaaatttccttaaaaatcaacttgtactgtagcataagaaaagtttttatttatctattggaagattatcagaaaaataccaagttattttataaaagaaaaaatatttctaaatcctgatgcattgtggctaattagtaattcaccattacctatagtttttggttaaaacttggcctagttcagaaatctgtagtagtaactgagagtttgaatttcaacctggattgcaggatagctctgtagagctaattaggataattatcagacaaaaaggaactcacaggaatgctgtgtgatcatgtgatcacatatttgagcagtggtcacttataccaaagtttggggtttctggaaataatgtcagattttgtggatctctgaagtgggcaacttgaactaacttgaagaggaacctcgtgc

SEQ ID NO: 12776 - DNA, 621 bp, Homo sapiens
  SIMILAR (306)..(136): 761254mologous to Homo sapiens Human secreted protein sequence SEQ ID NO:103,accession number Y87064,Smith-Waterman Score =230.
tcaggtttttgttccacttccctgactcatgtccagttttgaaattgcattccgaagagttatgcagtcatcattcttgtcttcattcatatcagtttcaattgctgacattgtaaagacgctcctcattcgcccctcccagtaggggctgactgacacctcatacaggcaggtgccctctgggatgaagcttccagaggaaggatcaggcagcaatatttgctgttctgcagcctccactggtgatacccaggcaaacagggtctggagtggacctccagcaaactccaacagacctgcagctgaggaaccatctgactggtgacgagcaagtgattccaggatcaaactctcattggcaccttcccctccaggcccgtaggtctttttctctgtggagacagagacttctgcctcaccagcaaggttcctcagtggtagaaatttattccaggagccatccaaaatgtcacaggaaggtgcctttagtgattgaggaaaagctattggctgatcaagaagctgcaattcacaaagaaactgcaacatgcatttgttttcatgcagttgaccatttttatttcttctttcgaaaaatgtcaattcaggtcctttgtccat

SEQ ID NO: 12777 - DNA, 2505 bp, Homo sapiens
  SIMILAR (94)..(555): 851254mologous to Rattus norvegicus zinc finger protein RIN ZF,accession number AF091457,Smith-Waterman Score=740.
ttaagtaaggatatcaaacagatagatggtaccggctcggtgcaaaaataggtggtacccccccacattagtgagtgtactagtccgggatgcagctccttgtccggcagccggttgcccgccgggtccgtggcatacgggatgcggatgtacaggtctggtgcgagggtgcgcacactctccagcctgcccgtaggcgctgtagccgtattcccgcgtctgtcgcgggccgctgatgcgcaccaggtcgccgttgtcactccacccgtagtcacggtcatataccaggctgttcaggtgctggctctgtaactggcctgcgggggtgtatgtgctggtcagttcgtatgcggcattactgcctgccatgctgccgaagctgcgcaccgtctcacggtgcagcctgtcccgcgtatactcgaccagcggcgttccgcccagcttcattcccgccaggtaaccgctgccatacgtcagccactccaccggcggcaggctgtccggcgtgacgcggtttgccagcccctgctcgttgtatgcgtgtttcgtctcatgctgccacagcagttcccccgtctccgggttctccaccgtctggcattcgccggtcaggcggcctttatcgtcatagccatcgtggacggcaacacggtggccttcgctcaggtggctgatgtctgtcagccagccgtggccatcatactggcactgctctgccggttcgccgttcaccgtgcggtgagtgatacggtccgattcatcgtagtacccagaggatgacaagtccctcatcctcacagccggtccagcgcatcgtaactgaagacgctgtggctgccgttctcgttggtcaggctgatgacacgtccggcagcatcgtactccatactgcgcgtcagcccgccctgcgtggtgctgaccgcctttccgccacgcatcgtactgtgtctcgctccggttgccgtccggggtgataacggcagtcaggtcgcctgcggcgttgtattcataccgcttgaactccatggatgcacgttcactgccgagtttttctgccagcgcttcaaattttcgcggcttatcctgaccaacaacaaataaaagcgtattgtgacgtaatgattccggtaacgatgccaaagcttcaattgagcgatctacacctttacggccaaaatctgatccaacctgcagtaataagttttgttgctcttttatgccatttttctggcgataaatttcacggctgtttgggatttgctcactgtattttctgtccggataaataccgggaggaagaatttgaaaacgttcaggttcagtttgataatgcttctggaaatcggcgatttgcttatcggtcagcatcataagtttcgtcgatttaccctgctcgaaagtcgctcgctcaaatgcggcataatggcgatatcgtgatgttaaacgatataaaaaacctttttcttgcgcaactttctcggcgtaacaaacatcagcggcaaaataaaaatccaggccaggcatcttaattaaacccacaacgcgatctgcgggatgctctttgaaatgaatttgtacccaacctaaaattctgcattgcgtccacgccacacactcgccgggggcaccacaggggctttttccccccttaaacgttttcaacacccaaaaaatcgtgctagccctcccagagccttcaacttgaactggttgctccttaactttgttatacaactgtagcctttctatgtctttcactgtcatcttgtgttgaagtgcccatttcccaaattccattatcttccactttctttgcttgtacatcaagtagcttccagccatggccctgggcaggtcccatacgttttcaagcccgtgtctaggttccaccaagtctttagcccatttgtgtacaaatttctttctcttggaaatcatcgacggtccagaagaacaggccggaagcaaccaggggccaccgccaacaccagagaccaccgcggtcgcgagacactgacaccagcgggttcgacaacacacgccatcacatccgaccagacccattgttctccaagttgttggaatctgcaccgtgcaaagatcatctgcagattcatctgctgaactgccaatgaagtcaaagttaaggcagttaaggaccagtttcaagacctgcattaccagattttgctgacattgatcctgaagatttaaaggtttggcaaacacctcctgtccaagcttgcagaggtggcagggggtggatgtgatgggtctgtatgagctccctgcagagatgccacgatgacctagcaacagattcaccctgaggcagcagccgagagccagagcagggaatcctggctgtgaggtgtagaagtcttcctccttgttttgtaaacttctccgagttgtgccgttagtcaatttccttcgaccatgccgacgatgtagaaagcccggctcttgtttacactgccagtttacactgtttctccaagccat

SEQ ID NO: 12778 - DNA, 765 bp, Homo sapiens
  SIMILAR (319)..(257): 801254mologous to Homo sapiens Human secreted protein sequence SEQ ID NO:103,accession number Y87064,Smith-Waterman Score =91.
atgaataatactaaacttattaatcagcagagtgaaaactctgaagaaagcagtggttctctcagcacacgttcaaactccgagaacgaacagaccacctcctcaagcgggtccctcaccctgtgtagcctgactgggaaacacctcccagtaggggctgacagacactcaaacaggcaggtgaccctctgggatgaagcttccagaggaaggatcggcagcaatatttgctgttatgcagcctctgctgttaataccaagacaacagggtctggagtggacctccggcaaactccaacagacctgcagctgagggggagtgaacgcttacgtcttgctggcggcgttccaggtgtttgccaaacctttaaatcttcaggatcaatgtcagcaaaattggtaatgcaggtcttgaaactggtccttaactgccttaactttgacttattggcagttcagcagatgaatctgcagatgatctttgcacggtgcagatccaacaacttggagaacaacaaagaagtggaagataatggaatttgggaaatgggcacttcaacacaagatgacatgaaagacatagaaaggctacagttgtataacaaagttaaggagcaaccgttcaagttgaaggctctgggagcctggaacttggtgccctgtgtcgcagctgctccagctgtggctgaaaggggcaatgtagagctcaggccacggcttcagagggtgcaagccccaagccttgcaccttccatgtggtgttga

SEQ ID NO: 12779 - DNA, 681 bp, Homo sapiens
  SIMILAR (1)..(894): 971254mologous to Homo sapiens putative p150,accession number U93563,Smith-Waterman Score=1482.
atgtgggaaaatttggaacctcctagagacttgctgaatgactttgacaaaaatgctgatagtgttttgaacaataaggtccaggcagaggtggtctcagatggagatgaggaacttgttgtgaactggagcaaaggtcatgattcctttgatggatctgggcaaagtcaattcggaaccttctggaaaggattcactatgatagatgccactaaggacattcatgattcaccagaggaggtaaaaatagcagcattaataggagtctggaagaagttgattctgaccctcataaatgactttgaggggttcgcgcccttagcagaggaagtaaccacagttgtggtgaagatagcaagaaaactagaattacaagtggagcctgaagatgtcatgctgatgcaagatgtgggctcccatggacttgggcagctctgcccctgtggctttgaaaggccacaactcttacgtgggaccttgcagaagagattccccaaccaatacctttacggcgctgcctccctgatgggctgggttctaaacagcagtgccttccccatctgctcagtccttactcacctgggcaccatcctcccggttggtgttgagtgcctgcagcttttccaggtcaccaggcctgtgatggaaggggctgccatgaagacctctggcatgccttag

SEQ ID NO: 12780 - DNA, 497 bp, Homo sapiens
  SIMILAR (9)..(179): 631254mologous to unidentified cloning vector lacZ alpha peptide,accession number U13869,Smith-Waterman Score=166.
tgaaccgcacactctgccacgccctagcgaccgctactttcgcttacatccattctcttatcgccacgttcgccgacttcacccgtcaagctctacatcggcgctacactttaggtctccgatatagtgctctaccgcacctcgaccccacaaaacttgatttgggtgatggttcacaatatgaaaaaatcttcgaaatgcttgaaggagtgcaaggacctactgcagtcaggaaacgattttttgaatccatcatcaaggaagcagcaagatgttctcatcgcagcagacacccaagctcaactggccgctgttacgagtatgtcaccgtatactctgagattgcgccgaataccgcctcacagcgatccatgacgtgtctgtcctggtacagccagtacgccctccgcagtgacacggttagcgacgcccccgcgagatcgaggatccaccagagaaaagcactgtcatatgtcgcttacacgcgctccgtgtaa

SEQ ID NO: 12781 - DNA, 533 bp, Homo sapiens
  SIMILAR (531)..(313): 461254mologous to Homo sapiens Human sdph3.10 (SAGE) protein,accession number Y49634,Smith-Waterman Score=158.
ctgcagaaaccacgactgtaatagtatttacctaatgggttaataatatctaccagcacaggtgggaatacaaaataaccaaaacacaagttatcctttcaaataaaatgctttgggaaaaagaacatcttttactaacagaaatttcttagcctctggaaggctatttgattcggtaacatatgccaggagacttcagcaatatcctgctccattgtagaaaacagcaatctgatccttttctctcctcaatcattaacgagattatgcatttggggtgtgataatcctccagggacaagtattctcaaatcatacgtttcagtttcttcttaaggtgcttaacaaagtctcgtctcatacatcttgctgcttccttgatgatggattcaaaaaatcgcttcctgactgcagtaggtccttgcactccttcaagcatttcgaagattttttcatatttttgtccaacgcatcggagttccttcactaatttacgttttatatcagcattaatttctcgttggcttttgggag

SEQ ID NO: 12782 - DNA, 410 bp, Homo sapiens
  SIMILAR (91)..(447): 961254mologous to Coturnix coturnix qdgl-1,accession number AF190625,Smith-Waterman Score=638.
atcaccggacccttgggtctccacatacaagtctacttgtcacattgcccaagaaattgctgagaaaattcatcttcgaaatcagtatgaacgaaaaggtgaataggctccaaaggtccaacctgatgagcgaagacgctaatggaggagcacccaacccttggctctttgaggagccagaggagaccataggctggggttttgatgaaatccgtcaacagcagcacaatattatccgctaacaggacgcaggccttgatgccctttcctctatcataagtcgccaaaaacaaatggtgcatagaaattggtaatgaattgcatgaacaaaatgagataattgacgaccttgccaacctaatggagaacacagatgaaaaacttcgtaatgaaaccaggcgggtaaacat

SEQ ID NO: 12783 - DNA, 1403 bp, Homo sapiens
  SIMILAR (1)..(351): 1001254mologous to Homo sapiens immunoglobulin kappa-chain VK -1,accession number M64855,Smith-Waterman Score=612.
agataattgacgaccttgccaacctagtggagaacacagatgaaaaacttcgcaatgaaaccaggcgggcccttgttagtgtaaaccttggagagctccaacctggctctggagcaggggtgcccaacccctgggccaggactggtaccggtctgtggccttttaggaactgggccgcacagcagcagctgctaaaagggggaaaaattaaagcaattcatactcctggtgacttactgctgcagaataattggtttctgtttgcaaggaacattatcacagcaaagcccagaaaacagaaagatgtcatggaactcaatctgtcagcatctcagtcttacccaactatctgggcttcgtcagagatctcctataagaaagagaaatatggagaaaccaaggtaagaaagatgctcttcttgagcatcataagcaaggagaacagcacagaagaagctggcttcttcactgcacgccctgttttgaccacatctttctccaatcagtgggttgtgactggtgctcagaaaacaagtcctgctgatctcctacctcataaccttgaaaataagttggagggtgacactaataaccaagataaagaacaaaaggaatggaacaggtttgtggggaaagatactgagccgtgttttagacatgttgcatttgaaggaccgttcagcaatggctgcttttgcactgtaactgcaatggtgaatagctgcaacacagatcacactttctggggcacaaagcttactatctggccctttggtgacaaggtcagtgatcctccaaagataaaagaaaaacactgtgccacagggagctgcaaggaactcccgcagatcaaagtggagcctctgggaaccacccaggctttggggacacagggaaagctcctttgcctggcagaaattccccttggccacactcgctcacaccttatacacagccagatgggccagttcaaagtactcagcatgccaaagtgccatactctggggtatcgcgttctgatccctgacgggcacctaagaataaacaatagtgggaaactgttaattccaccccgcttccaggccctaaggaagttgaaaagcgtgtctgctgcctgtgaggttctttcctttcttgctgaaggctgtaactctactccggcaattcctgctcctctggccaaagaaaaactgcttctggatcaatctaacctccaggatatactgacatcattcctctgcttttcagttgagctgactcgtgctatggacccaagggctgtagcacacagaactgcactcctaggaccagtggctgctgactcctcagagttctcacctgaacagcaacaaaagaaaggccctaaaagcttccagagtgaaaaacgaacaatacggcagtaa

SEQ ID NO: 12784 - DNA, 846 bp, Homo sapiens
atggccccggacccctggttctccacatacgattctacttgtcaaattgcccaagaaattgctgagaaaattcaacaacgaaatcaatatgaaagaaaaggtgaaaaggcaccaaagcttaccgtgacaatcagagctttgttgcagaacctgaaggaaaagatcgcccttttgaaggacttattgctaagagctgtgtcaacacatcagataacacagcttgaaggggaccgaagacagaacctcttggatgatcttgtaactcgagagagactacttctggcatcctttaagaatgagggtgccgaaccagatctaatcaggtccagcctgatgagtgaagaggctaagcgaggagcacccaacccttggctctttgaggagccagaggagaccagaggcttgggtttttgatgaaatccggcaacagccgcagaaaattattccaagaacaggacgcacgccttgatgcactttcctctatcataagtagccaaaaacaacatggggcaggaaattgggaatgaattggatgaacaaaatgagataattgacgaccttgccaacctagtggagaacacagatgaaaaacttcgcaatgaaaccaggcgggtaaacatggtggacagaaagtcagcctcttgtgggatgatcatggtgattttactgctgcttgtggctatcgtggttgttgcagtctggccgaccaactgatggcagtaaagagaccaccagcagtgacacctggcaatgacagatgcaagcccaacacccttttggtacgcaaaacctgctctcaataaattcccccaaagctctgaaaaaaaaaaaaaaaaaactcgtgcc

SEQ ID NO: 12785 - DNA, 939 bp, Homo sapiens
  SIMILAR (235)..(651): 971254mologous to Homo sapiens phospholipase,accession number M21054,Smith-Waterman Score=775.
atggcggcgctctacgcctgcaccaagtgccaccagcgcttccccttcgaggcgctgtctcaggggcagcagctgtgcaaggaatgtcggattgcacaccctgttgtgaagtgcacctactgcaggactgagtaccagcaggagaggctagagtgcaatggcacgatctcggctcactgcaacctccacctcccaggttcaagcgattctcctgcctcatcctcccgagtagctgggattacaggcattaaaaccaatacaatatgcaagaaatgtgctcagaacgtgcagttgtatggaacgcccaaaccttgtcagtattgcaacataattgcagcatttattgggaataaatgccagcgctgcacaaattcagaaaagaagtatggaccaccctattcttgtgaacagtgcaagcagcagtgtgcatttgacaggaaagatgatagaaagaaggtagatgggaaattgctgtgctggctgtgcacactttcatacaaacgggtccttcagaagaccaaagagcagaggaaacacctgagtagctcttctcgtgctggccaccaggagaaggagcagtatagtcgcctgagtggtggtggccattataacagcttctccccagacctggctctggactcaccaggcactgaccactttgtcatcattgcccaactgaaggaagaagtggctaccctgaagaagatgttgcatcaaaaggatcaaatgattttagagaaagagaagaagattacagagttgaaggctgattttcagtaccaggaatcgcagatgagagccaaaatgaaccagatggagaaaacccacaaagaagtcacagaacaactgcaggccaaaaaccgagagctcctgaagcaggcagctgctttgtccaagagcaagaagtcagagaagtcaggagctataacctctccatga

SEQ ID NO: 12786 - DNA, 1026 bp, Homo sapiens
  SIMILAR (606)..(400): 371254mologous to Homo sapiens COL1A1 and PDGFB fusion transcript,accession number Y15913,Smith-Waterman Score=87.
atggcggcgctctacgcctgcaccaagtgccaccagcgcttccccttcgaggcgctgtctcaggggcagcagctgtgcaaggaatgtcggattgcacaccctgttgtgaagtgcacctactgcaggactgagtaccagcaggagaggctagagtgcaatggcacgatctcggctcactgcaacctccacctcccaggttcaagcgattctcctgcctcatcctcccgagtagctgggattacaggcattaaaaccaatacaatatgcaagaaatgtgctcagaacgtgcagttgtatggaacgcccaaaccttgtcagtattgcaacataattgcagcatttattgggaataaatgccagcgctgcacaaattcagaaaagaagtatggaccaccctattcttgtgaacagtgcaagcagcagtgtgcatttgacaggaaagatgatagaaagaaggtagatgggaaattgctgtgctggctgtgcacactttcatacaaacgggtccttcagaagaccaaagagcagaggaaacacctgagtagctcttctcgtgctggccaccaggagaaggagcagtatagtcgcctgagtggtggtggccattataacagccagaaaacactttctacatcttcaattcaaaatgaaatcccaaagaaaaagtccaagtttgagtcaatcacaactaatggagacagcttctccccagacctggctctggactcaccaggcactgaccactttgtcatcattgcccaactgaaggaagaagtggctaccctgaagaagatgttgcatcaaaaggatcaaatgattttagagaaagagaagaagattacagagttgaaggctgattttcagtaccaggaatcgcagatgagagccaaaatgaaccagatggagaaaacccacaaagaagtcacagaacaactgcaggccaaaaaccgagagctcctgaagcaggcagctgctttgtccaagagcaagaagtcagagaagtcaggagctataacctctccatga

SEQ ID NO: 12787 - DNA, 3405 bp, Homo sapiens
  SIMILAR (1)..(774): 1001254mologous to Homo sapiens HTRM clone 2724537 protein sequence,accession number Y73343,Smith-Waterman Score=1286.
  misc_feature (1)...(3405): n = a,t,c or g
gcggtgcgagcggcagatagctcccatatcgccctttgagcaaaacggacgctcacctgcggttgggccgagtgttatcaacaagagcggcctggatgtggtcaagaggaccactctcctccaaacccacagcactgttattcttgaccaagtcccgagcgaccaggacgctctccaatacctgaggctccgcgaccaacgccaggcgacacacgtgatggcggaaccggctgagggaggctcggagaccgtcgcgctcccgccttcaccgccttcagaggaggggggcgtaccccaggatcccgtgggccgcggcggtactccccaaatccgagttgttgggggtcgcggtcatgtggcgatcaaagccgggcaggaagagggccaggctcccgccgaaggcctggcagccgcttctgtggtgatggcagccgaccgcagcctgaaaaagggcgttcagggtggagagaaggccctagaaatctgtggcgcccagagatccgcgtctgagctgacggcgggggcggaggctgaggcggaggaggtgaagacaggaaagtgcgccaccgtctcagcagccgtggctgagagggagagcgctgaggtggtggtgaaggaaggcctggcggagaaggaggtaatggaggagcagatggaggtagaggagcagccgccagaaggtgaagaaatagaagtggcggaggaggatagattggaggaggaggcgagggagtaagaagggccctggcctttgcatgaggctgtctgcatgggccctgtggaggccatgcagctggaactgtacactgtgaatgtgtcaggccgacagggctttccatcagggggagcccaagtttgggcggatgcgtcgacactacctggagcggaggaactacatcattcagaatatcccgggcttctggatgactgcttttcgaaaccacccccagttgtccgccatgattaggggccaagatgcagagatgttaaggtacataaccaatttagaggtgaaggaactcagacaccctagaaccggttgcaagttcaagttcttctttagaagaaacccctacttcagaaacaagctgattgtcaaggaatatgaggtaagatcctccggccgagtggtgtctctttctactccaattatatggcgcagggggcatgaaccccagtccttcattcgcagaaaccaagacctcatctgcagcttcttcacttggttttcagaccacagtctttcagagaccaattaacttgccgagactcatcaacgacgctctgtggccaaatccactgcaatactacctgttgcgtgaaggagtccgtagagcccgacgtcgcccgctaagggagcctgtagagatccccagggccctttgggtatccagtctggttaaacatttgcccttggggaattactcctgcacaaggtctccttaccaccttctgctggacctgtgcttgggcatcagcaatgagtatgccttctattgtgctttgtttttgctgacttttctgcaccctgtttcctttggatattcagttctctcaacctcaagattgagacggtggtgggtatgcttctccacttccatatgaccttcatgctgttctggaatatcacatgctacgaggtcatccttcacactacttgtaagccaagcaaatgatactgtagattgtactgcctttatctgcactgcttggaccctgtttattcccagggcctctgaactggttgctgtcacttggatttctagctttgggagcctgttccacctactcagctctgcattgagcagtatgggcacatgccctgtggacagttactggacgttaatgaactcagaggagaaaagcagtgagccacttgttctgtgtgatttatggtacttcattgctcttccttcacctctagtcactttctattgctacctgccctacattggctcctgccaaggtccctctctctccctgttttccttttttttttttttttttttttttttgagacggaggacggagtcttgctctgtcgcccaggttggagtgcagtggcgcgatctcggctcactgcaacctccacctcccgggttcaagcgattctcctgcctcagcctcccgagtagctgggactacaggcgcgcgccgccacgcccggctaatttttatatttttagtagagacggggtttcaccatgctggccaggctggtctcgaaccccgatctcgtgatccgccctccttagcctcccaatcctctcttaaaaaaagtgatagctcagaaacatttgtaaaagcaaggtttttatttcattttgggctctgtcattttcagagggcaaagaagttgggcctgtaaaataggagtgctaggagctcttacggcccctcccttcttcccaactttcctatttcctaggcccttttattcaactcctaggaatagttaaagagagacacatctaggtgggggtggaaaggtgccctaagcaggagaaaactgaacaaaaggctagagggcatgggccaggttaaaaattggggcctagagtgaagactgtgctgtcgttaagagctttcgaggaaggagtacttactccccaatgatgatgaatggaaaaatacttttcagggagaattgaacggggttaaagtgttaaatatgttgcctagacaagggttctttaaagaaagaccagccgcaactttgaatgctttctttacttgttttgtgacctaattttatgtggaagattggttattcaattaggatttaagtaaaattttttttttctgatttctaaacttattgtgaaaattgagctgtacagatattccttttggatttccaattggggaacatttggaagaccaacagtctttacttgccctgtacaatatagagacatatgaatagtcgataacagttttccaaccttgttccttgtttcctgttaaactatattccctagggaacatagtttgaacaacttgggtctttgttaggcttgtcaaattgcccttcatgggaaaaataatctacaaaagtatggtttaattgattgtccttacatggatnaattttccctgggtaacaacttaggtaagggatatatcttttttcctaaattgcttaaatactgtggaaattgactctgacaaattgggaagtgtacccttgggcatatttgtcttccctttttatgcatgatggtaaaataaaagcatgttgttctgctagatttcttatttttcaccttacccataaatgtaatgcttgaatgaagttgttcatattaattaaaaattatggaatcattaaagtcctttaatccattaaagttcttaatggattaaaatcattaaagttcttaatggattaaaatcaaaaaaaaa

SEQ ID NO: 12788 - DNA, 347 bp, Homo sapiens
  SIMILAR (15)..(266): 1001254mologous to Homo sapiens ribosomal protein L9,accession number U21138,Smith-Waterman Score=435.
ggcacgaggcgagaatgaagactattctcagcaatcagactgtcgacattccagaaaatgtcgacattactctgaagggacgcacagttatcgtgaagggccccagaggaaccctgcggagggacttcaatcacatcaatgtagaactcagccttcttggaaagaaaaaaaagaggctccgggttgacaaatggtggggtaacagaaaggaactggctaccgttcggactatttgtagtcatgtacagaacatgatcaagggtgttgcttgttcagtatctcaagcccagaaagatgaattaatccttgaaggaaatgacattgagcttgtttcaaattcagcggct

SEQ ID NO: 12789 - DNA, 1668 bp, Homo sapiens
  SIMILAR (1)..(1128): 1001254mologous to Homo sapiens Unknown,accession number AF131775,Smith-Waterman Score=1947.
atgatcaaaggtgttacactggacttccattacaatatgaggtctgtgtatgctcacttccccatcaatgtcattatccctgagaataggtctctttttgaaatcagacatttcttggataaggccggtatatctcaagcccagaaagatgacttaatcctggaaggaaatgacattgaacttgtttcaaattcagctgctttgattcagcaagccacaacagctaaaaacaagagtatcagaaaaattttggatggcatctatgtctctgaaaaagggacagttcagcaagctgagtggctagaggcaggctcaggcctaggtacaggtgctagttcagcctgcctgattacagttcattcccacgcaggattttcaggccctggtgctctcacaataacccaaagctggcggaggtacatccgctcaaagctcccctgtcggcttaagggagatacgaggcccctgcaacagctggaagcggagccaagtgagtcaaatgtcacctcagggaacagctcagggacactgattattcacttccactgggagcggtatgccttcctcaggccattccccaggaaccgaacgggaaatcggttggccatctctctctccaccggaggcgggcagtggaaggaacacctgcgcagcccggagcctggcagcccgcccaccccgctgctgccggccctggtgctgcaggtgacacgcgtgcacaccccgaccccctcggagggccaattaagaaagcctctgggtatagtgcgggaagaatcgctgagtgggttcatggtctcactggcttcaggagtgaagctgcagacctttgcggtgagtgttacagttcataaaggtggcgcttccggagttgttcgttcctcccttctggagttgttcattcctgctggtgggttcacagtctcactggcttcaggagtgaagctgcagaccttcgagggctttgcagcacctagcccgggcactccggcagctcagagggagcttgtcccagataaccaagaagaaaagaggggaagtgagaaagagactgagacccgccatcatggccaacgaccccatgaagagggaatggcattccacgcacgggacccagtctctgatcaggcccagcaagcaccgccagccgcgctaagtgcaggccgagcccacgcccacctagaacacacactggcccatgagcaccatgcccccggagaggggcccccacagcgcagcagcgggctgaaggtctcctcgagtgcggccagagtggacgccaaggctgaggaggcaccaagggatcacaactcatcaccagcaaggggacaaaacaggacagagaatgaatttgacaaattgactgaagtaggcttcagaaggcgggtaataacaaactcctcagagctaaagaagcatgttttaacccaaagcaaggaagctaagaactttgaaaaaagattacaggaattgctaagtagaataattcgtttagagaagaacataaatgatctgaaggagctgaaaaactcagcacaagaacttcgtgaagcatacacaagtaccaatagcagaatcaatcaagtggaagaaaagatatcagagactaaagatcaacttaatgaaatgaatcatgaagagaagagaaaaaagaatgaaaaagaatga

SEQ ID NO: 12790 - DNA, 607 bp, Homo sapiens
  SIMILAR (3)..(821): 991254mologous to Escherichia coli Respiratory nitrate reductase 2 a chain (EC 1.7.99.4),accession number D90787,Smith- Waterman Score=1435.
gtcgacgcgagaatgaagactattctcagcaatcagactgtcgacattccagaaaatgtcgacattactctgaagggacgcacagttatcgtgaagggccccagaggaaccctgcggagggacttcaatcacatcaatgtagaactcagccttcttggaaagaaaaaaaagaggctccgggttgacaaatggtggggtaacagaaaggaactggctaccgttcggactatttgtagtcatgtacagaacatgatcaagggtgttacactgggcttccgttacaagatgaggtctgtgtatgctcacttccccatcaacgttgttatccaggagaatgggtctcttgttgaaatccgaaatttcttgggtgaaaaatatatccgcagggttcggatgagaccaggtgttgcttgttcagtatctcaagcccagaaagatgaattaatccttgaaggaaatgacattgagcttgtttcaaattcagcggctttgattcagcaagccacaacagttaaaaacaaggatatcaggaaatttttggatggtatctatgtctctgaaaaaggaactgttcagcaggctgatgaataagatctaagagttacct

SEQ ID NO: 12791 - DNA, 1680 bp, Homo sapiens
  SIMILAR (401)..(1051): 961254mologous to Escherichia coli adenylate cyclase,accession number X01653,Smith-Waterman Score=1082.
tctggggtttggttttagagcagggaggaccaggagtgggtagacacccaacattcgtatgcacagccacgtaatgtggtcatcagcactgtcctgctgagctgccctggccacatgctgagctgccgccactacatgctgagccgcccccgccacatgctgagccgcccctgcccccacgtgctgggctttgggatgtccctaccatgggcccatcccctcagtccgctcatgtgggccactgtccaaaccactggcctggtctcttcagaagtgtccaggcggcgaaggacagtgaaggctgagaaggcacactccagaggaaaagtggacagagccacgcggcaacaaaggagagctgttcaagacagcaatggacatgaagtggtagagggaagacaggaggggattcaaggcaggaagtactgggtggtaatcagcaagttctatgtacaggaagagatgctggttataccaggccatgcagggcacccagaactgaatagtcagatgggctctcccagacatagacagtttgtagtaagagaagacaaatgtgggcagagaagcaatggctttggccacagtatggagattgaagaagaagtcaatgacttgatgggtgaaaagatgaagaaagagttggatgaagtggatctctccacccactgtgggttcatgggtggccttcagcgcaatggcagcaccgggcagacggccccttactatgctacctcaactgtggaagtgattttccatgtttccactcgaatgccgtcagactcagatgattccctcaccaaaaaggcgtctctgcggaggtgtgccagtggaactggggaaagaccacagggagaaggaaacttccagctagactttataacaatttcaaccaaacatgaagtttcctggacagaatccaggggaggagagtctggggttggcagccaaagactagatggctgcagaaaacactctaccggtggtggagcctggatctctccccgagccccagcccagcacttgtgcagagttggtgctctggctttccaacctgagctagtgttgaccgattcaaacatgaaaacagccaacagcaagccagggctgctgccgagcccaccagggtgcttgaggactcagatgcagagtcccaggggagctaggcaggcacagatccctacacctgcaaaatcagaatgtgtggaggtagacgagggtcccagcaggaatcatggactgaacgctccgggagcagatacagaacttcagggcatctcggggcagttgactggctgcaattatttcaacataggcagggaggcagaccgaacactagttaaaggacaagtccagggaataaggcaaactgtcattatgtcagtaccaggaaggaaagagggagataagctcaaagaagtctctgatgggagggaagcagctaaccaagcagggatgaagtggggtaaggagtgtaagagcagttcgggcacagagaatgccatgagcgggaaggaagttgggatacttcaggaggagaaaggagactggagtcatggggtagtaagagggtggcaggaggtgcagctgaaagacaagctgggcctgggcacaggaggcccgaatggcttgaggcaaggaagcaacatgatgtcacttaagttgctatattgcccttag

SEQ ID NO: 12792 - DNA, 909 bp, Homo sapiens
  SIMILAR (391)..(903): 901254mologous to Homo sapiens p40,accession number U93569,Smith-Waterman Score=787.
atggtctgctatgttgctcatgctgcactcaagctcctggctcaagtgatcctcccgctgctgtctcccaaagtgctgggtttacaggtgcctagaggcctagagagaaaaatggttttgtgggccaaaccctttagcctcaccctttctcaatcctatgaggaagtaagcacacaagaaatccaaacactgccattccaggttgttttctttgtacaaatgaataccctgtttcactgtcacccagacatcagctctgcagctcagggatgtgttcagagcccggatgagagtttcatgttccaacaagtgccaatggttgagattgacgggatgaagctggtgcagaccagagccattctcaactacattgccagcaaatacaaccttgacggagagaatggaaccaagttggaaaacactctgcaggatattatccaggagaacttccccaatctagcaaggcaggccaacattcaaattcaggaaatacagagaatgccacaaagatactcctcgagaagagcaactccaagacgcataattgtcagattcaccaaagttgaaacaaaggaaaaaatgttaagggcagccagagagaaaggtcgggttacccacaaagggaagcccatcagactaactgctgatgccttggcagaaactctacaagccagaaaagagtgggggccaatattcaacattcttaaggaaaagaattttcaacccagaatttcatatccagccaaactaagcttcataagtgaaggagaaataaaatccttcacagacaaggaagtgctgagagattttgtcaccaccaggcctgccatacaagagctcctgaaggaagcactaaatgtggaaaggaacaaccagtaccagccactgcaaaaacatgccaaatcgtga

SEQ ID NO: 12793 - DNA, 231 bp, Homo sapiens
  SIMILAR (4)..(210): 461254mologous to Bos taurus transcription factor EF1(A),accession number M95794,Smith-Waterman Score=111.
atgtccgaaggcggggctagcaaaggtggtggagaagagcccgggaagctgccggagccggcagaggaggaatcccaggttttgcgcggaactggccactgtaagtggttcaatgtgcgcatgggatttggattcatctccatgataaaccgagagggaagccccttggatattccagtcgatgtatttgtacaccaagcagcaacaaaacattatttggatttggtttaa

SEQ ID NO: 12794 - DNA, 356 bp, Homo sapiens
  SIMILAR (293)..(9): 371254mologous to Pneumocystis carinii f. sp. muris kexin- like protease KEX1,accession number AF093132,Smith-Waterman Score= 141.
ctgcgaggcggctggcgcggcgaggagctagggcaccgagcgccccggcccgagccccgcaccgcagcgcgtctgcccttgtgcggcggcggcggctgcagcggccgctgggtggcccgctggctggctggttggctggctggctggctggctggctggctggctggctcgctggctggctgcccggctgactcctcactgtggcttcctgtagggctggacaaaggacatttccagacttcactggtgtcagatggggagacctggcacgtcatgggcatctcctccttgctgcccagccagcgaaaatcacccagctgagggtcagccaggacaaccaagaacacccagcccat

SEQ ID NO: 12795 - DNA, 592 bp, Homo sapiens
  SIMILAR (71)..(397): 571254mologous to Homo sapiens 3-phosphoglycerate dehydrogenase,accession number AF171235,Smith-Waterman Score=242.
acttccaaagcccctggtgcacaaggggagcaaggtttcgaggaatgcttcttggcggtggccctggcagggcgccccttacccagcctgtgggccttgttccaagccactacgcctgttactgcaggggctcaaggaagctttcttcaggccagaagtgccttctccgcagggacctgcccctgctcctattccggaactcagacctctgaccctgcaatgctgccttaccatgattggcctcctggcagaggcaaggcgtgccggctgcttgtcctaccagacttcactggtgtcagatggggagacctggcacgtcatgggcatctcctccttgctgcccaagcctggaaggggtggaagcaagcatgtgactgaagccttccagttccacttctaaccttggagctcactggtccctgcctctggggcttttctgaagaaacccacccactgtgatcaatagggagagaaaatccacattcttgggctgaacgcgggcctctgacactgcttacactgcactctgaccctgtagtacagcaataaccgtctaataaagagcctacccccaactcaaaaaaaaaaaaaa

SEQ ID NO: 12796 - DNA, 437 bp, Homo sapiens
  SIMILAR (45)..(287): 901254mologous to Homo sapiens F1F0-type ATP synthase subunit g,accession number AF070655,Smith-Waterman Score=361.
attcagccggcggttcggggcgacggactctccattccagaaccatggcccaatttgtccgtaaccttgtggagaagaccccggcgctggtgaacgctgctgtgacttactcgaagcctcgattggccacattttggtactacgccaaggttgagctggttcctcccacccctgctgagatccctagagctattcagagcctgaaaaaaatagtcaatagtgctcagactggtagcttcaaacagctcacagttaaggtaaccacgggctaaatgaaaacggatgtgcataacagaaaatgtcttcccttgggatttttctgatttgttttgattaatatatatgtttccatgagggctgaatccagcataatgaggaaaaaaattttgactgctgaggaagatacttacttttctaattttgtcacctgggtagat

SEQ ID NO: 12797 - DNA, 532 bp, Homo sapiens
  SIMILAR (112)..(333): 591254mologous to Homo sapiens Human ATP synthase subunit Asy1 SEQ ID NO:1,accession number Y78115,Smith-Waterman Score=179.
aaatacatacctaaatcaatgacataagtcaataagtgaaccacgcagggtccttccggggggtgaccttccgctggccattcgggatgatggactttccatcccacaaccatggctccatttgtccgtgaccttggggagaaaaccccagcactggggaaagctgctgtgacttacttgaagcctcgattggccgcattttggtactaccaccacggttgagctggttcctcccacccctgcatgagatccctagagctattcagagcctgaaaaaaatagtcaagtagtgctcagactggtagcttcaaacagctcacagttaaggaagcatttgctgaacgatttggtggccactgaggtgtcgacgtggttttatgtcagagagatcacaggcaagcgtggcatcattggatagaatgtttgaagaccagtcttgacatctgattatataagatttattatttgagtgttattggaccaggtgtgatcagactgctacctgaataaaataagatttgtcagaaattcc

SEQ ID NO: 12798 - DNA, 794 bp, Homo sapiens
  SIMILAR (1481)..(2023): 601254mologous to Homo sapiens envelope protein,accession number M12140,Smith-Waterman Score=578.
ctattggcagtttcagaaatccccctgaaaacttagaggattctgacgtttcactttttttttaggctggattctgcaaagatctttggacatttaagtatcttcgaccggcgcgaaaagaggcggcctgaccttggaagtgggacggggtcctgcagcgggtccttccggcgggtgacattccagcccggcggttccggggcgaacggacttctcccattcccagaacccatggccccaattttgtcccgtaacccttgtgggagaagacccccgggcgctggtgaacgctgctgtgactttactcgaaagcctcggattggcctacatttttggtactacgcccaaggttgagctggttccttcccaccccctgctgagatcccttagagctattcagagcctgaaaaaaaatagtcaatagtgctcagactggtacgcttgcaaacagctcacacgttaaggaagctgtgcttgaaatggtttggtggccactgaggtggttgatgtggtttttatgttcggagagattattaggcaagcgggggcattcattgggctatggatgttttgaagaccaatcctttaacatctggattatattttggattttatttattttggagttgtttgtttgggaccatgttgttgatccagactgctaatctgaaataaaaattaagaatttgtccaaactcagtgttttctccatcagatactccatgaaaggtcacaatttctcttgatattaagctgggttgtctttaaacaaccctaaatacacgtctgtttag

SEQ ID NO: 12799 - DNA, 728 bp, Homo sapiens
  SIMILAR (28)..(132): 801254mologous to Hydra sp. mini-collagen,accession number X61045,Smith-Waterman Score=181.
ctgagctgaagtattcattcttagcgatgtagccttcctcctcctcctcctcctcctcctcctccgcctccacctcctcctcctcctccgcctcctcctccgcctctgcctcctcctcacactgggcatccccttcagcttcgcttccggttgttagcagtgtgatcttggggatgataatagcatcgtacgtcgcagagttgctgtggggatcccatgagatcacctgtgtaaagcgcctggcacatagtaagtgagcagtcaggttggctgttggttatcctcttcttcaccattatccttcaatgaatggcgcctcaggtgccacctactccatgaagccttccttctgttccagtctgaggagagcatgcactaatggggctgtcacatggggtatctgccagccactcaggcagtttcacatggtagccctcagttgagtcctcatgtttcagggacaggtcaggcttaataattaaacctcgagtgactggtgtcttgatgatgaagagatgcttcagcacgccataccagattgctatataaaacctggagctcagacattctttctggcaggttaaacgtaaactcaggtgatttgctgagctgcgccacgggttgatgtttgcttcagaaagtgggcaagcctggccctcctcccgctggatttgtggaggcctttctctgctagttaactgtccctcatctccagaattctccgccat

SEQ ID NO: 12800 - DNA, 2335 bp, Homo sapiens
  SIMILAR (1219)..(1635): 991254mologous to Escherichia coli Nodulation protein NolK,accession number D90843,Smith-Waterman Score=733.
tcagagttggttttctggttccttctcatttgcataggctctgtcagagggaaggtctagggctgaaggctgttgttcagattctttgatgtagactctcccccttttcctatagatgtagcttcctgtgagttgaactgcagttattgttgtctctcttctgggtctgctcactagtgtgaagcggtcatagtgggagattgctacatgttccatgaaggggttgaaagggagatgggatgaagaggaatgaggtgcgttatacagcacagtcaggaaaattttctctccgagaaggtgagagttgagctgaggaattgctggtgatacaaagacagactggggggtgggggtccggtgaatgtgtgctcttttgggcacttcctcttccactatgtcatccaaagaatttggcagaagtggtggatgccactttgaataaatgcaaccatcagttccaaacacccacttctgagagtcatctccactatgtctgtaacgaaaatgtaatttagagattgacatcttctctccacagaaacacttgtaggttttaaataaaatgatcattttccagatagcctggcaggaggactgcccacactctaccaaagattctgccaccatcacttttatctcagcagctaaagctttccctaagacaaccaatttccctgctacaatgctctggtaccagactaaagatagaaaagaggtctcctttggcaggtccattagtccattgattttacatgtaggggcttttgcaaattcaaaagcttttatgggccagacaggtattagaaattcatgaagcagtgagagccagcatgagggctgccaaagggaacggtggagaatatggcaaactggaggatgtatgttccatctaaaggggacatcaccactcagttccttcctgatgggtgtcatgacagaattcagatccagtgccatttcagattttttcttggtgatcagccacacactggctacaggccacaggatcgatggcgctatttgactcctgctgcttgcttcactgcctgagaaactccactttccaatggaaacagaggcatgaaggacaatattgggatctaccttgttctgtagaaaatggttctccaagtccaccttttcaaactggtcaggtatctgttgactggtacagttgaaattaattggaaatccctcacaaacttcccaattgccacatccaggtagcagaacagcattaggatccaaaaaggtcttatatgcaaccatgatatcacctctggcaaatgcactcactcggtcaaaggtcaaacccaaagcaagatttagtggagatctgtatgctctaccataagagacccaaattttttgctcattcttcagcgaaagtggattcttaatttcttggccattctcatcaaaaagccgcattgaagaataattgaggcctggtgggttgatggaagaaccttgaagcctttgatgaatcttgagaagtaatctttccatcatatggtcagtttgaattgggctatccgatcccaaatcttttttactgataccaacagagatctctccagtgtttttaccattttcaaatacctctattttggtcaatttaacaacaaactgaaacacaatgttgtcctctacaatgaaatcttctctgttgcacatgttctcctttctcatcaccagtaagtgctccacaaacctgcaccagtaactgtatcgcattgttagtccaccaacaacaatggctggtttcctcacacctacaaaaacattttcttcacctccatatatttctagcttctcatagtctttaacttttccctccattctttttaaatttttgactttgacccatggaagcttcctccttgaccaatatctccgaccctttcctctttgccttccaacaggcatatagctcttattcttccctgcagctgcatgactgaggactttgatttcaagatgccacctgcagttgcccgctatatgacctctccgcaggcagttcacattatagcagtttgcccctttaaggccagtaggaaagtgtcccactctagtttgaagatttggttgtttaaaagtgtgtagcacctcctccttcgctctctcttcctcctgctccagccgtgtaagacatgcgtcttcctcttcaccttctgccatgattataagtttcctgaggtctccccaaccatgcttcccatacagcatgcagattttcttcctcctttgccaccctgaagacagcaacactaacttctcctcttcctcttcctcctcagcccactcaacatgaagatactcagataaggac

SEQ ID NO: 12801 - DNA, 1429 bp, Homo sapiens
  SIMILAR (1)..(3129): 981254mologous to Homo sapiens unknown,accession number AF148856,Smith-Waterman Score=5357.
gaatttcttaaatagcgagaagccttattccatgaaaaaatacggaactacaagaacattctgtacttttgtcatcttgggagctcctcatgtcaagacacggaaaagagaggcagttagtggaagggagatggtgatattggttgatccgtcattggaaacgtcagagtccagagagaagaggtggagcatcagggggcccagtgggacaagatttgctgataagcacaagtacgcctctagggacacgcagacagacttgaacaagatagtctttcagcataagggaaacacagttactttaaaattttggctaggttatatcaactccctagcccgatgtcagaatttagttaacagggatcttgatcacctttcccttccacaagatagcacactggtccattacattgatgatattgtgctgaatggatttagcgaggaagagaaagatcattctggctacaactttgacaaagaattcgatagaagcaaggctctgggggtgggggtgtgtgcagtgactagttggaaaattcagtgtattataccagtgagtgatggcagtggtctgaagtcagataggaagcagttggcatcagagaatgaaagaatggccctgaagtctgaactaagtctccagcttggggtaacactgcctgtagcgttgatgcgcttgggggtattcgtgccgaagccatcaaagagcaaaggagaaagtaaagagattgatgccaccaaagcgttttcccagctggagatagctaaagccgagggttacgatgatattaaaatcaccggtcctcgactcgatatggatactgatttcaaaacgtggatcggtgtcatctacgcgttcagcaaatacggcttgtcctcaaacaccatccagttatcgtttcaggaattcgctaaagcctgtggtttcccctcaaaacgtctggatgcgaaactgcgtttaaccattcatgaatcacttggacgcttgcgtaacaagggtatcgcttttaagcgcggaaaagatgctaaaggcggctatcagactggtctgctgaaggtcgggcgttttgatgctgaccttgatctgatagagctggaggctgattcgaagttgtgggagctgttccagcttgattatcgcgttctgttgcaacaccacgccttgcgtgcccttccgaagaaagaagctgcacaagccatttacactttcatcgaaagccttccgcagaacccgttgccgctatcgttcgcgcgaatccgtgagcgcctggctttgcagtcagctgttggcgagcaaaaccgtatcattaagaaagcgatagaacagcttaaaacaatcggctatctcgactgttctattgagaagaaaggccgggaaagttttgtaatcgtccattctcgcaatccaaagctgaaactccccgaataa

SEQ ID NO: 12802 - DNA, 871 bp, Homo sapiens
  SIMILAR (185)..(298): 581254mologous to Homo sapiens Human secreted protein encoded by gene 75,accession number Y76198,Smith-Waterman Score=115.
tcacttctgggttatataactgatcctccgaggaccttttaggcagtcactggggaagccagagcccatgcccagtgttaccccaagctggagacttagttcagacttcagggccattctttcattctctgatgccaactgcttaagatttggttgtttaaaagtgtgtagcacctcctccttcgctctctcttcctcctgctccagccgtgtaagacatgcgtcttcctcttcaccttctgccatgattataagtttcctgaggtctccccaaccatgcttcccatacagcatgcagattttcttcctcctttgccaccctgaagacagcaacactaacttctcctcttcctcttcctcctcagcccactcaacatgaagatactcagataaggacctcacagcaacaggagctacttgacagggtgccacggtaccaactttttcatccttggatgcaatttcagaacggtattccatcaaaaggagcagcaggattctattagaacatctcttatctgcctgtcttccccaggtaccatagatttctgtgtctctggctctgcttcctaccttcagcttcttgttctccggcatcccttcaattctgtgagccccctctttcgcttcatgtaatctcctcgctgcttttgttgtaaaatgatagatttctgttgcttgcaaccaagaactctctgcctggtactccgttccctacgacaaccctcattctgcttctttccatttgcaatggctgattcattcttgtcttttagcttaactcacttccttatataaggctttaaacatgccgttcattaagtatgtcacccctacctcccctccagtaattctctaactgaacaaggtt

SEQ ID NO: 12803 - DNA, 12042 bp, Homo sapiens
  SIMILAR (1)..(3093): 981254mologous to Homo sapiens unknown,accession number AF149422,Smith-Waterman Score=5291.
ctgcttcacttcacggggcgaacatggcgcacagctgtcggtggcgcttccccgcccgacccgggaccaccgggggcggcggcggcggggggcgccggggcctagggggcggcccgcggcaacgcgtcccggccctgctgcttccccccgggcccccggtcggcggtggcggccccggggcgcccccctcccccccggctgtggcggccgcggcggcggcggcgggaagcagcggggctggggttccagggggagcggccgccgcctcagcagcctcctcgtcgtccgcctcgtcttcgtcttcgtcatcgtcctcagcctcttcagggccggccctgctccgggtgggcccgggcttcgacgcggcgctgcaggtctcggccgccatcggcaccaacctgcgccggttccgggccgtgtttggggagagcggcgggggaggcggcagcggagagctaacaacacagatcccatgtagttggagaaccaaaggccacatacatgacaaaaagactgaaccgttcaggttacttgcatggagttggtgcttaaatgatgagcaattcttaggttttggctcagatgaagaagtcagagtgcgaagtcccacaaggtctccttcagttaaaactagtcctcgaaaacctcgtgggagacctagaagtggctctgaccgaaattcagctatcctctcagatccatctgtgttttcccctctaaataaatcagagaccaaatctggagataagatcaagaagaaagattctaaaagtatagaaaagaagagaggaagacctcccaccttccctggagtaaaaatcaaaataacacatggaaaggacatttcagagttaccaaagggaaacaaagaagatagcctgaaaaaaattaaaaggacaccttctgctacgtttcagcaagccacaaagattaaaaaattaagagcaggtaaactctctcctctcaagtctaagtttaagacagggaagcttcaaataggaaggaagggggtacaaattgtacgacggagaggaaggcctccatcaacagaaaggataaagaccccttcgggtctcctcattaattctgaactggaaaagccccagaaagtccggaaagacaaggaaggaacacctccacttacaaaagaagataagacagttgtcagacaaagccctcgaaggattaagccagttaggattattccttcttcaaaaaggacagatgcaaccattgctaagcaactcttacagagggcaaaaaaagggggctcaaaagaaaattgaaaaagaagcagctcagctgcagggaagaaaggtgaagacacaggtcaaaaatattcgacagttcatcatgcctgttgtcagtgctatctcctcgcggatcattaagacccctcggcggtttatagaggatgaggattatgaccctccaattaaaattgcccgattagagtctacaccgaatagtagattcagtgccccgtcctgtggatcttctgaaaaatcaagtgcagcttctcagcactcctctcaaatgtcttcagactcctctcgatctagtagccccagtgttgatacctccacagactctcaggcttctgaggagattcaggtacttcctgaggagcggagcgatacccctgaagttcatcctccactgcccatttcccagtccccagaaaatgagagtaatgataggagaagcagaaggtattcagtgtcggagagaagttttggatctagaacgacgaaaaaattatcaactctacaaagtgccccccagcagcagacctcctcgtctccacctccacctctgctgactccaccgccaccactgcagccagcctccagtatctctgaccacacaccttggcttatgcctccaacaatccccttagcatcaccatttttgcctgcttccactgctcctatgcaagggaagcgaaaatctattttgcgagaaccgacatttaggtggacttctttaaagcattctaggtcagagccacaatacttttcctcagcaaagtatgccaaagaaggtcttattcgcaaaccaatatttgataatttccgaccccctccactaactcccgaggacgttggctttgcatctggtttttctgcatctggtaccgctgcttcagcccgattgttttcgccactccattctggaacaaggtttgatatgcacaaaaggagccctcttctgagagctccaagatttactccaagtgaggctcactctagaatatttgagtctgtaaccttgcctagtaatcgaacttctgctggaacatcttcttcaggagtatccaatagaaaaaggaaaagaaaagtgtttagtcctattcgatctgaaccaagatctccttctcactccatgaggacaagaagtggaaggcttagtagttctgagctctcacctctcacccccccgtcttctgtctcttcctcgttaagcatttctgttagtcctcttgccactagtgccttaaacccaacttttacttttccttctcattccctgactcagtctggggaatctgcagagaaaaatcagagaccaaggaagcagactagtgctccggcagagccattttcatcaagtagtcctactcctctcttcccttggtttaccccaggctctcagactgaaagagggagaaataaagacaaggcccccgaggagctgtccaaagatcgagatgctgacaagagcgtggagaaggacaagagtagagagagagaccgggagagagaaaaggagaataagcgggagtcaaggaaagagaaaaggaaaaagggatcagaaattcagagtagttctgctttgtatcctgtgggtagggtttccaaagagaaggttgttggtgaagatgttgccacttcatcttctgccaaaaaagcaacagggcggaagaagtcttcatcacatgattctgggactgatattacttctgtgactcttggggatacaacagctgtcaaaaccaaaatacttataaagaaagggagaggaaatctggaaaaaaccaacttggacctcggcccaactgccccatccctggagaaggagaaaaccctctgcctttccactccttcatctagcactgttaaacattccacttcctccataggctccatgttggctcaggcagacaagcttccaatgactgacaagagggttgccagcctcctaaaaaaggccaaagctcagctctgcaagattgagaagagtaagagtcttaaacaaaccgaccagcccaaagcacagggtcaagaaagtgactcatcagagacctctgtgcgaggaccccggattaaacatgtctgcagaagagcagctgttgcccttggccgaaaacgagctgtgtttcctgatgacatgcccaccctgagtgccttaccatgggaagaacgagaaaagattttgtcttccatggggaatgatgacaagtcatcaattgctggctcagaagatgctgaacctcttgctccacccatcaaaccaattaaacctgtcactagaaacaaggcaccccaggaacctccagtaaagaaaggacgtcgatcgaggcggtgtgggcagtgtcccggctgccaggtgcctgaggactgtggtgtttgtactaattgcttagataagcccaagtttggtggtcgcaatataaagaagcagtgctgcaagatgagaaaatgtcagaatctacaatggatgccttccaaagcctacctgcagaagcaagctaaagctgtgaaaaagaaagagaaaaagtctaagaccagtgaaaagaaagacagcaaagagagcagtgttgtgaagaacgtggtggactctagtcagaaacctaccccatcagcaagagaggatcctgccccaaagaaaagcagtagtgagcctcctccacgaaagcccgtcgaggaaaagagtgaagaagggaatgtctcggcccctgggcctgaatccaaacaggccaccactccagcttccaggaagtcaagcaagcaggtctcccagccagcactggtcatcccgcctcagccacctactacaggaccgccaagaaaagaagttcccaaaaccactcctagtgagcccaagaaaaagcagcctccaccaccagaatcaggtccagagcagagcaaacagaaaaaagtggctccccgcccaagtatccctgtaaaacaaaaaccaaaagaaaaggaaaaaccacctccggtcaataagcaggagaatgcaggcactttgaacatcctcagcactctctccaatggcaatagttctaagcaaaaaattccagcagatggagtccacaggatcagagtggactttaaggaggattgtgaagcagaaaatgtgtgggagatgggaggcttaggaatcttgacttctgttcctataacacccagggtggtttgctttctctgtgccagtagtgggcatgtagagtttgtgtattgccaagtctgttgtgagcccttccacaagttttgtttagaggagaacgagcgccctctggaggaccagctggaaaattggtgttgtcgtcgttgcaaattctgtcacgtttgtggaaggcaacatcaggctacaaagcagctgctggagtgtaataagtgccgaaacagctatcaccctgagtgcctgggaccaaactaccccaccaaacccacaaagaagaagaaagtctggatctgtaccaagtgtgttcgctgtaagagctgtggatccacaactccaggcaaagggtgggatgcacagtggtctcatgatttctcactgtgtcatgattgcgccaagctctttgctaaaggaaacttctgccctctctgtgacaaatgttatgatgatgatgactatgagagtaagatgatgcaatgtggaaagtgtgatcgctgggtccattccaaatgtgagaatctttcaggtacagaagatgagatgtatgagattctatctaatctgccagaaagtgtggcctacacttgtgtgaactgtactgagcggcaccctgcagagtggcgactggcccttgaaaaagagctgcagatttctctgaagcaagttctgacagctttgttgaattctcggactaccagccatttgctacgctaccggcaggctgccaagcctccagacttaaatcccgagacagaggagagtataccttcccgcagctcccccgaaggacctgatccaccagttcttactgaggtcagcaaacaggatgatcagcagcctttagatctagaaggagtcaagaggaagatggaccaagggaattacacatctgtgttggagttcagtgatgatattgtgaagatcattcaagcagccattaattcagatggaggacagccagaaattaaaaaagccaacagcatggtcaagtccttcttcattcggcaaatggaacgtgtttttccatggttcagtgtcaaaaagtccaggttttgggagccaaataaagtatcaagcaacagtgggatgttaccaaacgcagtgcttccaccttcacttgaccataattatgctcagtggcaggagcgagaggaaaacagccacactgagcagcctcctttaatgaagaaaatcattccagctcccaaacccaaaggtcctggagaaccagactcaccaactcctctgcatcctcctacaccaccaattttgagtactgataggagtcgagaagacagtccagagctgaacccacccccaggcatagaagacaatagacagtgtgcgttatgtttgacttatggtgatgacagtgctaatgatgctggtcgtttactatatattggccaaaatgagtggacacatgtaaattgtgctttgtggtcagcggaagtgtttgaagatgatgacggatcactaaagaatgtgcatatggctgtgatcaggggcaagcagctgagatgtgaattctgccaaaagccaggagccaccgtgggttgctgtctcacatcctgcaccagcaactatcacttcatgtgttcccgagccaagaactgtgtctttctggatgataaaaaagtatattgccaacgacatcgggatttgatcaaaggcgaagtggttcctgagaatggatttgaagttttcagaagagtgtttgtggactttgaaggaatcagcttgagaaggaagtttctcaatggcttggaaccagaaaatatccacatgatgattgggtctatgacaatcgactgcttaggaattctaaatgatctctccgactgtgaagataagctctttcctattggatatcagtgttccagggtatactggagcaccacagatgctcgcaagcgctgtgtatatacatgcaagatagtggagtgccgtcctccagtcgtagagccggatatcaacagcactgttgaacatgatgaaaacaggaccattgcccatagtccaacatcttttacagaaagttcatcaaaagagagtcaaaacacagctgaaattataagtcctccatcaccagaccgacctcctcattcacaaacctctggctcctgttattatcatgtcatctcaaaggtccccaggattcgaacacccagttattctccaacacagagatcccctggctgtcgaccgttgccttctgcaggaagtcctaccccaaccactcatgaaatagtcacagtaggtgatcctttactctcctctggacttcgaagcattggctccaggcgtcacagtacctcttccttatcaccccagcggtccaaactccggataatgtctccaatgagaactgggaatacttactctaggaataatgtttcctcagtctccaccaccgggaccgctactgatcttgaatcaagtgccaaagtagttgatcatgtcttagggccactgaattcaagtactagtttagggcaaaacacttccacctcttcaaatttgcaaaggacagtggttactgtaggcaataaaaacagtcacttggatggatcttcatcttcagaaatgaagcagtccagtgcttcagacttggtgtccaagagctcctctttaaagggagagaagaccaaagtgctgagttccaagagctcagagggatctgcacataatgtggcttaccctggaattcctaaactggccccacaggttcataacacaacatctagagaactgaatgttagtaaaatcggctcctttgctgaaccctcttcagtgtcgttttcttctaaagaggccctctccttcccacacctccatttgagagggcaaaggaatgatcgagaccaacacacagattctacccaatcagcaaactcctctccagatgaagatactgaagtcaaaaccttgaagctatctggaatgagcaacagatcatccattatcaacgaacatatgggatctagttccagagataggagacagaaagggaaaaaatcctgtaaagaaactttcaaagaaaagcattccagtaaatcttttttggaacctggtcaggtgacaactggtgaggaaggaaacttgaagccagagtttatggatgaggttttgactcctgagtatatgggccaacgaccatgtaacaatgtttcttctgataagattggtgataaaggcctttctatgccaggagtccccaaagctccacccatgcaagtagaaggatctgccaaggaattacaggcaccacggaaacgcacagtcaaagtgacactgacacctctaaaaatggaaaatgagagtcaatccaaaaatgccctgaaagaaagtagtcctgcttcccctttgcaaatagagtcaacatctcccacagaaccaatttcagcctctgaaaatccaggagatggtccagtggcccaaccaagccccaataatacctcatgccaggattctcaaagtaacaactatcagaatcttccagtacaggacagaaacctaatgcttccagatggccccaaacctcaggaggatggctcttttaaaaggaggtatccccgtcgcagtgcccgtgcacgttctaacatgttttttgggcttaccccactctatggagtaagatcctatggtgaagaagacattccattctacagcagctcaactgggaagaagcgaggcaagagatcagctgaaggacaggtggatggggccgatgacttaagcacttcagatgaagacgacttatactattacaacttcactagaacagtgatttcttcaggtggagaggaacgactggcatcccataatttatttcgggaggaggaacagtgtgatcttccaaaaatctcacagttggatggtgttgatgatgggacagagagtgatactagtgtcacagccacaacaaggaaaagcagccagattccaaaaagaaatggtaaagaaaatggaacagagaacttaaagattgatagacctgaagatgctggggagaaagaacatgtcactaagagttctgttggccacaaaaatgagccaaagatggataactgccattctgtaagcagagttaaaacacagggacaagattccttggaagctcagctcagctcattggagtcaagccgcagagtccacacaagtaccccctccgacaaaaatttactggacacctataatactgagctcctgaaatcagattcagacaataacaacagtgatgactgtgggaatatcctgccttcagacattatggactttgtactaaagaatactccatccatgcaggctttgggtgagagcccagagtcatcttcatcagaactcctgaatcttggtgaaggattgggtcttgacagtaatcgtgaaaaagacatgggtctttttgaagtattttctcagcagctgcctacaacagaacctgtggatagtagtgtctcttcctctatctcagcagaggaacagtttgagttgcctctagagctaccatctgatctgtctgtcttgaccacccggagtcccactgtccccagccagaatcccagtagactagctgttatctcagactcaggggagaagagagtaaccatcacagaaaaatctgtagcctcctctgaaagtgacccagcactgctgagcccaggagtagatccaactcctgaaggccacatgactcctgatcattttatccaaggacacatggatgcagaccacatctctagccctccttgtggttcagtagagcaaggtcatggcaacaatcaggatttaactaggaacagtagcacccctggccttcaggtacctgtttccccaactgttcccatccagaaccagaagtatgtgcccaattctactgatagtcctggcccgtctcagatttccaatgcagctgtccagaccactccaccccacctgaagccagccactgagaaactcatagttgttaaccagaacatgcagccactttatgttctccaaactcttccaaatggagtgacccaaaaaatccaattgacctcttctgttagttctacacccagtgtgatggagacaaatacttcagtattgggacccatgggaggtggtctcacccttaccacaggactaaatccaagcttgccaacttctcaatctttgttcccttctgctagcaaaggattgctacccatgtctcatcaccagcacttacattccttccctgcagctactcaaagtagtttcccaccaaacatcagcaatcctccttcaggcctgcttattggggttcagcctcctccggatccccaacttttggtttcagaatccagccagaggacagacctcagtaccacagtagccactccatcctctggactcaagaaaagacccatatctcgtctacagacccgaaagaataaaaaacttgctccctctagtaccccttcaaacattgccccttctgatgtggtttctaatatgacattgattaacttcacaccctcccagcttcctaatcatccaagtctgttagatttggggtcacttaatacttcatctcaccgaactgtccccaacatcataaaaagatctaaatctagcatcatgtattttgaaccggcacccctgttaccacagagtgtgggaggaactgctgccacagcggcaggcacatcaacaataagccaggatactagccacctcacatcagggtctgtgtctggcttggcatccagttcctctgtcttgaatgttgtatccatgcaaactaccacaacccctacaagtagtgcgtcagttccaggacacgtcaccttaaccaacccaaggttgcttggtaccccagatattggctcaataagcaatcttttaatcaaagctagccagcagagcctggggattcaggaccagcctgtggctttaccgccaagttcaggaatgtttccacaactggggacatcacagaccccctctactgctgcaataacagcggcatctagcatctgtgtgctcccctccactcagactacgggcataacagccgcttcaccttctggggaagcagacgaacactatcagcttcagcatgtgaaccagctccttgccagcaaaactgggattcattcttcccagcgtgatcttgattctgcttcagggccccaggtatccaactttacccagacggtagacgctcctaatagcatgggactggagcagaacaaggctttatcctcagctgtgcaagccagccccacctctcctgggggttctccatcctctccatcttctggacagcggtcagcaagcccttcagtgccgggtcccactaaacccaaaccaaaaaccaaacggtttcagctgcctctagacaaagggaatggcaagaagcacaaagtttcccatttgcggaccagttcttctgaagcacacattccagaccaagaaacgacatccctgacctcaggcacagggactccaggagcagaggctgagcagcaggatacagctagcgtggagcagtcctcccagaaggagtgtgggcaacctgcagggcaagtcgctgttcttccggaagttcaggtgacccaaaatccagcaaatgaacaagaaagtgcagaacctaaaacagtggaagaagaggaaagtaatttcagctccccactgatgctttggcttcagcaagaacaaaagcggaaggaaagcattactgagaaaaaacccaagaaaggacttgtttttgaaatttccagtgatgatggctttcagatctgtgcagaaagtattgaagatgcctggaagtcattgacagataaagtccaggaagctcgatcaaatgcccgcctaaagcagctctcatttgcaggtgttaacggtttggggatgctggggattctccatgatgcagttgtgttcctcattgagcagctgtctggtgccaagcactgtcgaaattacaaattccgtttccacaagccagaggaggccaatgaaccccccttggaccctcacggctcagccagggctgaagtccacctcaggaagtcagcatttgacatgtttaacttcctggcttctaaacatcgtcagcctcctgaatacaaccccaatgatgaagaagaggaggaggtacagctgaagtcagctcggagggcaactagcatgggtctgccaatgcccatgcgcttccggcacttaaaaaagacttctaaggaggcagttggtgtctacaggtctcccatccatggccggggtcttttctgtaagagaaacattgatgcaggtgagatggtgattgagtatgccggcaacgtcatccgctccatccagactgacaagcgggaaaagtattacgacagcaagggcattggttgctatatgttccgaattgatgactcagaggtagtggatgccaccatgcatggaaatgctgcacgcttcatcaatcactcgtgtgagcctaactgctattctcgggtcatcaatattgatgggcagaagcacattgtcatctttgccatgcgtaagatctaccgaggagaggaactcacttacgactataagttccccattgaggatgccagcaacaagctgccctgcaactgtggcgccaagaaatgccggaagttcctaaactaa

SEQ ID NO: 12804 - DNA, 1197 bp, Homo sapiens
  SIMILAR (1)..(3249): 981254mologous to Homo sapiens unknown,accession number AF148856,Smith-Waterman Score=5590.
atgtttgtgtattgccaagtctgttgtgagcccttccacaagttttgtttagaggagaacgagcgccctctggaggaccagctggaaaattggtgttgtcgtcgttgcaaattctgtcacgtttgtggaaggcaacatcaggctacaaagaattctgcagagtccccacaagcaaaaagaccctcaccagatgtacccctcaaccgtgtacttcccggcccccagaattctaagcgaattaacgcaggaacaaaaaaccaaacagtgcatgttcttacttgtaagtgggagctaaaaaggccaggcacacaacatatgaaagtaaaaagcctagaagatgcagaaaagaatcccaaagccattgacacgtggattgagagcatctctgaattacaccgttctaagccccctgcgactgtgcactacaccaggcccatgcccgacattgacacgctgatgcaggaatggtccccggagtttgaagagcttttgggcaaggtaagcctgcccacggcagagattgattgcagcctggcagagtacattgacatgatctgtgccattctagacatccctgtctacaagagtcggatccagtccctccatctgctcttttccctctactcagaattcaagaactcaacagcatttttaaaagctctcgctgaaggccaagaaagcattcactccttcatcccaattccaccctcccaagctggagacatgggagacattaacctttcaagctggggacaacttcccaaagctgctgtttccaaaggctgcagctggccccctctgcccccagcctgagatggacagatcgttgtccagcctacttgatgtcccttgccccatgcccacagcttggcctcaggggcagtgccatgtccctgcctgccctctctgccagagggcacagaacatgtttgttttaatgaacctgccctgccctcagattgctgtcccccggggagttaatgcaatctacaccactgtggggatttgagttatacagaattggaatttctgagatcccatggaggttagattgggaggtaaagcttaaaagatgtcctttttgtgagagggatggaattcgttttctttcattcggtaaagttagtgagtaaagattttataaatcaaatgctctattatattgtcagattattctgctatttaatatgaaagaga

SEQ ID NO: 12805 - DNA, 534 bp, Homo sapiens
  SIMILAR (3)..(95): 961254mologous to Homo sapiens TNF intracellular domain- interacting protein,accession number AF168676,Smith-Waterman Score= 158.
gggtgctgcaggaggtcagggagctgagagacctgtacagacagatggacctgcagaccccggactcccacctcagacagaccaccccgcacaatattaaagccatgacagcaaacagcccctttctcctaaggttcctgatttgaagtggcaaaacaaggcagtggcatagtctcctgtcctatgtccttggcatgcaggtgcttctaagaagcctgggcgagcatccttgctatgagaccatgaaaccacatggctctgtcccagcatccaagcctccagtcagacacagctggagcagcacacaagcaagaccagagaccagccgctcggccagcccccagaagtttggcttcaggtcacatgttgctctggagaaccaagaagggtgagcagacaccaatcatgaccccaaacagcaagaggacagaagatgaggaaatagatgtgagaattgagacctgcccaatgtcaaacaaccaaggagcagagctggaacgggaaactgacttatcccttatctccctacagcag

SEQ ID NO: 12806 - DNA, 1329 bp, Homo sapiens
  SIMILAR (1)..(1185): 871254mologous to Homo sapiens TNF intracellular domain- interacting protein,accession number AF168676,Smith-Waterman Score= 1715.
ggacctcaggatggaaaccagcagcctgcaccgcccgagaaggtcggctgggtccggaaattctgcgggaaagggattttcagggagatttggaaaaaccgctatgtggtgctgaaaggggaccagctctacatctctgagaaggaggtaaaagatgagaaaaatattcaagaggtatttgacctgagtgactatgagaagtgtgaagagctccggaagtccaagagcaggagcaagaaaaatcatagcaagtttactcttgcccactccaaacagcccggtaacacggcacccaacctgatcttcctggcagtgagtccagaagagaaggaatcgtggatcaatgccctcaactctgccatcacccgagccaagaaccgtatcttggatgaggtcaccgttgaggaggacagctatcttgcccatcccactcgagacagggcaaaaatccagcactcccgccgccccccaacaaggggacacctaatggctgtggcttccacctctacctcggatgggatgctgaccttggacttgatccaagaggaagacccttcccctgaggaaccaacctcttgtgctgagagctttcgggttgacctggacaagtctgtggcccagctggcagggagccggcggagagcggactcagaccgcatccagccctccgcagaccgggcaagcagtctctcccgaccttgggaaaaaacagacaaaggggccacctacaccccccaggcacccaagaagttgacgcccacagagaaaggccgctgcgcctccctggaggagatcctatctcagcgttatgctgcctctgcccacaccctccagctgcgggctgaggaacccccaacccctgccctccccaacccggggcagctgtcccggatccagggacctggtagcaaggaaactggaggagactcaggagcttctggcagaggttcagggactgggagatgggaagcgaaaggccaaggaccccccctcggttctccgccggattctgagtcaagagcagctgctgcttggagacggaacgggctgctgggagaggcatcatcgaattggagccaggcaaagagggtcctgcagcaggtcagggagctgagagacctgtacagacaagatggacctgcagaccccggacttcccaccttcagacagaccaccccgcacagttcagttaccggaagagcctgatgtgagggcagggtggggtctggaacttgtcgggttggacagactcttatctccgtgttgctggataaagcttttttatttaccctcaatcaaaaaaagaaaacaaaaatgaactcataaaaa

SEQ ID NO: 12807 - DNA, 1044 bp, Homo sapiens
  SIMILAR (1)..(3045): 981254mologous to Homo sapiens unknown,accession number AF148856,Smith-Waterman Score=5206.
atgtatgaagggctggaaccaccagggctgtctagagactaccagcgagatgcagagccaacaacttgcatttccaagctattaggagaaaatatcagaagggatgaattctggaaagtacaaattaaagccaggtcaggggagactgagcagaatcctaggtctacggcttttgcttttggggaattacctctggcgaacagagaagaattaaaccttttgctaaacaaaggcattctccctttgtgtgaccagagacaggagatagaatctgaatgtgcttttaccatcttctgtgctggagatgccaactgttttcccccgtccccaacacacctgcccctcacagcccttcagcagaggccctgcggccttagtggctctgcctccaaggaagcctggggcaattcccttgtatgtggcccaaggggggataccctacccatggcgatcgcaaagccccatagatcggcctcaaagcacagcacactacaccagtacccaacgcctcctaggagcctatgccaccaacatagggatgagcaacccacaaaccacctccagaccctaaatactattcctgcatggattcatactaagtgggttccaggtttagaccacattaataaaccctggaggtcctgctcctcttctcagtctgcctacctcttctatcactggcttcactactttctaccacccaaacttaaaacctctaaggacctgtccatcttaagtgcaggcctggccatgtcggcaccccatttgatcttccgtgtttccgctatcacctccaacagcagctgtaaacccagcagcacatcaaaagcatgtgaggagcttttcaaagaacaccaatgtctaggcagcacagacattccgattcacatccagggtggggccccattttctgctgtatcccctcagcggctggttctgagaggcagccaagacggatcccatatggttcggcccagactgcccttccccgactctgccggcttggcaaacttccacttgttttcaaaactcttcttagactga

SEQ ID NO: 12808 - DNA, 609 bp, Homo sapiens
  SIMILAR (355)..(597): 351254mologous to Homo sapiens Similar to SH3 and PX domain- containing protein SH3PX1,accession number BC001084,Smith-Waterman Score=156.
atgccaagccaagaagccgtgggtgcagagcctcatcgcagtgggagctggcctgtcgggaccagcatgggctctggagggccactgctgttggaggtgatagcggaaacacggaagatcaaatggggtgccgacatggccaggcctgcacttaagatggacagaaatttaaactgcgagttcctggaagcatccttcactggtgcaccctggctccctgaggcagggcttttggaagttactcctgttggttgggcagagatgaggaggctcttagagtactccaggggaagagttggctttggaaaggaacaggtgaactcgagacacctgccaggtatcatggcaggacctggagctcttaccaaagtcaaggagagtaggcgacacgtggaggaagggaagatggaggtgcagaaggctgacggcattcaggatcgctgtaacactatttcttttgccactttggctgaaattcaccacttccatcaaattcgagtgagagactttaaatcacagatgcagcatttcttacaacaacaaataatatttttccaaaaagttacccagaagttggaagaagctcttcacaaatatgatagtgtttaa

SEQ ID NO: 12809 - DNA, 350 bp, Homo sapiens
  SIMILAR (291)..(229): 401254mologous to Homo sapiens Human HUPF-I mutant protein fragment 49,accession number Y21401,Smith-Waterman Score=50.
gtaattcttagaggccgggctcacagtcgaaagaggaaaggaaagtgcccatcggagtcgtcggagcccacagtattaatgcccacgaaaggagaagaaactttttcccgggaacctgctgattatacaaaagacaaagacatttctatgtcaggtcttgttcccttatctgagtgagctggaggtttgtgcaagtttttatctaagtgggctggaggttctcggatctgtgcagccgcgggcttgtctccaggcacaccaccaccctgtgctacttcccttatcggtgcctgcagcttgatttttatccccaggctgctttctctgttctgtggggatgaggcactgac

SEQ ID NO: 12810 - DNA, 479 bp, Homo sapiens
  SIMILAR (151)..(59): 481254mologous to Homo sapiens Human secreted protein, SEQ ID NO: 6874,accession number G02793,Smith-Waterman Score=72.
ttatgagcttggagaatgagtgcaaggttttactgagtggaagtagctctcagcagattggggagtcagaagggagatggttttcccctggagtcggaccgctaggtggactgggctctcctctggctgccctagccaaatgtcgttctgctggtgggtggcctgctggtgtgctggtgcctcctgatgtgcttctcgccatgtccagccacctgtgtgtctgcctgctggggtcagctcagacaccctctcctgccaggggctgagcccacagtcaggtggccacaggatccacacctgcgtgcaagccaggagtggcccagtgggccagttgtgcagggcacctcctttagcacgggacgctgctttggggggatcgccctcgacacagcgcccctcccggcacctggccagaacctcccagggcgaaggtcggggccgagaagcttgtgagtaccggggcagtgagggagggatcc

SEQ ID NO: 12811 - DNA, 1212 bp, Homo sapiens; identical to SEQ ID NO: 3262
  SIMILAR (1105)..(3684): 951254mologous to Homo sapiens putative p150,accession number U93563,Smith-Waterman Score=4225.

SEQ ID NO: 12812 - DNA, 441 bp, Homo sapiens
  SIMILAR (219)..(353): 371254mologous to Hepatitis D virus delta-antigen,accession number M55042,Smith-Waterman Score=59.
aattcggcacgaggtggactgagacctacaggacacagcgactcttaaataggtggctcaccaggagaaaggcatagcagaacctggactgagacctacgggagacagcaggcagacacacaggaggttggacgtcgagaggagcacatcagtgcaagaacacatgggtggctgccacttctctccctttcctgagagggaaaaactctcgacgctgagaggaatccaccaacaggcaccagcactctggcaggccaccgaccaatggattgacatagagtttggctggggcagccagaggagagcctgggccgctgaataacccgacttcaggggaaaactattctcccttttggctcccccatctgctgagagctacttccactcaataaaaccttgcactcattctcaaaaaaaaaaaaaaaaaaaaagtcgtatcga

SEQ ID NO: 12813 - DNA, 348 bp, Homo sapiens
  SIMILAR (133)..(345): 691254mologous to Homo sapiens envelope protein,accession number AF072508,Smith-Waterman Score=222.
atggaggtcctgatgcagccaaaagtaaccaagtggaggaggcaggagaagttcctcaaaagagtggggctggtattaccagaggaagaggaggagagaggaggggccaacagaaccacaaaggtctactgtctcctcagtttccagttaggaaaaatcgaagctgtaaacctaaaaattgttcttcaaatggagccccagatgcaatccatggctaagatctaccgcagacctctggactggcctgctagcccatgcttcgatgttaatgacattgaaggcacccctcttgaagaaatctcaactgcacaacccctagtatgccccaattcagcaggaagcagttag

SEQ ID NO: 12814 - DNA, 451 bp, Homo sapiens
  SIMILAR (8)..(280): 891254mologous to Homo sapiens gag,accession number AF156961,Smith-Waterman Score=432.
acaattccccacaggccagcaggcagttcccagtgtagaccctcattgggacacagaatcagaacatggaaattggtgccgcagacatttgctaacttgtgtgctaggactaaggaaaactaggaagaagcctatgaattatgcaatgatgtccactataacacagggaaaggaagaaaatcctactgcctttctggtgagactaagggaggcattgaggaagcatacctctctgtcacctgactctattgaaggccaactaatcaggcaagcggactttggagtctctggaaaagggaaaagctgggcaaatcgaatgcctaatatggcttgcttccagtgtggtctacaaggacactttaaaaaagattgtccaagtagaagtaagctgccccctcgtccatgccccttatgtcaagggaatcactggaaggcccattgccccagggga

SEQ ID NO: 12815 - DNA, 286 bp, Homo sapiens; identical to SEQ ID NO: 11981
  SIMILAR (83)..(286): 891254mologous to multiple sclerosis associated retrovirus element gag polyprotein,accession number AF123881,Smith-Waterman Score=321.

SEQ ID NO: 12816 - DNA, 1264 bp, Homo sapiens; identical to SEQ ID NO: 9503
  SIMILAR (1)..(2973): 951254mologous to Homo sapiens putative p150,accession number U93563,Smith-Waterman Score=4940.

SEQ ID NO: 12817 - DNA, 759 bp, Homo sapiens; identical to SEQ ID NO: 12322
  SIMILAR (121)..(528): 851254mologous to Homo sapiens gag,accession number AF156961,Smith-Waterman Score=625.

SEQ ID NO: 12818 - DNA, 1281 bp, Homo sapiens; identical to SEQ ID NO: 8522
  SIMILAR (1)..(1011): 991254mologous to Homo sapiens G protein coupled receptor OGR1,accession number U48405,Smith-Waterman Score=1775.

SEQ ID NO: 12819 - DNA, 405 bp, Homo sapiens
  SIMILAR (99)..(260): 751254mologous to Rattus norvegicus ribosomal protein S26,accession number X02414,Smith-Waterman Score=201.
gaatgggggaccccacgagggccatagtttcatcccctcagaatggcaggccaccgaagaaggaaaaatacttttgcctgcagctaaccaatagaaattacttaaaacccttcaccaaaccttcgacttaaccattgatagcacccatcagatggccaaattattatttactggaccaggccttttcaaaactgtcaagcagatagtcaaagcttgtaaagtgtgccaaaggaataatcccctgcactgcaggccatacatttcaatccctgtatctttaacctccttgttaagcttgtctcttccagaatcaaagctgtaaaactacaaatcattcttcaaatggagccccagatgcagtccatgactaagatctaccatgaacccctggaccagcctgctagc

SEQ ID NO: 12820 - DNA, 1081 bp, Homo sapiens
  SIMILAR (440)..(351): 561254mologous to Mus musculus Pro-Pol-dUTPase polyprotein,accession number Y12713,Smith-Waterman Score=103.
tcagatggacagccaggaaagtgggctttccacacagatgatataatacagtacttccaaaggcatgcctatgcggaagtctgatttgttggatgaactaaagtcattcagaccagaatatgcaggtgtctgtagaacggagtaacctccgtgtgcggttgtatgcctgctgtggattgctgctgtgtactgcttatccacaacattttgcgcaccgttatgtggacaaaatacctggttacccaagccgtgccggcacgttaaccgggctgcatccaatgcaagtgtgtcgctgtcgacggtgaccctgttttcccgcctttcttgaccacaaagaaaggggtccgagctgctggattctagtggtcctctaccagcatccccatcattgcctttgtgctcaggggtgagtcctagagctggcctgggttctgcatggccgaagattccattccttggaatccgtgaggccaagaaccccaggtcagagaacacaaggcttgccaccatcttggaagcgggtcaccgccatcttgggacctctgtgagcaaggaccacccggtaacattttggcgaccacgaagggacctccaaagtgacttaaagcaaattaaaatagacctaggtaaattctcagataaccctgatggctatattgatgttttacaagagttagggcaatcctttgatctgacatggagagatataatgttactgctaaatcagacactaaccccaaatgagagaagtgccaccataactgcagcccgagagtttggtgatctctggtatatcagtcaggtagtggcagcagtagcaggcttagtatctgaagcagttaaaataatacagggatcttactgtgtggacatccatgatgtgaatggcatactaactgctaaaggagacttgtggctgtcagacaaccatttacttaaatatcaggctctattacttgaagggccagtgctgcgactgcgcacttgtgcaactcttaacccagccacatttcttccagacaatgaagaaaagatagaacataactgtcaacaagtaattgctcaaacatacgccacttga

SEQ ID NO: 12821 - DNA, 1799 bp, Homo sapiens
  SIMILAR (365)..(658): 441254mologous to Cricetus cricetus ribosomal protein S26,accession number X63389,Smith-Waterman Score=137.
atgaaattgtcagcagactcaataatcaccctaaggggcatcattctggatgccgacattctctatgatggaaagggactgaaagaactcagcctagctctaggactcacccctgagcacaaaggcaatgttgggcacgctggtaaaggaccactagaatccagcagcccggacccctttctttgtgatcaagaaaggtgggaaaacaggtgcaggactgctacatcgatgggaaatgttccccccaaggcaaaaacgcccttaagatgtattctggagaattcgacccagtcagagtgtgtgtacctttttccctctcagatttgaagcaacttaaaatagacctaggtagattctcagataaccctgatggctatattgatgttttacaagggttaggacaatcctttgatctgacatggagagatataatgttactgctagatcagacactaaccccaaatgagagaaatgccaccataactgcagcccgagagtttggtgatctctggtgtctcagtcaggtcaatgataggatgacaacagagcaaagagaacgattccccacaggccagcaggcagttcccagtgtagaccctcgctgggacacagagtcagaacatggagatgggtgccacagacatttgctaacttgcatgttagaaggactaaggaaaactaagaagaagccgatgaattactcaatgatgtccactataacacagggaaaggaaaaaaatcctaatgcctttctggagagactaaggcaggcattgaggaagcatacctctctgtcacctgactctattgaaggccaactaatcttaaaggataagtgtatcactctgtcagctgcagacattagaaaaaacttcaaaaacttagaaaccctattgaacttggcaaccttggtttttcataatagagataaggagaagcaggcagaacaagacaaacgggatttaaaaaaggctaccgctttagttatggccctcaggcaagcagactttggaggctctggaacacggaaaggctgggcaaatccaatgcctaatagggcttgcttccagtgtggtctacaaggacactttaaaaagattgtccaaatacaaataagccaccccctcatccatgccccttatgtcaaaggaatcaatggaaggcccactgccccaggggacaaaggtttccaaaccaaagctcaactctgctcagaacaggctaaatacttagggctaaaattatccaaaggcaccagggccctcagtgaggaacgtatccagcccatactggcttatcctcatcccaaaaccctaaagcaactaagagggttctttggcataccaggcttctgccgaatatggattcccagaatcaaagctgtaaaactacacatcgttcttcaaatggatccccagaggcagtccatgactaagatctaccatggacccctggactggcctgctagcccatgctctgatgttaatgacaccaaaggcaaccctcctgaggaaatctcaactgcaccacccctactatgccccaattcagcaggaagcagttggagcggggataacacagaaagaaggcctttaccagatgcaggccccttgaccttggacttcctaggctccaaacctagagtacaaaacaacagtgatgccagcagagaaaaacacagccatgaaacaaaacacccagaccagagacacagaactgcttcatatagccattttcaggcaaagcagggagccagtgttttgccatgcatattagagaaaagggaagcctcctactga

SEQ ID NO: 12822 - DNA, 1729 bp, Homo sapiens
  SIMILAR (263)..(1009): 851254mologous to multiple sclerosis associated retrovirus polyprotein,accession number AF009668,Smith-Waterman Score=1113.
atgcctcttctccaaatgattgcaacacctctccagcaatctctgatttctacggaggatgagatggatgaattgacagaagtaggctttgaaaggtgggtaataacaaacttcactgaggaacccagcccagctctaggattcacccctgagcacaaaggcaatgttgggcatgctggtaaaggaccactagaatccagcagcccagacccctttctttgtggtcaagaaaggcgggaaaaggggtgcaggactgctacatcggcagtacccccttagacttgaggccaaacagggactcaaaaaaattgttaaggacctaaaagcccaaggcctagtaacaccatgcagtagcccctgcaatactccaactttagcagtacagaaacccaacggacagtggaggttagtgcaagatctcaggattatcaatgaggctgttgtccctctatacccagctgtacctaacccttacattctgctttcccaaataccagaggaagcagagtggtttacagtcctggaccttaaggatgcctttttctgcatccctgtacatcctgactctcaattcttgtttgcctttgaagatccttcaaacccaatgtctcaactcacctggactgttttaccccaagggttcagggatagcctccatctatttggccaggcattagcccaagacttgagccagttctcatacctggacactcttgtccttcagtatatggatgatttacttttagtgacccattcagaaacctggtgccatcaagccacccaagcactcttaaatttccttgctacctgtggctacaaggtttccaaacaaaatgctcagctctgctcacagcaggttaaaaacttagggctaaaattatccaaaggcacaagggccctcagtgaggaacgtatccagcctatactggcttatcctcatcccaaaaccctaaagcaactaagagggttccttggcataacaagcttctgccgaatatggattcccagaatcaaagctgtaaaactacaaatcattcttcaaatggagccccagatgcagtccatgactaagatctaccacggacccctggaccggcctactagcccaagctccaatgttaatgacatcgaaggtactaatgcttcagactttcctttcctatcccaagtattagagcaagttgtatctccaaagggatctaaggaagctcaatgctgcgtcctcaggcctctaggctgtgaatccaacttgaagcaaattaaaatagacctaggtaaattctcagatacccctgatggctatattgatgttttacaagggttaggacaaccctattatctgacatggagagacataatgttactgctagatcagacactaaccccaaatgagagaagtgccgccataactgcagtccgagagtttggtgatctctggtatctcagtcaggtcaatgataggaagataacagaggaaagagaacaattccccacaggccagcaggcagttcccagtgtagaccctcattgggacacagaatcagaacatggagattggtgccacagatatttgctaactgacgtgctagaaggactaaggaaaactaggaagaagcctaataaattagtcaatgatatccactataacacagggaaaggaagaaaatcctactgcctttctggagagactaagagaggcattgaggaagcatacctcactgtcacctga

SEQ ID NO: 12823 - DNA, 645 bp, Homo sapiens
  SIMILAR (362)..(165): 841254mologous to Homo sapiens Human secreted protein encoded by gene No. 12,accession number Y38397,Smith-Waterman Score=283.
caaaagggggactttctggagggtactgaaggtacacagaatgaacaagaggctggagaacaggcttggacaaagggcaggaccaagagaggaattctggccaagggaaggctgcaggcacagtctgatccagggttctctactgtggagcaagaccctgtcttgaaaaaaagaaagagagagagagagaaagaaagaaaagagaaagaagaaaggaagaaagaaagaaagagaaagaaaaaagagaaaaagaaaaagaaagaactaacaagaaagaaagagaggaaggaaggaaagagtggacaggctctaggatctggactggacttggacttagaatctggacttggacaacctaaggaagcaggggaaggttctgatgccccagtcaagtctgactggccgttgggggcaaaaggtgtgactgaagcactgacaaggtgggtggaggcactaacctgtaacacctcctctggcttggaaagttttgcttcatcaactacagctggaacctccgggggcaaggcagaagggccagaacagggaggtcttctactgaggggctgtcatcgatgtcctgagacatttgtggagcttctggtatacacagtgcagacagtttcccctgagaagctgattgtctaa

SEQ ID NO: 12824 - DNA, 401 bp, Homo sapiens
  SIMILAR (366)..(151): 311254mologous to Nicotiana tabacum extensin,accession number L38908,Smith-Waterman Score=98.
  misc_feature (1)...(401): n = a,t,c or g
ttttttttctggatctattgaaacatgtttaaaacggggttggtcacaacaggatgggcacaaatgggagcgggggaggggagtggggccgcaccagcccctgccagtgcctgaggctggcactgacgcgctccttcctccctgtctccgtggctcagaaacaggttaagggtagaggtagatggggagacgcgggggccacacagtctccggtggcagtgagggagcttgggaccctgaggggggcatgctgactccttgctggagaaaaggcacctatataggggagctgggcttgggggcctcccaaggggtcctggggtgaggtggggagggaggctgaacgaancatgaagcagggtggtgggcagaccccaatcctggtttccaaaccctcaccg

SEQ ID NO: 12825 - DNA, 221 bp, Homo sapiens
  SIMILAR (161)..(24): 341254mologous to porcine adenovirus 3 putative 13.1 kDa E3 protein,accession number AF083132,Smith-Waterman Score=76.
tttttttttggatctattgaaacatgtttaaaacggggttggtcacaacaggatgggcacaaatgggagcgggggaggggagtggggccgcaccagcccctgccagtgcctgaggctgcagcctggcgagtgcttttgcttctgcttctccacgctggtggttcgagatgggctgcaggggcatttatgatgcccaacaggtggcactgtcgcgctccttc

SEQ ID NO: 12826 - DNA, 627 bp, Homo sapiens
  SIMILAR (589)..(1098): 301254mologous to Homo sapiens FLJ00029 protein,accession number AK024439,Smith-Waterman Score=207.
tggtggaattcgcagaacccagcgggtgccgcttctccacccgaggcttccacctccaacgagccatgttccaggctgcaggagccgcccaggccaccccctctcatgacgccaaaggcggcggcagcagcacggtgcagcgctccaaggtaggggcctggggccgggtgtgcgggaggaggggtgtgagggagcgggatgagcactggggcagcacctggctgagcttcccgcacagtccttcagcctgcgggcccaggtgaaggagacctgcgccgcctgccagaagaccgtgtaccccatggagcggctggtggccgacaagctcattttccacaactcttgcttctgctgcaagcactgtcacaccaagctcagcctgggcagctacgccgcgctgcacggggagttctactgcaaaccccacttccagcagctgtttaagagcaaaggcaactacgacgaggggtttggccgcaagcagcacaaggagctctgggcccacaaggaggtggaccccggcaccaagacggcctgaggcctctgtaaccttccactcccctcccccgctcccatttgtgcccatcctgttgtgaccaaccccgttttaaacatgtttcaatagat

SEQ ID NO: 12827 - DNA, 1848 bp, Homo sapiens
  SIMILAR (156)..(506): 571254mologous to Homo sapiens sterol regulatory element binding protein 3,accession number AF157325,Smith-Waterman Score= 381.
  misc_feature (1)...(1848): n = a,t,c or g
cctcgggtcgacccacgcgtccggcagctcgcgcccgcgccctcctcgtacccgtgcgcccccggagaccgatcccgccccgcggcccaggccgggcctgaacccagcgggtgccgcttctccacccgaggggtttcacctccaacgagccatgttccaggctgcaggagccgcccaggccaccccctctcataccgccaaaggcggcggtcacgagcacggtgcagcgctccaagtccttcagcctgcgggcccaggtgaaggagacctgcgccgcctgccagaagaccgtgtaccccatggagcggctggtggccgacaagctcattttccacaactcttgcttctgctgcaagcactgtcacaccaagctcagcctgggcagctacgccgcgctgcacggggagttctactgcaaaccccacttccagcagctgtttaagagcaaaggcaactacgacgaggggtttggccgcaagcagcacaaggagctctgggcccacaaggaggtggaccccggcaccaagacggcctgaggcctctgtaaccttccaccccctctgcggaaggcctggagccggcagggggaaggtgggaaggaggtcgagctgggcttgcgtgggggccaggtgggaaggggatgaggcttgctcaggcgtaggggaccagggcagggctctgctccaggactccttccttcttccttctcccgcagccggtgagggtttggaaaccaggattggggtctgcccaccaccctgcttcctgcttcgttcagcctccctccccacctcaccccaggaccccctgggaggcccccaagcccagctcccctatctaggtggctttttttccagcaaagaagtcagcatgccccccttcagggtccaagtccccactccccggaaaaaggaagaaancctttgggtttgggggttgggggccccccacgtctccccatttacctttacccttaacctgtttctgatgccacggagacagggaggaaggagcgcgacagtgccacctgttgggcatcataaatggccctgcaagccccatggggggaaggagatggggaagttgagccaacctgcctctgcagggcaaggcaggggccctcgccagtggggcttgggaccatctcgaaccaccagcgtggagaagcagaagcaaaagcacctcgccaggctgcagcctcaggcactggcaggggctggtgcggccccaactttccctccccgctcccatttgtgcccatccctgttgtgaccaaccccgttttaaacatgtttcaatagatccagattctctattgtgtggcctgctgggggatctgtcacaggaagggtgcagactcaccatggggcgggcatggggggacagggccagccccgactacctcggccctgatgggggcagggagctagaagtgggtgtcagttccctgacacaccattgagaaatgggagggctcctcttcacagcgagggcttcatgctgtcacacccacagtggttttggaactgaaactccacctcacccctcagttctgggttggttcagacccaccaacttaccatatgcaccccattgtgaagaggcctgagagcgggagggccaggctgccagtgggtgatggcgcctgtcctcgctgcacttcagtgcctggggtgcaagctgccgcgttccctggctggttccagctgtctagctccctcccttcttcccagccctttgacctggaagtaagttagcgaagaatggcggtaaccagcagacccagcaagtgctgcccaaggttttagtgacccctggattgcccccctcatcattacccctcgctgg

SEQ ID NO: 12828 - DNA, 1254 bp, Homo sapiens
  SIMILAR (1)..(537): 481254mologous to Homo sapiens dJ336H9.1.2 (transcription factor AP-2 beta (activating enhancer-binding protein 2 beta)) (isoform 2),accession number AL031224,Smith-Waterman Score=298.
atggagcgccccgacgggctgggagcagctgccggcggggcccgcctgtcgtctctgccccaggcggcctacgggccggcgcccccgctctgccacacgccggccgccacagctgccgccgaattccagccgccctacttcccgccgccctacccgcagccaccgctgccctacggtcaggcgcccgacgccgccgcagcctttccccacctggcaggggacccatatggcggcctggcgcccctggcgcagccgcagcctcctcaggccgcctgggccgcgccccgcgcagccgcccgcgcccacgaggagcctcccggcctgctggcaccgcccgcccgcgccctgggccttgacccgcgccgtgactatgccactgccgtgccccggctcctgcacggcctggccgacggcgcgcacggcctggcagacgcacctctcggccttccggggctggcggcggcccccggtctggaggacctgcaggcaatggacgagccgggaatgagcctcctagaccagtccgtgatcaagaaaggggaggccaaggtggaagtggtggtagcagggctggggctggacttccaggagctggggctgagttaccaggagctggggatcctaggggtacgccgaaatcccccaaagcagtccaaagaacacaacgagagtcctaacatcccaggtggcggcgcgctggctccctggagcggggcgggacgcggccgcgcggactcacgtgcacaaccgcgcgggacggggccacgcggactcacgtgcacaaccgcgggaccccagcgccagcgggaccccagcgccagcgggaccccagcgccagcgggaccccagcgccagcgggaccccagcgccagcgggaccccagcgccagcgggaccccagcgccagcgggtctgtggcccagtggagcgagtggagcgctggcgacctgagcggagactgcgccctggacgccccagcctagacgtcaagttacagcccgcgcagcagcagcaaaggggaaggggcaggagccgggcacagttggatccggaggtcgtgacccaggggaaagcgtgggcggtcgacccagggcagctgcggcggcgaggcagaccttcggcctccgccgagtgcggtactggagcctgccccgccagggccctggaatcagagaaagtcgctctttggccacctgaagcgtcggatccctacagtgcctcccagcctgggcgggagcggcggctgcgtcgctga

SEQ ID NO: 12829 - DNA, 505 bp, Homo sapiens
  SIMILAR (182)..(367): 961254mologous to Homo sapiens Human ubiquitin-conjugating enzyme UBC4,accession number W00363,Smith-Waterman Score=343.
  misc_feature (1)...(505): n = a,t,c or g
aagagctcagaaactgaagcacagaaacgttaggtaggagtctgagaggcgtggagaattttgcttgtgcaagattatttcagagcaaggtcgtgcggtgtgtgtagaagatgaacagactagccactttgcattgactggaaacaatggcatttacagaaagagtcaacagcagtggcaacaggaacttagtgatttggcccgtgaccctccagcacaatgttctgcaggtccagttggggatgatatgtttcattggcaagccacaattatgggacctaatgacagcccatatcaaggcggtgtattctttttgacaattcattttcctacagactaccccttcaaaccacctaaggttgcattttacaacaagaatttatcatccaaatattaacagtaatgggcagcatttgtctcgatattctaagatcacagtggtcgcctgcttttaaccaatttcctaaaagttcctnttaanccatttggttcacngacttttttt

SEQ ID NO: 12830 - DNA, 1324 bp, Homo sapiens
  SIMILAR (378)..(845): 511254mologous to Homo sapiens UbcH5C,accession number U39318,Smith-Waterman Score=289.
gtggcactcggccggaactccttggtctacccacgcgcccgggaagttaaacttgtagccaccacctccgctcttcccggtcaccctcgcccccacttcgggccgaaagcacggtacagaggctgttggtggctttgccacgccaccccacccaccccggatcgcggctgtcttaagggacctggattcatcaggggctcttcggggcctgtgcgagtgctgatctgctccgtttttgcaaaaggcgcctgtgtctggcagagctggtgtgagatcgatgacaatcctgccccgccgccgggataatcaagagttttggccggacctttgagcatacaccgagagaagtgaggaagccagacgacaagcacacactattggcgctgaaacggattaataaggaccttagtgatttggcccgtgaccctccagcacaatgttcttgcaggtccagtttggggatgatatgtttcattggcaagccacaattatggggacctaatgacagcccatatcaaggcggtgtattctttttgacaattcatttttcctacaagactaccccttcaaaccaccttaaggtttgcattttacaacaagattttattcatcccaaatattaacagtaaatgggcagcattttgtcttcgatattcctaagattcacagtgggtcgcctgctttaacattttctaaagttcttttatccattttgttcactgctattgtgatccaaacccaggatggaccccctagtgccaggggattggcacgggtcttattaaaacaggacaggagataagtacaacagaatatctcgggaatggactcagaagtatgccatgtgatgctaccttaaagtcagaataacctgcattataggctggggataaacttttaaattactgttccttttttgattttcttaatccggctgctcccctatcaggacctcatcttttttaattttattttttgtttacctccctccattcattcacatggctcatctgaggaagacttaaggttctttcccagctttggggacaataactggttttttgggaaactgttaaagtaggttacaagaggaacagttgcccaaggactcaggaattttttaaaaaaaaaaatgggggcatgtgtattatgtggccaatggtcttcactctaacttgggttatgagactaaaacccattcctcactgctctaacatgctgaagaaatcactgaggggggagggagatggatgctcagttgtcacatcaaagggatacagcattattctagcagcatccattctggtttaagccttccactggt

SEQ ID NO: 12831 - DNA, 397 bp, Homo sapiens
  SIMILAR (187)..(387): 351254mologous to Human endogenous retrovirus K pol protein,accession number Y17833,Smith-Waterman Score=90.
atggggctcaaatccaggtcgaagggtcgctggagtgatggttggaacggaagacacccaagtactcttaaagcaatccccatggacactgggcaaaaagtagttgccccagtgactgtttcagcagtgcctcgagcaacagctcttagttctattcaggcaggaattcagcaagctagacaagagggccaaaatcaacagccgattttgataccatcaggacacctaaaaccttatcatgagccagatgccaaagaagagattccaggaggttcccgaggacctcccggttgcagccatgttgagactgatgctgaggaggaccccagctgccatgagcaacacctgtcaaacacagccacctacctggggacagatgaagaagctgtacagatga

SEQ ID NO: 12832 - DNA, 789 bp, Homo sapiens
  SIMILAR (263)..(439): 311254mologous to Homo sapiens keratin associated protein 4.8,accession number AJ406940,Smith-Waterman Score=84.
tcaagctccaggcttgggccgtggtctcttggggacgccgttggcctcccagcttaggcccaggtgccaggtgtcatggggtctcctgcccatcttcccaaggatgccattgctgtcttcatcgtcttcccccgtgtgagacactggttgtctggtactcggcgacagtgtaccagacgcgcaccctatgtgaggtgctttaaggtccctgtcctcaggaagcgcagtctggtggaagagatgagcgctgaacaaatcaacttcagaggcctgtgtcccaaaggcctggctgcgtttgccgtgctgtgcgaggacctgtgtacacaggcaggtgtgcgcctgcccgagcgcgagtagctcttgtgtagtggtgaaatgctgcaggcatctgtttattaaaattgctgcttcagagcccactcccacgggctctgtttccttggaggccatcctgccgatggcacttttcaaggccctcccttccctacgagttgctttgtgcacgtacaccagcaggtgcatgccctgccgctgaacccctgctttgcccccactggccgctttctccaggacagccatgaacatctccagtgtcctcggagcaaggaaggaatgcttcctggagcagaagtggccacaatgacgctgggccagaagcctgcagtggcggcccggacagtgggggcccaggcagcggttcacgaggagaccttggatgagagcttgtcccttcctttctgcagcagccactcttaatgcgtctactgtgtcccagaagttttggcacat

SEQ ID NO: 12833 - DNA, 333 bp, Homo sapiens
  SIMILAR (466)..(2634): 981254mologous to Homo sapiens beta V spectrin,accession number AF233523,Smith-Waterman Score=3559.
atgcggagccctccgtggccttgtcctctggtgcctgcccctgtgactgggcctgtccctcccccaggggttcagcggcagggcatgcacctgctggtgtacgtgcacaaagcaactcgtagggaagggagggccttgaaaagtgccatcggcaggatggcctccaaggaaacagagcccgtgggagtgggctctgaaggactgggtgcagagggcatcagcgatgccaggcctagaatgtgcctcaccccgacagtggccagcacggactgtgggctacagagttgcttcagcctgagcactcagcctgaatttggacataacatcaactga

SEQ ID NO: 12834 - DNA, 1036 bp, Homo sapiens
  SIMILAR (707)..(865): 491254mologous to Homo sapiens Human secreted protein sequence encoded by gene 6 SEQ ID NO:72,accession number Y91351,Smith-Waterman Score=84.
  misc_feature (1)...(1036): n = a,t,c or g
cgagcactagtattgcacnccaggggctgcatgcagtgagcccaacggcagaggcctgcagcggggagtctacgcatggggctgaacaagtcaggtgaaaatctgcagggctggagagattaatacttggcttgttgtagaaagtgtcctcaggtagagacaaaagcatgcagaaacttactcattcttcaccccaaatctgaccccaaccggtagtcacaacaggcatggacagcctggcaacagctactcaattgcacgtgagtgaaacacacagctgggtccaaccacggcttttccttcaaatcaacatcaatgctcagcaataccgcaacgaacagcgtgaggaaagattctcatgccacggtgcgcgaaagggagtcgggacaggcaaggcagagagactcaaaattcatcgacaggacgtgcttttttttttttttttacacaagaaagtgctgcttacattgttgttttgtgttatttagtgatttgttcaagcgctcatctcttcccaccagactgcgcttcctgaggacagggaccttaaagcacctcacatagggtgcgcgtctggtacactgtcgccgagtaccagacaaccagtgtctcacacgggggaaagacgatgaaaaacaagcaatggcaatccttgggaaagatgggcaaggagaccccatgacacctggcacctgggcctaagctgggaaggccagcggcgtccccaggagaccacggcccaggctgggagcttgaccggccagacgcccgtgggtgggcctgggccctcccgcctgggagcctccagtgtggcgcctgggctctgggtggggtaacaggagctacaggccagcaatgcccttcctgtcctcggcctggctcaaggactgggtgcagagggcatcagcgatgccaggcctagaatgtgcctcaccccgacagtggccagcacggactgtgggctacagagtatacttcagcctgagcactcagcctgaatttggacataacatcaactgaattaagctcagaagta

SEQ ID NO: 12835 - DNA, 936 bp, Homo sapiens
  SIMILAR (534)..(665): 451254mologous to Homo sapiens DKFZp434C131.1 hypothetical protein,accession number AL360256,Smith-Waterman Score=65.
atggttaatactgagtgtcaacttgattggattgaaggatgcaaagtattgatcctgggtgtgtctaaagaagccagtcaagggttgggtggaagatccagaggaagaaatgtcaggcagagcacagatgcagatattagacccacatctgagaaagatgcccgttcccttatgacaacaaggcaggaggataatatatctgtggaccagcgtgggttcttgtccggtgtccagaaaaaatcaggttgtgcaaatggattgaagggtagtgtatgtggaggattttattgggtgatggctgtcatcaggatgggagttggaaaggcgatgggcctcaacctgaagcttggaatcaagtttgagattaaaaaagggtatttgaagggctgcagagattcacttagattaagtcccacaggctttggcaaatttacagctaccagccacgaagtagctgctacagtccccatcaaagttgtcctggagctcaccctgcagacacataagattctaagaggagtgtttgcccacctcacatcctgtctccaactccactccttgcctccagggagctcgatggacagcgccaaagcacggaggcaactgcaagttgctggccagggccactctctggtgaaacagaaaggtttccatgtggaagcccctgaccaccacccagttcagttatcagacataagctgcaaaagctacagatggggccacaaactaatcaaaatcaacttcttaataccacctttatggtggtattatgacctggaggaagtaaaaagggaacagagtgaagaaaaacagcaagccaaaattatggcagacatcattggtgatgccctgaatgcccaaaaagcatttaagggaaacccgaagggccataaaccactgcccttttctgcagggcagatggaaaattggttttag

SEQ ID NO: 12836 - DNA, 1578 bp, Homo sapiens
  SIMILAR (3)..(212): 981254mologous to Escherichia coli yejD,accession number U00008,Smith-Waterman Score=349.
tcatgactttgcagagatcagccccagctgaagtgctctcaagtactggcattgagtgactgcagcttttccacgtgcagggagcaagctgccattgggtctaccattctggaggggtctggaggatggtggccctcttctgacagctccactatgcagtgcccctgttgggatactgtgtgggggctcaaacctcacatttcttttccatactaccatagcagagattcttgataagggtgctgcccctacagcaggcttctgcctagacatccaggctttttcacacattctctgaaatccagttgaagtatctccagcctcaactcttgctctctgtgaaaccacaggcttaactccatgtgaaagcagccaaggtttgtggcctacaccatctgaagcagtggtctgagctgtacctgggtcccttttacccagagctggagctggaataactggcatgtggaaagcagtgtcctgaggctgcagtggtgtcctgggcatactgtgatggttaatattcagtgtcaacttgattggattgaaggatgcaaagtattgttcctgggtatttcccatagggctaatgaagagtggtgaatttaacaatgtcttgatgaactgaatcccagaaagaaacaagcccttggtgtgtaaactgagattcatggtagcttttatacctggggcaggcagcagcagcggcaacgcgctggggtcctcttccacactgtggaagattggttctttcgctctttgcaataaatcttgttgctgctcactctttgggtcggcactgcctttatgaactgtaacactcactgcgaaagtctgcagcttcactcctgaggccagtgagaccacaaacccaagaattatggagaccaagaagtcctgcaatcttccacatgcaagctggcaacccaggaatgttggtggtgcactttgaaggcctgagagccagagagccaatggtgtagattctggtccaaatttgaagaccgtcccccagcccgacacccgtaaagggtctgtgctgaagtggattagtaaaagaggaaagcctcttgcagttgagatagaggaaagccactgtctgctgcctgcccctgagaactgaatgtctcggtataaaacctgattgtacatttgttcagttgtacacgtccagtcatagtaccttcccttgaacttaattatgacgtagattctattgctcacatgtttgttgctgaccttctccttatgatcaccctgccctcctacgacattcctttttactgcttggtattccaaaatcttcttgtacttgaatttcaatatctttaggtatgggaagttatctgttattaaactttctacctttatctctttctgtacctcttctttaaggcaagtaactcttagatttgcactttgaaggctgtttactatgtcttctaggcatgcttcattgttttttattcctgtttttgtctcctctgactgtgttttcaaatactctgtctgcaagctcactaaattttcttctgcttgattaattctgctactaagagactctgatgtattttctgccat

SEQ ID NO: 12837 - DNA, 474 bp, Homo sapiens; identical to SEQ ID NO: 1676
  SIMILAR (295)..(372): 381254mologous to Methylobacillus flagellatus putative,accession number L37434,Smith-Waterman Score=65.

SEQ ID NO: 12838 - DNA, 1707 bp, Homo sapiens
  SIMILAR (1021)..(1545): 921254mologous to Homo sapiens TBP-like protein,accession number AB020881,Smith-Waterman Score=821.
atgggctgcttggggacccagattgctcccagggcctttctgctgctacctctacccctgtatttcactccactcagctctgtaacttgcatcagctccagtggtgtaaggaaatggccaagtggtagtctcatagtctattacggcaaaaccattgttgcatctcctgatggaagcactcttcccttggaggctgaggtctctaacccagcagaagacagagtttccaggccagttctacattttagggttgtgatggttaatactgagtgtcaacttgattggattgaaggatgcaaagtattgattccggatgtgtctccgagctctggtggaaaggccgatgccggcctgagagtgggaaacgtggggccgggagccgggggcttccgcgcggcgtggcgtggcgtggcgtggcgtggcgccctcagggccgttacgcgattttcgctcccgcgggcagcgcctctcaggccactcccgagggaccccgaggacgcactcgggccccagggcgacggttcaaacgggccattgtgcgcccccggggtcccccggcccctgcagggctacttgggcgcagagccgcggagggtctccgttcctagaggtcctcctatcccgggctgcctgagtcctcgccagcatccgccctctcccactcccatccttcctggatccgcctctcggttcccgagggacagtcccgaccgcaaacccaccttctccttcgcatccgacgcaaccggcagcagcgctgccgccgcgtcctcagccaccgctccctcttcccacggtaaccccctaggcgaccctgggcacagggagcgcgggcggctgagcggcctgagcaccggatgtgcatctgcaggctctgtcaatgtgctcattgcaataagactcaaactgcagtcaatccacatctgtgagctctctgactgcatctgtcacctgcagttccaaagcgacactggcagatgtgatcttcgtggtggaaagctaaattttaaaaccaccccaatggatgcagacagtgatgttgcattggacattctaattacaaatgtagtctgtgtttttagaacaagatgtcatttaaacttaaggaagattgctttggaaggagcaaatgtaatttataaacgtgatgttggaaaagtattaatgaagcttagaaaacctagaattacagctacaatttggtcctcaggaaaaattatttgcactggagcaacaagtgaagaagaagctaaatttggtgccagacgcttagcccgtagtctgcagaaactaggttttcaggtaatatttacagattttaaggttgttaacgttctggcagtgtgtaacatgccatttgaaatccgtttgccagaattcacaaagaacaatagacctcatgccagttacgaacctgaacttcatcctgctgtgtgctatcggataaaatctctaagagctacattacagattttttcaacaggaagtatcacagtaacagtttttcctctgaccgcttccagccaaagatacagtccctttgtagtcatggaccaagtcaaggcacattcagtggtcagcagtggcccccacagtgcacttgaggctgccatttgcattgtggcggcccctgactcagcagcagaatgtctagtgtggcaaggagtagtcaactacgaacaacaagattttacaaatagcctttaa

SEQ ID NO: 12839 - DNA, 1506 bp, Homo sapiens
  SIMILAR (3596)..(165): 991254mologous to Homo sapiens alpha mannosidase II,accession number U31520,Smith-Waterman Score=6003.
atggggaacccagacccacacttgctgggtgtcgcactagaagaagagcagaacttatctgccttgcagccttggttctcagggaagggtgctgacctgcccaaggtcaaagcaggtccagaaaggccacagtcctggctcggtgctctcccagctcctgcatgtagcctgtcctgtagaaaagagaggatagatctggccagagctggggctgtgggcaaagaggactggatgctctcttggcaacatcatccaaggctcaaggaccaggcaaattgtgaatcaaatggaatctccctcgtgctaaggggctgcagagctgtcattccatatgctttgctcagggaccctaactctattcttgacccttccaaacccgcagatgactttgtcatcttttctaccaagaaggaaggtcatgacagaggaacattctttaactgcctttccttcaactcgcaaattcctcatgcttcaggagaaaaagtttctcttcctttccatctgtgcactcatcccatcacttcccatccctctatacagccttatcgtctgtgtgctggtgttattgtttatgttgacctggctgcaggggcctcttggcaatatgcccacctgaaagtctgtttacctgctaactattgtaattttttaaaactcttggcttatatagggctcttttcaatcatggactcggaccttttaaatcctaatgccacctatgcaaaagaattcactagtatgttacctgttaagtgcagttcaaaaatatgcaaagctaaatatgttcaggggcatgtctgcagtaaaactgtaaagaaaaggaagaatgagtctgttcagagaaaagctcatcatcccttgagcaactcagcatctcctcacagaaaatcgaatcatataacgggttgtgtttccgttttcattctggctactagggagctaaacgttagttttgaagctcaactccgacacacccaggaacaatactttgcatccttcattccaatcaagttggcactcaatattaaccatcacaggggaccagtggagtattcctgcatttggggcatcatggggctttacttctctagcatgtcaaggtttttcatgaagcaagttggtgatgaaatgactctcaaacgccttccccattttacgctggggattctgcctttaccctttaatggacaggtgtgtcccatgttccggataacagtcccagagaaggggcctccatgggaggatgttcacatttccgaagataggaaagcccgagaaggagcaaagagaagcccaaatctgtccccaaaaacacatcctgaactttccatgcactgtaagcaatgtcttcaagcactagcgtgtgaaagacgacacctgaaggggggcttctcactgaatctgcaggacactggcctacataagtcagaagagagcatcccacaggaaggagagtggcatcttgaccaccaagttacctctagtatccagcacagcatctga

SEQ ID NO: 12840 - DNA, 1220 bp, Homo sapiens
  SIMILAR (6)..(533): 881254mologous to Cloning vector pZC320 SopB,accession number U26464,Smith-Waterman Score=800.
atcccctgctccggggtgatagtgttgagaagacctctcgggtatggtcaggtggtgaacgtgaccaggagctgcttactgaggacgcactggatgatctcatcccttcttttctactgactggtcaacagacaccggcgttcggtcgaagagtatctgctgctgcacttaccgaaagtgattatcgtgttctggttggcgagctggatgatgagcacatggctgcattatccacattgggtaacgattatcgcccaacaagtgcttatgaacgtggtcagcgttatgcacgccgattgcacaatgaatttgctggaaatatttctgcgctggctgatgcggaaaatatttcacgtaagattattacccgctgtatcaacaccgccaaattgcctaaatcagatgttgctcttttttctcaccccggtgaactatctgcccggtcaggtgatgcacttcaaaaagcctctacagataaagaggagttacttaagcagcaggcatctaaccttcatgagcagaaaaaagctggggcgaaaatcctgtgtgatggtggttccgaaatcggcaaaatcccttataaatcacaagaatatcccgagatagggttgagtgttgttccagtttggaacaagagtccactattaaagaacgtggactccaacgtcaaagggcgaaaaaccgtctatcagggcgatggcccactacttgaaccatcacccaaatcaagtttttttgggtcgagacgcacccaggaacaatactttgcatccttcaatccaatcaagttgacacttaatattaaccattacatgggtcaattgataaaagctcacctggagagtgcatggcaacacctgtacctgaaaattgagtttgccaatgaattctatgagcagatggtgctgcctctgaaaacgcagctgagtatccaggttatgagtggaagaggaagagcacaagcttgtggcgacacaggtgtccatgaggctgtgaggcggccttgggctgcggcgtcgtactggctgtccacgatgtctgtggccgcggccgccccttcttacagtggggatcccgaggaagagggcgcccagaccggatgggtttctgagtacacggaattatctgggacgctatttctcctgtgtttcttctggctaactcctatacagataaaatctcctttctcagagaacttaatgacccaacatccaatgtag

SEQ ID NO: 12841 - DNA, 738 bp, Homo sapiens
  SIMILAR (508)..(693): 281254mologous to Schizosaccharomyces pombe hypothetical protein,accession number Z98559,Smith-Waterman Score=69.
atggaccctcgcggagtgaaactgcagacctccaccatgagtgttacagctcataaaggcagtgcggacccaaagagtgagcagcagcaatatttattgcaaagggagaaagaacaaatcttccacactgtggaaggggacccaagcagatcccttgctgagacggggaccatcactggtgtggcagcccgctgcttggaatctccatcctccttctcctcttggaggaaagagaagggagtacacgtaaagtttcttacaaagccaaaaaagaaattatttggctggttactcagcgtgatggttaatattgagtgtcaacttgattggattgaaggatgcaaagtattgttcctgagtgtgtctactccaagtttttcagcttttggactcttggacttaacacgaatggtttgtcaggggctctcgggccttcggccacagactgaaggctgcattgttggcttccctacttttgaggttttgggactcagactggcttctctgctcctcagcttggagatggccggttatgggacttcaccttgtgatcacgcctcactgactccccacgccctgggaaggccttccctgcctcgatcaaggccctctttccacaatgcacagcccaagtactttcctcccccaaggctccactcaggggaagtttccacacgcatgcatgccttgtggattgatggttgccatagcttccattctaggccgaaagccccatga

SEQ ID NO: 12842 - DNA, 906 bp, Homo sapiens
  SIMILAR (2566)..(3240): 971254mologous to Escherichia coli Fe-S center and glutamate synthase (GltD) protein,accession number L34011,Smith-Waterman Score=1183.
atggatgaaggtggaaaccatcattctgagcaaattatcacaaagagagaacaccaaacacctcatgttctcactcataggaaaggagagatgaaatacaaagaggaggttgggcagctcctactctcctgtacctttagccaagtgttctggggacaccagagaggccatctacaaactgaggagcaaggaagccagtccgagtcccaaacctcaagagcagggaagccaactgtgcagccttcagtctatggccaaaggcccgagagcccctggcaaactactggtgtaactccaagagtccaaaagttgaagaacttggagtctgatgttcgagggcaggaagcatccagtgttctccagggccgatgtatgtttggagatggatttccccctctcacacttcaggcactcagttttttggcagtctcatggagttttcagtggcaagccgcttatttcaaatggtctgtgaattcttttggtttttctgatatgttcctgggatttggaaaggattccgtgatggttaatattgagtgtcaacttgattggattgaaggatgcaaagtattgttcctgggtgtgtctatgcttcctgacctcgaatatcagactccaagttctttagcttttggactcttggacctttggccacagacggaaggctgcacttttgaagttttgggacttggactggcttccttgctcctcagcttacagatggcctattgtgggacttcaccttgtgattgtttaccagaagttaggtttatcactgttgcaaagccactgagttctgatccagaatctcacaaactggtacatgcccacgcagatctagcctgtccagaagatgaacaggaggaaaaacgcaatgccaagaaggaagcaaccgggtcctaa

SEQ ID NO: 12843 - DNA, 843 bp, Homo sapiens
  SIMILAR (453)..(187): 911254mologous to Homo sapiens Human gp130 protein,accession number R75368,Smith-Waterman Score=424.
atgcttcctgccctcaaacatcgggctccaggttcttcagttttgagactcagactggctctccttgctcctcaagcttgcagacagcctattgtgggaccttgtgatcgtgacacattttctagcaaaggatgtgtgtcagcgagaagggtatgtgactgtaacatccgtgtatcctaccataaaccacctcacccagaagcagcagatctgatagaatgtttgaacagactattaaaacattcgaataagatgtccgtccagagacaaaaccctctaggttggagagctctctcggatgcaccgaaccaaccactgatacacggtgctgcatctaccatcgctaaaatacacagtgtgatggttaatattgagtgtcaacttgattggattgaaggatgcaaagtattgttcctgcgtgtgtctgtgagggtgttgccaaagaagattaacattttgagtcagtggactgggagaggcagaccaacccttaatcagctgccagcactatctaatcagctgccagggtggctaggaataaaagctggccgaagttgggaaaataaggataaggaacacgtgttgagtctgccggccttcacttttcccctgtgctgggatgccttcttgcccttgaatatcagacttccaagttctttcagcttttgggactcttgggactttacacccagtgtttttgccaggggctctcaggccttcagccacagactgaaggctgtactattggcttccctacttttgaggttttgggactcagactggcttccttgctcctcagcttgcagacggcctattgtgggacttcaccttgtgattgtatga

SEQ ID NO: 12844 - DNA, 2124 bp, Homo sapiens
  SIMILAR (4)..(735): 911254mologous to Bacteriophage phi-80 gene 15 (AA 1 - 302),accession number X13065,Smith-Waterman Score=1162.
gcaatgaatttgaataaacatttccccaaagaagatatacaaatggctaagaagcacatgaaaagatgctcaacatcattagcggtccagggtgggaatgtgaaatggtgcagccattttggaaaacagcttgaaataaagggtgttcaattaggaaaagaggaagtcaaattgtccccgtttgcagatgacatgattgtatatctggacaaccccatcatctcagcccaaaatctccttaagctgataggcaacttcagcaaagtctcaggatacaaaatcaatgtgcaaaaatcacaagcattcttatacatcaataacagacaaacggagagccaaatcatgagtaaactcccattcacaattgcttcaaagagaataaaatacctaggaatccaacttacaagggatgcgaaggacctcttcaaggagaactacaaaccactgctcaatgagataaaagaggatacaaacaaatggaagaacattccatgctcatgggtaggaagaatcattattgtgaaaatggccatactgcctaaggctacagtaaccaaaacagcatggtaccggtacgaaaacagagatgtagaccaatggaacagaacagagccctcagaaataatgccgcatatctacaaccatctgatctttgacaaacctgagaaaaacaagcaatggggaaaggattccctatttaataaatggttctgggaaaactggctagccatatgtagaaggctgaaactggatcccttccttacaccttacacaaaaattaattcaagatggattaaagacttaaatgttagacctaaaaccataaaaaccctagaagaaaacctaggcattaccattcaggacataggcgtgggcaaggacttcatgtctaaaacaccaaaagcattggcagcaaaagccaaaactgacaaatgggatctaattaaactaaagagcttctgcacagcaaaagaaactaccatcagagtgaacaggcaacctacagaatgggagaaaatttttgcaatttacttatctgacaaagggctaatatccagaatctacaatgaactcaaacaaatttacaagaaaaaaacaaacaaccccatcaaaaagcgggcaaaggacatgaacagacacttctcaaaagaagacatttatgcagccaaaagacacatgaaaaaatgctcatcatcactggccatcagagaaatgcaaatcaaaaccacaatgagataccatctcacaccagttagaatggcaatcattaaaaagtcaggaaacaatagggacatggatgaagctggaaaccgtcattctcagcaaactatcgcaaggacaaaaaaccaaacaccacatgttctcactcataggtggcaatcgaacaaggagaacacatggacacaggaaggggaacatcacactctggggactgttgtcagattctgtgaactgtgcttcttcatcaggctagctttagacatccccatctttcctgtgtatacattgagacaaaaaagacctagcattgcccaatatttggcagatagtaaagacagacttacagacagactttactacagtcagcaagtaatagagctggaatccaagtcaagaccagttgacttgaaagcccgtgctcttaactcctacagtcagtactttctcccttggggaaagaagggctttgtggacagccctatagactgtgagagattgacccatgccagtgaccggccaacacattcttacctagttgggtcagagcatgagttggttcagaagggaacaggaagagcagatttggaaagaacacgggaacgagaggctaagtctccagagggagccttagaagtggacttggtgcttttcccccccacaatattaatcccctatggtcacgtgcagggaatacaaatgcccttctcaggccctcaggttcaatttcaccataagacaattgacctatcgcctagtgcatttgatgtgtatggccttttgatgaagcaccatcttcaccttctaggaacctccaatccaaaggagcgactctccattgtaaactcagatgatgattttattttttattcaaaagggctttgctttgttgcatatgccactgaa

SEQ ID NO: 12845 - DNA, 250 bp, Homo sapiens
  SIMILAR (1)..(111): 831254mologous to Homo sapiens PRO1546,accession number AF116638,Smith-Waterman Score=156.
atggaatactatgcagccataaaaaaggatgagttcatgtcctttgtaaggatatggatgaagctggaaaccatcattctcagcaaactatcgcaaggacagaaaaccaaacaccgcaggttctcactcatagatgggaccatcacagaagctttacaaggactgaaaactctagccaacgaactggcagaaaatgctggaattgatgacccacttgtgggttggctagaagttggtttggaaagacatg

SEQ ID NO: 12846 - DNA, 261 bp, Homo sapiens
  SIMILAR (1)..(108): 911254mologous to Homo sapiens PRO1546,accession number AF116638,Smith-Waterman Score=169.
atggaatactatgcagccataaaaaatgatgagttcatgtcctttgtagggacgtggatgaagctggaaaccatcattctcagcaaactattgcaaggaccaaaaaacaaccactgcatgttctcactcacagacatctttcaaacgtgctgctacgctgacataatagtaaggaagccacaaggcccaacgcaggaagtgaaacccaaactcaggtggataaatgagccccacccccaaagccagcttctggcggggagg

SEQ ID NO: 12847 - DNA, 303 bp, Homo sapiens
  SIMILAR (99)..(1): 721254mologous to Homo sapiens Human secreted protein, SEQ ID NO: 7217,accession number G03136,Smith-Waterman Score=112.
atggatgaagctggaaaccatgattctcagcagactattgcaaggacaaaaaaccaaacactgcatgttctcactcacaggctaaggacgctgcagaatcccgtcctcctatcattaaacaagcaggacagccgcccgcgcgcgtcccggaggcacctgcaagagcgcgcgggcgcgcgggcgctcgggcccggcaaacgccgcttccgggtcacgtggcccggcttccggttcgcacctcccctcagcgaagaaacctccaatcggctgccttggactcagcggttacccgcgctgcctccg

SEQ ID NO: 12848 - DNA, 291 bp, Homo sapiens; identical to SEQ ID NO: 6987
  SIMILAR (1)..(111): 911254mologous to Homo sapiens Human secreted protein, SEQ ID NO: 6833,accession number G02752,Smith-Waterman Score=173.

SEQ ID NO: 12849 - DNA, 321 bp, Homo sapiens
  SIMILAR (2838)..(1213): 1001254mologous to Homo sapiens 06-JUL-1998 Human gp130 DNA,accession number Z49844_cd1,Smith-Waterman Score=2919.
atggaatactatgcagccataaaaaatgatgagttcatgtcctttgtagggacatggatgaaattggaaatcatcattctcagtaaactattgcaaggacaaaaaaccaaacaccgcatgttctcgctcatagattttatcatgtgggcaacctgctgcaactggttctgcctggatggacagcctgaggaggtcccaccaccccagggagccaggatgcaggcctattccaaccctgggtacagctccttcccttccccaacaggcttggaaccaagctgcaagtcctgtggggctcactttgcaaacacggccaggaag

SEQ ID NO: 12850 - DNA, 370 bp, Homo sapiens
  SIMILAR (106)..(369): 901254mologous to Homo sapiens contactin-like; similar to U87224 (PID:g1857710),accession number AC004891,Smith-Waterman Score=453.
atggaatactacgcagccataaaaaatgatgatttcctgtcctttctagggacatggatgaagctggaaaccatcattctcagcaaactgttgcaaggacgaaaaaccaaacaccgcatgttctcactcataggtggtgctgggggccagcagggcttcctgggctgcatccgctccttgaggatgaatggggtgacacttgacctggaggaaagagcaaaggtcacatctgggttcatatccggatgctcgggccattgcaccagctatggaacaaactgtgaaaatggaggcaaatgcctagagagataccacggttactcctgcgattgctctaatactgcatatgatggaacattttgcaacaaag

SEQ ID NO: 12851 - DNA, 687 bp, Homo sapiens; identical to SEQ ID NO: 11984
  SIMILAR (58)..(669): 531254mologous to Homo sapiens NAG13,accession number AF194537,Smith-Waterman Score=494.

SEQ ID NO: 12852 - DNA, 210 bp, Homo sapiens; identical to SEQ ID NO: 6991
  SIMILAR (1)..(201): 641254mologous to Homo sapiens Human secreted protein, SEQ ID NO: 6720,accession number G02639,Smith-Waterman Score=201.

SEQ ID NO: 12853 - DNA, 231 bp, Homo sapiens
  SIMILAR (117)..(1): 761254mologous to Homo sapiens Human secreted protein, SEQ ID NO: 7217,accession number G03136,Smith-Waterman Score=149.
atggatgaagctggaaaccatcactctcagcaaactatcgcagggacagaaaaccaaacactgcatgttctcactcatacgtcggaattgaacaatgagaacacttggacacagggtacccccgaacctaaaataaaagttaaaaaagaaaaagaacagtctcttggtggatggacactgatgatagcagagacagctgctaggcatttgttccaagacaaacagcgacag

SEQ ID NO: 12854 - DNA, 243 bp, Homo sapiens
  SIMILAR (1)..(102): 881254mologous to Homo sapiens PRO1546,accession number AF116638,Smith-Waterman Score=153.
atggaatactatgcagccatgaaagatgagttcatgtcctttgcagggacatggatgaagctggaaaccatcattctcagcaaactatcacaaggacaaaaagccaaacaccgcatgttctcactcataggaaagatttacaaatctttgaaattgcagagaaatactgtcactgaatcagggagagatagagaagagatgccaaaggaatggcctaggactcaaggatattcggaatatctg

SEQ ID NO: 12855 - DNA, 391 bp, Homo sapiens
  SIMILAR (2)..(64): 951254mologous to Homo sapiens Human secreted protein, SEQ ID NO: 6932,accession number G02851,Smith-Waterman Score=99.
atggatgaagctggaaaccatcattctcagcaaactatcataaggacaaaaaaccaaacaccgcatgtcctcactcataggcagtacagatcagcagcggctcgtagtgaagaacgttcaaggaagagtttgtcccggatcaacaggacatggggcttgggaagcctggactgccatgaggaaggtcgattcaccactacagacagggagcctgaggcctgggtggtgccgacaagtcggcagtcacgccaggtcaggaagcgccgaagccgcgggaaaccctggactccatcccgggatttgtccccgtgtcgaagatggtatccaggtcgccgaaaacttcccggaagtttagaccaagacctacttattatctacggtgtccgggaag

SEQ ID NO: 12856 - DNA, 289 bp, Homo sapiens; identical to SEQ ID NO: 12076
  SIMILAR (2)..(52): 821254mologous to Homo sapiens PRO1546,accession number AF116638,Smith-Waterman Score=74.

SEQ ID NO: 12857 - DNA, 1197 bp, Homo sapiens; identical to SEQ ID NO: 3217
  SIMILAR (535)..(1191): 471254mologous to Macaca fascicularis unnamed protein product,accession number AB046024,Smith-Waterman Score=510.

SEQ ID NO: 12858 - DNA, 389 bp, Homo sapiens
  SIMILAR (146)..(232): 861254mologous to Homo sapiens putative p150,accession number U93563,Smith-Waterman Score=127.
atggaaacagaagatatagatgacactctaaagcaaccagatctaagagatatagacagaacattccactcgaacagtggagcaggaagactaagattggcaactatccacacaaaagcagcagtttcacaggaactaaaagtcagggacatggatgaaactggaaaccatcattctcagcaaactatcgcaaagccaaaaaaccaaacactgcatgttctcactcataggcacctaagagagaaaatcttcatcctacccttgggtcaaccacttagtcacgaatctctcatagtggtgtggaatccccggtcaaactggacagctgtgcaagcttttggcttagtgaagtcccacttcttccctaaagatacagtgtcctactcaag

SEQ ID NO: 12859 - DNA, 292 bp, Homo sapiens
  SIMILAR (133)..(291): 1001254mologous to Homo sapiens PG1 splice variant allele protein sequence,accession number Y36744,Smith-Waterman Score=279.
atggaatactatgcagccataaaaaatgatgagttcatgtcctttgtagggacatggatgaagctggaaaccatcattctcagcaaactatcacaaggacaaaaaaccaaacaccacatgttctcactcataggccttgcagtattaaaacatgtgctaacaccacgaataaaggcaactcacgttgcttttgattgcatgaagaattatttagatgcaatttatgatgttacggtggtttatgaagggaaagacgatggagggcagcgaagagagtcaccgaccatgacgg

SEQ ID NO: 12860 - DNA, 618 bp, Homo sapiens
  SIMILAR (520)..(383): 451254mologous to Arabidopsis thaliana F24O1.6,accession number AC003113,Smith-Waterman Score=90.
atggatgaagctggaaagcatcattctcagcaaactatcgcaaggacaaaaaaccaaacactacatgttctcactcgtagtcttttgcacgggtctctggctccaagctctggggctcggagacctgagcaggttcttttctcttcccagggtgaagaacctcctaaagatactgtaaccggagtaactcccgcgctggcagcgtctcaacagcccggagtgaacgagctgaccccaccagcgccgggacccacgtctggggcagccgcgcggcgtcttacttttctggctggagtaacctggataatagccatagtagccggtgatccgcaggatccggtcctcgatagtggccaccccgttgggggccgccttgacatccatagagagcgcggggcgacggccccgagtgcggcggggcggagagcgcagcgcggggcccgggagctggtgcagaataaggggagagaggaggaggaggaggagaggaggggaggggagaaggaggagaaggggaggggaggaggaggaggacgaggaggaggaggagaaacagcagcagcgagcccacttattcaagaagaatgcgacatggaacagacccagaccaaagcttaa

SEQ ID NO: 12861 - DNA, 1245 bp, Homo sapiens; identical to SEQ ID NO: 8703
  SIMILAR (814)..(1029): 521254mologous to Homo sapiens Gag protein,accession number AF164612,Smith-Waterman Score=232.

SEQ ID NO: 12862 - DNA, 972 bp, Homo sapiens
  SIMILAR (82)..(1881): 421254mologous to Homo sapiens BC331191_1,accession number AC007842,Smith-Waterman Score=1128.
  misc_feature (1)...(972): n = a,t,c or g
atggatgaagctggaaaccatcattctcagcaaactattgcaagggcaaaaaaccaaacaccgcatgttctcactcatagagggcagctgccccacacaacagaaagcagcaatggggctgagccaggcctgcagccacaggccaaactggggcaaggggctgaaagagtggttaacacaccgccatccattccagatggcgaggttgaatacacagtcacagtggccgtgggatccatgacaaactgcagaccgggcatgaactggcaggccaagtgtggggcatctcctgtgatgaacccaggcccagcaaaacccggacaggggtgttaccaaccagaggtctccgactggcaaagtgaccaagaaaaatcctgtgtcactatggtgactgtgtctctgtactatgggacacgtccctcggatgcatcctccaaactggaaagagttaatttcccagcccttacactggttggcttaggattggcctcagggaaagggaacccaaaaacccaacatgccagcaaaagggtaaagtgttttgccagtcaggcttttgccctcgggccttgggatttntgagctgcccttacctgtgcccttgtttcatttttatatatgtcttctaataacccggtttgtctattcttgccttcaggccatcaaactccaaacaatcatgcaaccagagcctctgacgatggccccttctgctggaaacccttagataggtctctgagggagctctgccatttcccccaaaacagcaccccctatcagcaggaagcagttaagatcggtcttagtccttatccttaatctaacagcagttagatatacttctttagagaggggaatgagacagccaggtgcaagggccgccccagaaaaactccaaccgtaatgctcattggagtggaactcgagaagttcgccctgtttgcagcaggaggaacctggcccttcctcttc

SEQ ID NO: 12863 - DNA, 678 bp, Homo sapiens
atggaatactatgcagccataaaaaaggatgagctcatgtcctttgcagggacatgggtgaagctggaaaccatcattctcagcaaactatcacatggacagaaaaccaaacaccgcatgttctcactcatagcccctggcagccatcattctgcattctgcctttatgaatttgactcctctagggatttcctggattttgccgatttcggaaccaccatcaaacaggattttcgcctgctggggcaaaccagcgtggaccgcttgctgcaactctctcagggccaggcggtgaagggcaatcagctgttgcccgtctcactggtgaaaagaaaaaccaccctggcgcccaatacgcaaaccgcctctccccgcgcgttggccgattcattaatgcagctggcacgacaggtttcccgactggaaagcgggcaggattttgccgatttcggaaccaccatcaaacaggattttcgcctgctggggcaaaccagcgtggaccgcttgctgcaactctctcagggccaggcggtgaagggcaatcagctgttgcccgtctcactggtgaaaagaaaaaccaccctggcgcccaatacgcaaaccgcctctccccgcgcgttggccgattcattaatgcagctggcacgacaggtttcccgactggaaagcgggcagtga

SEQ ID NO: 12864 - DNA, 1992 bp, Homo sapiens
  SIMILAR (118)..(444): 991254mologous to Escherichia coli isocitrate lyase,accession number X12431,Smith-Waterman Score=562.
atggatgaagctggaaaccatcattctcagcaaactattgcaagaacaaaaaaccaaacgctgcatgttctcactcacagtaaccttaacatctggacgcagacagccccagcaatcctggaggaaaccttggaaatacgcgggtcatcttctatgaagaccacagcagccctgagaaaccaatacagcgttccaatctttaaaagaagtgcaatcaaactagaactcaggattaagaaattcactcaaaaccgctcaactacatggaaactgaacaacctgctgctgaatggctactgggtacataacgaaatgaagggagaaataaagatgttttttgaaaccaacaagaacaaaaacacaacataccagaatctctgggacacattcaaagcagtgtgtagagggaaatttatagcactaaatgcccacaagagaaagcatgaaaggtctaaaattgacaccctaacatcacaattaaaagaactagagaagcaagagcaaacacattcaaaagctagcagaaggcaagaaatgactaagatcagaacagaactgaaggaaatagagacacaaaaaactcttcaaaaaatcaatgaatccaggagctggttttttgaaaagatcaacaaaattgatagaccactagcaagactaataaagaagaaaagagagaagaatcaaatagatgtaataaaaaatgataaaggggatatcaccactgatcccacagaaatacaaactaccatcagagaatactataaacacctctatgcaaataaactagaaaatcaagaagaaatggataaattcctcaacacatacactctcccaagactaaaccaggaagaagttgaatctctgaatagaccaataacaggctctcaaattgaggcaataattaatagcttaccaaccaaaaaaagtccaggaccagatggattcacagccgaattctaccagaggtacaaggaggagctggccacagtaaccaaaacagcatggtactggtaccaaaacagagatatagaccaatggaaaaggacagagctcttagaaataatgccgcacatctacaactatctgatctttgacaaacctgacaaaaagaagaaatggggaaaggattccctatttaataaatggtgttgggaaaactggctagacatatgtagaaagctgaaactggatcccttccttacaccttatacaaaaattaattcaagatggattaaagacttacatgttagacctaaaaccataaaaaccctacaagaaaacctaggcaataccattcaggacataggcgtgggcaaggacttcatgtctaaaacaccaaaagcaatggcaacaaaagccaaaattgacaaatgggatctaatcagactaaagagcttctgcacagcaaaagaaaccaccatcagagtgaacaggcaacctacagaatggaagaaaatttttgcaacctactcatctgacaaagggctagggctaatatccagaatctacaatgaactccaacaaatttacaggaaaaaaacaaacaaccccatcaaaaagtgggtgaaggatatgaacagacacttctcaaaagaagacatttatgcagccaaaaaacacatgggaaaaatgctcatcatcactggccatcagagaaatgcaaatcaaaaccacaatgagataccatccatctcacaccagttagaatggcaatcattaaaaagtcaggaaacaacagggacatggatgaagctggaaaccatcattctcagcaaactattgcaaggacaaaaaaccaaacaccatatgttctcactcataggtggcaatcgaacaaggagaacacatggacacaggaaggggaacatcacactctggggactgttgtcagattctgtgaactgtgcttcttcatcaggctagctttagacatccccatctttcctgtgtatacattgagacaaaaaagacctagcattgcccaatatttgg

SEQ ID NO: 12865 - DNA, 938 bp, Homo sapiens
  SIMILAR (972)..(4): 991254mologous to Escherichia coli K12 proline dipeptidase,accession number AE000460,Smith-Waterman Score=1697.
atgggctcttttaaaggtattcaattaggaaaagaggaagtcaaattgttcctgtttgcagatgacatgattgtatatttagaaaaccccatcctctcagccccaaatctccttaagatgataagcaacttcagcaaagtctcaggatacaaaatcaatgtacaaaaatcacaagcattcttatacaccaataacagacaaacagagagccaaatcatgagtgaactcccattcacaattgcttcaaagagaataaaatacctaggaatccaacttacaagggatgtgaaggacctcttcaaggagaactacaaaccgctgctcaatgaagtaaaagaggacacaaacaaacggaagaacattccatgctcatggataggaagaatcaatatcatgaaaatggccatactgcccaaggtaatttatagattcactgccatccccataaagctaccaatgacttccttcacagaattggaaaaaactactttaaagttcatatggaaccaaaaaagagcccgcattgccaagacaatcctaagtcaaaagaacaaagctggaggcatcatgctacctgacttcaaactatactacaaggctacagtaaccaaaacagcatgggacatggatgaagctggaaaccatcattctcagcaacctattgcaaggacaaaaaagcaaacatcgcatgttcttactcatagttcagggtcacaggtggccagagcccctcgcagccgggacccctgtggacaggaggacatcccatcgcagagcacactcacacacacattcacactcgcttacactgggaccactcacacacacattcacactcgctcacactgggaccacacagatctgccagttcattccacttgcacagctctgagatgtgggaggaaacagcagtacccggcaaaagccaacacagacag

SEQ ID NO: 12866 - DNA, 4114 bp, Homo sapiens
  SIMILAR (573)..(175): 931254mologous to synthetic construct aceA,accession number A31763,Smith-Waterman Score=656.
atggggtcttgcccaggtggattcacagccgaattctaccagaggtacaaggaggagctggtaccattccttctgaaactattccaatcaatagaaaaacagggaaccctccctaactcattttatgaggccagcatcatcctgataccaaagcctggcagagacacaaccaaaaaagagaattttagaccaatatccctgatgaacatcgatgcaaaaatcctcaataaaatactgacaaaccgaatccagcagcacatcaaaaagcttatccaccatgatcaagtgggcttcatccatgggatgcaaggctggttcaacatacgcaaatcaataaatgtaatccagcatataaacagaaccaacgacaaaaaacacatgattatctccatagatgcagaaaaggcctttgacaaaattcaacaacccttcatgctaaaaactctcaataaattagggacatggatgaagctggaaaccatcattctcagcaaacgatcgcaaggacaaaaaaccaaacaccggatgttctcactcatagtaaatattatccctaccataaagatactaattaagcaaaacatgacagcaatggaaactctctgtccaatatttaagttagaaggtgataccatggataaccctattgcaaatagaagagtgaggacagcagttcccacaagtgtggtgtgcctccacgtgggcacagagccagaagcaagactgccacatgggcctatgatcacggcacaaagtccttttggacagtgcctccctggagttgtggggcagttcaggaagagagaggatctcaagaaagaaggacatactaaactcctgtcaaaaaaggaagccaggcctcagactgggctcaggacttgggctctggattcaggcaccaaaggcacagatgagggagagccaccgctgctgatacccaggcaaacagggtctgcagtggacctccagcaaattacaacagacctgcagctgagggtcctgactgttagaaggaaaactaacaaacagaaaggacatccacaccaaaaccccacctgtacgtcaccatcatcaaagaacaaagaaaaagagggaatcctccctaactcattttatgaggccagcatcatcctgataccaaagcctggcagagacacaaccaaaaaagagaattttagaccaatatccctgatgaacatcgaagcaaaaatcctcaataaagtactggcaaaccgaatccagcagcacatcaaaaaccttatccaccatgatcaagtgggcttcatccatgggatgcaaggctggttcaacatacgcaaatcaataaacgtaatccagcatataaacagaaccaaagacaaaaaccacatgattatctcaatagatgcagaaaaggcctttgataaaattcaacaacccttcatgctaaaaactctcaataaattaggtattgatgggacgtatctcaaaataataagagctatctatgacaaacccacagccagtatcatactgaatgggcaaaaactggaagcattccctttgaaaactggcacaagacagggatgccctctctcaccactcctattcaacatagtgttggaagttctggccagggcaatcaggcaggagaaggaaataaagagcattcagttaggaaaagaggaagtcaaattgtccctgtttgcagatgacatgattgtatatctagaaaaccccactgtctcagcccaaaatctccttaagctgatgagcaacttcagcaaagtctcaggatacaaaatcaatgtgcaaaaatcacaagcattcttatacaccaataacagacaaacagagagccaaatcatgagtggactcccattcacaatcacttcaaagagaataacatacctaggaatccaacttacaagggatgtgaaggacctcttcaaggagaactacaaaccactgctcaaggaaataaaagaggatacaaacaaatggaagaacattccatgctcatgggtaggaagaatcaatatcgtgaaaatggccatactgcccaaggtaatttatagattcaacaccatccccatcaagctaccaatgactttcctcacagaattggaaaaaactactttaaagttcatatggaaccaaaaaagagcccacattgccaagtcaatcttaagccaaaagaacaaagctggaggcatcatgctacctgacttcaaactatactacaaggctacagtaaccaaaacagcatggtactggtaccaaaacagagatatagaccaatggaacagaacagagccctcagaaataatgccgcatatctataactatctgatctttgacaaacctgacaaaaacaagcaatggggaaaggattccctatttaataaatggtgctgggaaaactggctagccatatgtagaaagctgaaactggatcccttccttacaccttatacaaaaattaattcaagatggattaaagacttacatgttagacctaaaaccataaaaaccctagaagaaaacctaggcaataccattcaggacataggcatgggcaaggacttcatgtcgaaaacaccaaaagcaatggcaacaaaagccaaaattgacaaatgggatctcattaaactaaagagcttctgcacagcaaaagaaaccaccatcagagtgaacaggcaacctacagaatgggagaaaatttttgcaacctactcatctgacaaagggctaatatccagaatctacaatgaactcaaacaaatttacaagaaaaaaacaaacaaccccatcaaaaagtgggcaaaggatatgaacagacacttctcagaagaagacatttatgcagccaaaaaacacatgaaaaaatgctcatcatcactggccatcagagaaatgcaaatcaaaaccacaatgagataccatctcacaccagttagaatggtgatcattaaaaagtcaggaaacaataggtgctggagaggatgtggagaaataggaacacttttacactgttggtgggactgtaaactagttcaaccattgtggaagtcggtgtggcaattcctcagggatctagaactagaaataccatttgacccagccatcccattactgggtatatacccagaggattataaaccatgctgctataaagacacatgcacacgtatgtttattgtggcactactcacaatagcaaagacttggaaccaacccaaatgtccaacaatgatagactggattaagaaaatgtggcacaaatgcaccatggaatactatgcagccataaaaaataatcgagttcatgtcctttgtagggacatggatgaagctggaaaccatcattctcagcaaactatcgcaaggacagaaaaccaaacaccgcatgttctcactcatagtcaggaccctcagctgcaggtctgttggagtttactcgaagtccactccagaccctgtttgcatgggtatcagcagtggttgctgcagaacagcagatattggtgaagtgcaaatgctgctgcctgatcgttcctctggaagttttgtctcagaggagtacctggtcctgtgtgttgtcagtctgcccctactggggggtgcctccttgttaggccactcagggatcagggacccacttgaggaggcagtctgcccgttctcagatctcaagctgtgtgcttggagaaccactactctctttaaagctatgagtgagaacatgcagtgttcggttttttgtccttgcaatagtttgctgagaatgacggtttccagcttcatccatgtccctgttcccccagagccactgagggccaggaacaagtctgggtgtgctatagtcctgtataggattcccagccttccccctcatacctccagcttctgggtctttcctctctccactctcagtgccttccctctgaagatcagctcctccttgtacctctggtagaattcggctgtgaatctgtctgttccctggacttttttcggttggtaagctattaattattgcctcaacttcagagcctgttattggtctattcagagattcaacttcttcctggtttagttttgggagggtgtatgtgtcgaagaatttatccat

SEQ ID NO: 12867 - DNA, 858 bp, Homo sapiens
  SIMILAR (118)..(228): 1001254mologous to Homo sapiens thiamin pyrophosphokinase,accession number AB028138,Smith-Waterman Score= 216.
atgtgggaaagtttggagctccctagagacttattggatggcgttgaccaaaatgctgataatgatatggaccatgaaatccaggctgcggtggtctcagatggagatgaagaacttggaaagcacaggttgcatgtagacactggaatggagggtgattggtgtggccttattcctgttggacagccttgtatgcaggttacaaccacaggcctcaagtggaacctcagaacttgtgactacactaggaccacctggatagccaaggataatcccgtcccaagactaatcagattaatcagacttaatcacatctgtaaagttcctcttgccatgcttcattatcaagaaggcctttatgtccaagatgaaaggagtctacttatgttgaaagatcaaaaggaccaggaaactccagagatccagggagagatggaagaaacggggaaaggatgggtgaagtgtggaagtggtattcctcaagatggaagatggaattcagactggggatgggagcccttcgagaaaagtgtgtttagctccacctttgaaagtagagacaacgaaatgagagatgatgagttagtaactgactcagacaaaaggcaagagagagtagccatggcagtagctattgccttggcctgggcgacccagtgttcatcagctgcaagagctcagtacagcctgcatggcacagtttcacacagagcagaaacagccaagaggcgttcctggagcattcctgggtgggaccttcatgctcatggtcagagatggaagctagagttccatcccatcaacattccagggggcagtgtagatataaagaagcaaaagcttcagctgtctctttaa

SEQ ID NO: 12868 - DNA, 258 bp, Homo sapiens
  SIMILAR (1)..(255): 851254mologous to Homo sapiens apoptosis related protein APR- 2,accession number AF143236,Smith-Waterman Score=368.
atgaagcagaaacgaaaggctgccagttccgagcccacgtctgaagtcgccttaggtggttccgcgggccccgtgcgctcccaccttcacccagagggccttctctggtgcagccgctgcttcttcagcctccgcccaaaaggaacggagccccctggccgatccgcaggcctacagggagccacagagcgcagcggctggaccagcgttcaagcccaagcacaggcctgcgagaaccttgttccagccgccgtttag

SEQ ID NO: 12869 - DNA, 3485 bp, Homo sapiens
  SIMILAR (3045)..(2167): 961254mologous to Escherichia coli ADENYLOSUCCINATE SYNTHETASE,accession number A92595,Smith-Waterman Score=1485.
cggaattcccgggtcgacgggaggcaggaggggcacctgcacaggggacaaccacaggaaatgcatggggccctccctcagcacgggtggttgagcctgtgggggagaaagtcattttggtactgcctctgctcctctttcatctctgtcccatggtgcccctgtctttctctgctctctccctgttggttcttgccctgtcttcccaccgcaccccttttctgtgtgtttccctggctggcggcaccgggtgccaggtgtggtgaccgtgaggtcaggtgtcatcattggaccgggaggcattctcgccacccatcctggagctgctgctgctggctaaggacatcgggctgctcaacagcacggcccacctgctcatcaccatcctggatgacaatgacaaccggcccacctttagccctgccaccctcactgtccatctgctagagaactgcccgcctggattctcagtccttcaagtcacagccacagatgaggacagtggcctcaatggggagctggtctaccgaatagaagctggggctcaggaccgcttcctcattcatctggtcaccggggtcatccgtgttggtaatgccaccatcgacagagaggagcaggagtcctacaggctaacggtggtggccaccgaccggggcaccgttcctctctcgggcacagccattgtcaccattctgatcgatgacatcaatgactcccgccccgagttcctcaaccccatccagacagtgagcgtgctggagtcggctgagccaggcactgtcattgccaatatcacggccattgaccacgacctcaacccaaagctagagtaccacattgtcggcattgtggccaaggacgacactgatcgcctggtgcccaaccaggaggacgcctttgctgtgaatatcaacacaggatctgtaatggtgaagtcccccatgaatcgggagctggttgccacctatgaggtcactctctcagtgattgacaatgccagcgacctaccagagcgctctgtcagtgtgccaaatgccaagctgactgtcaacgtcctggacgtcaatgacaatacgccccagttcaagccctttgggatcacctactacatggagcggatcctggagggggccacccctgggaccacactcattgctgtggcagccgtggaccctgacaagggccttaatgggctggtcacctacaccctgctggacctggtgcccccagggtatgtccagctggaggactcctcggcagggaaggtcattgccaaccggacagtggactacgaggaggtgcactggctcaactttaccgtgagggcctcagacaacgggtccccgccccgggcagctgagatccctgtctacctggaaatcgtggacatcaatgacaacaaccccatctttgaccagccctcctaccaggaggctgtctttgaggatgtgcctgtgggcacaatcatcctgacagtcactgccactgatgctgactcaggcaactttgcactcattgagtacagccttggagatggagagagcaagtttgccatcaaccccaccacgggtgacatctatgtgctgtcttctctggaccgggagaagaaggaccactatatcctgactgccttggccaaagacaaccctggggatgtagccagcaaccgtcgcgaaaattcagtgcaggtggtgatccaagtgctggatgtcaatgactgccggccacagttctccaagccccagttcagcacaagcgtgtatgagaatgagccggcgggcacctcggtcatcaccatgatggccactgaccaggatgaaggtcccaatggagagttgacctactcacttgagggccctggcgtggaggccttccatgtggacatggactcgggcttggtgaccacacagcggccactgcagtcctacgagaagttcagtctgaccgtggtggccacagatggtggagagcccccactctggggcaccaccatgctcctggtggaggtcatcgacgtcaatgacaaccgccctgtctttgtgcgcccacccaacggcaccatcctccacatcagagaggagatcccgctgcgctccaacgtgtacgaggtctacgccacggacaaggatgagggcctcaacggggcggtgcgctacagcttcctgaagactgcgggcaaccgggactgggagttcttcatcatcgacccaatcagcggcctcatccagactgctcagcgcctggaccgcgagtcgcaggcggtgtacagcctcatcttggtggccagcgacctgggccagccagtgccatacgagactatgcagccgctgcaggtggccctggaggacatcgatgacaacgaaccccttttcgtgaggcctccaaaaggcagcccccagtaccagctgctgacagtgcctgagcactcaccacgcggcaccctcgtgggcaacgtgacaggcgcagtggatgcagatgagggccccaacgcgatcgtgtactacttcatcgcagccggcaacgaagagaagaacttccatctgcagcccgatgggtgtctgctggtgctgcgggacctggaccgggagcgagaagccatcttctccttcatcgtcaaggcctccagcaatcgcagctggacacctccccgtggaccctccccaaccctcgacctggttgctgacctcacactgcaggaggtgcgcgttgtgctagaggacatcaacgaccagccaccacgcttcaccaaggctgagtacactgcaggggtggccaccgacgccaaggtgggctcagagttgatccaggtgctggccctggatgcagacattggcaacaacagccttgtcttctacagcattctggccatccactacttccgggcccttgccaacgactctgaagatgtgggccaggtcttcaccatggtgcaccagaggcacccttatcgaccggctctgctacctctacgctcctgcacctcctcgcgagcggttatggtctcagcccgggtgaagaatgtggccatgatgctgtccagtttaacagtgccttgcccccatccacattccctaggagccatgagcacagagggccccagcctcgccagctccccagccatcagccccctcgcctttctctcagctcccgtcactcccgggacccttgcagaggcaactgaccccctccccatgctcatcgccctggcctgcatcttcctcctgctggccacctgtctgctgttcatgacgctctgcaagccggccgcgctggacccgagccgccgcagggctcacgagtgcatgccccaccaccctgggagccccagtgagccccagctccggctctggaagcgcctgggctccttgcgcctctccctgcacagcttccgccatggccggcccaccgtccctcgacagcccctgccgggccccgaggacaaccgcagccactgtgactacatggaatctaccaagatgtaa

SEQ ID NO: 12870 - DNA, 1053 bp, Homo sapiens
  SIMILAR (2182)..(2889): 991254mologous to Escherichia coli yejP,accession number U00008,Smith-Waterman Score=1203.
ttaaattttgcacagctttcttagctctttctgttggtaaagcaattggaagtcaggataatcatcatcaccatcatcatcaccattactaccatcatgagcatcaggatcaacattatcaccatcatcacaatcaccatcatcatcaccatcatgatcatcaggatcaacatcatcaccatcaccattatcatcatcaggatcatcattatcattatcaccatcaccaccaccaccaccaccaccaccaccaccaccaccaccaccaccatcatcatcatcattgctatcattgtggcaaatatgggagtagaggccatggagacaatggctcagtgactgggctgctgctgggagctgtacctcctgttctgtgattaatgctgagtttctggggtaagttctgggtatcaggcctcctgaaatccgcactgtacccctctgggcaacaggtttggtagaggaagaatcaggcctcgtgcttttgagtcttaagagtccccttattggcgctagacataccagcagggcttttatgccagggtaagtgttctcatacttaagaacagcatctgctccatcagaattggagcttcctttgaatgcattccttcctttgagtgaccacaaacaaaaagaaagcagagagtaccactggctgtggcagccagggctggagcaacaaaggccatgaactgtgactgctgcctgtgtcacttctcttgtgggtctgcagcttctgtgtgtctgcatgtgcgtgttggcattcctggtccttggtgtttgcatgtgggctctgctcttcttattaacttggggattattcacctgctgggtgaacagaagggccatattagaagcttttatgaacacgaatcgcataactagggaccttgggaaagacacgtgtgttttgttggagtttggccgcgggggtggggtggtatttggttggtcatgcacataggtgctggtgtatttcttgtctgcatgccttttgatcatggagaaatactctgcaaatgtctgagaattagtactttctagcatcat

SEQ ID NO: 12871 - DNA, 405 bp, Homo sapiens
  SIMILAR (130)..(300): 681254mologous to Homo sapiens ribosomal protein L18,accession number L11566,Smith-Waterman Score=210.
ttactgcttagttgcctgcaaaccacctgtatgagaataacccaaatgcttccgtaagacttgaaagcgtgtctttgaaattgaggacgggaatgtcagggaacagcttctgctatatcgagtgtgttctttgaccagctgaccctggacaccctcaaaggctgtggcaccatcctgctctctgggcctcacaagggccaagaagtgtactggcatttcagcaaggccctgggaacccagcatagccacactaagccctgtgtccactccagggaccagaaattcaagcacatcagaggcttgttcattttgatcagctatgtgaggttcaggtaagattttacgatcagtaaaaaaggtttcttgtggaagtaactggaaataagatttaccttgtagggtcat

SEQ ID NO: 12872 - DNA, 380 bp, Homo sapiens
  SIMILAR (34)..(252): 951254mologous to Homo sapiens immunoglobulin lambda- chain,accession number M75282,Smith-Waterman Score=369.
tctcaggaggcagcgctctaggacatttctttcatggcctgggctctgctgctcctcaccctcctcactcagggcacagggtcctgggcccagtctgccctgactcagcctgcctccgtgtctgggtctcctggacagtcgatcaccatctcctgcactggaaccagcagtgacgttggtggttataactatgtctcctggtaccaacagcacccaggcaaagcccccaaactcatgatttatgaggagtcaccaccagtgcacattggccctgtatttgtatccagaaccaatcaaagccacccctgagtcctgcatctctcagtaccaagctccagtcccccttcaagaccacccaccacacagacgtgcagggagcg

SEQ ID NO: 12873 - DNA, 414 bp, Homo sapiens
  SIMILAR (30)..(398): 821254mologous to Homo sapiens Lambda-immunoglobulin subgroup II V-region,accession number X62125,Smith-Waterman Score=544.
tccagcggcactgtggggacgtctccaccatggcctgtgctctgctcctcctcagcctcctcactcagggcacaggatcctggactcagtctgccctgactcagcctcgctcagtgtccgggtcgcctggacagtcagtcaccatctcctgcactggaactagcagtgatgtaggtgcttataactatgtctcctggtaccaacaacacccaggcacagcccccaaagtcatgatttatgatgtcaataagcggccctcaggggtccctgatcgcttctctggctccaagtccggcaacacggcctccctgaccatctctgggctccaggctgaggatgaggctgaatattactgctgttcatatgcaagcgactccgccttcgtattcgccgagggaccaaccggcccgacac

SEQ ID NO: 12874 - DNA, 448 bp, Homo sapiens
  SIMILAR (48)..(446): 901254mologous to Homo sapiens immunoglobulin lambda- chain,accession number M87790,Smith-Waterman Score=637.
gcatccgcgagttccgaggatcgacgatttcgtgggacgtctccaccatggcctgggctctgctgctcctcactctcctcactcaggacacagggtcctgggcccagtctgccctgactcagcctgcctccgtgtctgggtctcctggacagtcgatcaccatctcctgcactggaaccagcagtgatgttggaaattataaccttgtctcctggtaccaacagcacccaggcaaagcccccaaactcataatttatgagggcagtaagcgcccctcaggagtttctagtcgcttctctggctccaagtctggcaacacggcctccctgacaatgtctgggctccaggctgaggacgaggctgattattactgctgctcatatgcaggtagtagcacttatgtcttcggacctgggaccaaggtcaccgtcctaggtcagcccaaggc

SEQ ID NO: 12875 - DNA, 453 bp, Homo sapiens
  SIMILAR (25)..(450): 851254mologous to Homo sapiens immunoglobulin lambda light chain,accession number X57823,Smith-Waterman Score=636.
gcggtgaattcggacgtctgcaccatggcctgggctctgctattcctcaccctcctcactcagggcacagggtcctgggcccagtctgccctgactcagcctgcctccgtgtctgggtctcctggacagtcgatcaccatctcctgcactggaaccagcaatgacgttggtggttataactatgtctcctggtaccagcagcacccaggcaaagcccccgaactcataatttttgatgtcagtaatcgccccttaggcgtttctactcgcttctctggctccaagtctggtatcatggcctctctgaccatctctgggctccaggctgaggacgaggctgattattactgctgctcctttacaagtaggaatagtcgagtcttcggatctgggaccaaggtcaccgtcctgggtcacccaaaggccaaccccactgtcactctgttccccgcc

SEQ ID NO: 12876 - DNA, 777 bp, Homo sapiens
  SIMILAR (2815)..(4833): 971254mologous to Homo sapiens dJ756N5.1 (Myosin heavy chain protein IIb (KIAA15212) ),accession number AL132825,Smith-Waterman Score=3387.
  misc_feature (1)...(777): n = a,t,c or g
cgacgcagcgctctcgggacgtctccaccatggcctgggctctgctgttcctcaccctcctcactcagggcacagcgtcctgggcccagtctgccctgactcagcctgcctccgtgtctgggtctcctggacagtcgatcaccatctcctgcactggcgttggtggttatcactatgtctcctggcaccaacagcaccccggcaaagcccccaaactcttgatttttgatgtcagtgatcggccgtcaggggtttccaatcgcttctctggctcccagtctggcaacacggcctccctgaccatctctgggctccaggctgaggacgaggctgattattactgcagttcattcacaggcggctctaatctctgggtgttcggcgccgggaccaagctgagcgtcctaggtcagcccaaggctgcccccttcgtcactctgttcccgccctcctctgaggagcttcaagccaacaaggccacactggggngtctcataagtgacttctacccgggagccgtgacagtggcctggaaggcagatagcagccccgtcaaggcgggnagtggagaccaccacacccttcaaacaaagcaacaacaagtacgcggccagcagctacctgagcctgacgcctgaccgtggaagtcccacaaagctacagctgccaggtcacgcatgaagggagcaccggggagaagacaggggcccctacagatgttcataaggttttaacccgttgaagcggcccgggatttcagacttatgatcggaggac

SEQ ID NO: 12877 - DNA, 889 bp, Homo sapiens
  SIMILAR (1)..(975): 921254mologous to Homo sapiens p40,accession number U93564,Smith-Waterman Score=1553.
gtgctggggtctcaggaggcagcgctctcaggacgtcaccaccatggcctgggctctgctcatcctcaccctcctcactcagggcacagggtcctgggcccagtctgccctgactcagcctccctccgcgtccgggtctcttggacagtcagtcaccttctcctgcagtggaaccagcagtgacattggtaattataattatgtctcctggtaccgacaacacccaggcaaagcccccaaactcatgatctatgaggtcactaagcggccctcaggggtccctaaccgcttctctggctccaagtctggcaacacggcctccctgaccgtctctgggctccaggctgaggatgaggctgattattactgcagctcatacgcaggcagtaatagtttgattttcggcggagggaccaggctgaccgtcctaggtcagcccaaggctgccccctcggtcactctgttcccgccctcctctgaggagcttcaagccaacaaggccacactggtgtgtctcataagtgacttctacccgggagccgtgacagtggcctggaaggcagatagcagccccgtcaaggcgggagtggagaccaccacaccctccaaacaaagcaacaacaagtacgcggccagcagctatctgagcctgacgcctgagcagtggaagtcccacagaagctacagctgccaggtcacgcatgaagggagcaccgtggagaagacagtggcccctacagaatgttcataggttctcaaccctcacccccaccacgggagactagagctgcaggatcccaggggaggggtctctcctcccaccccaaggcatcaagcccttctccctgcactcaataaaccctcaataaatattctcattgtcaatcac

SEQ ID NO: 12878 - DNA, 637 bp, Homo sapiens
  SIMILAR (218)..(637): 831254mologous to Homo sapiens lambda-immunoglobulin light chain,accession number X51754,Smith-Waterman Score=614.
aaaaaatatgaaacgcccccaggtatgggtctggaattcccgggtagacgtctttgtcctgttccagctctaggaggttccagtcatccttgcccaaagcattccaaagtgggaagcagatcaaggccgcatctcaaaaaataatagtaaataaataattgtatacacacgagaaaaagagagagagaggaggcagcgctctcaggacgtccccaccatggcctgggctctgctcctcctcaccctcctcactcagggcacagggtcctgggcccagtctgccctgactcagcctccctccgcgtccgggtctcctggacagtcagtcaccatctcctgcactggaaccagcagtgacattggttattacgactttgtctcctggtatcaacaacgcccaggcaaagcccccaaactcatcatttttgaagtcaataagcggccctcaggtgtcccagatcgcttctctggctccaagtctgccaacacggcctccctgaccgtctctgggctccaggctgaagatgaggctgattattattgcggctcatatgctgccaatgataatggcctcttcggccgagggaccaagttgaccgtcctaggtcagcccaaggctgccccctcggtcactctg

SEQ ID NO: 12879 - DNA, 513 bp, Homo sapiens
  SIMILAR (321)..(1184): 801254mologous to Homo sapiens p40,accession number U93569,Smith-Waterman Score=1177.
atggcctgggctctgctcctcctcaccctcctcactcagggcacagggtcctgggctcagtctgccctgactcagcctccctccgtgtccgggtctcctggacagtcagtcaccatctcctgcactggaaccagcagtgacgttggtagttataaccgtgtctcctggtaccagcagcccccaggcacagcccccaaactcatgatttatgagaattttagcaactacattctaatggttatcgccacaactttgatcttaaataacagtgcagcgaacatccctacgcagactcctttgagttcctgtgtgaatatgaccacaggattcatttctaaaagtgaaattgcagatgttgctgatgctgacttgttcatctcttccaacctctgcaaacaaagtgggaaattggatttttctgaacacccagatgacaacgggagaggaggctttgtggcttcccgtaagctgactccagagccagcagtgtctgtggacagtcagcaagggtaa

SEQ ID NO: 12880 - DNA, 616 bp, Homo sapiens
  SIMILAR (59)..(616): 681254mologous to Homo sapiens immunoglobulin lambda- chain,accession number M87790,Smith-Waterman Score=585.
ccggcctcacgcgtccgcccacgcgtccgggaggcagcgctctcaggacgtcaccaccatggtctgggctctgctcctcctcaccctcctcactcagggcacagggtcctgggcccagtctgccctgactcagcctccctccgcgtccgggtctcctggacagtcaatcaccatctcctgcactggactcatcaatgacgttgctagttataactttgtctcctggtaccaacagcacccaggcaaagcccccaaactcatgatttatgaggtcactaagcggccctcagggggtccctgatcgtttctctggctccaagtctgggcaacacggcctccctggaccatctctggggctccaggcttgaggatgaggctgattattactgcttgctcatatgcaggcgactacaccccgggggtggtattcggcggtgggacccaagggtcaccgtcctagggtcagcccaaaggccaaccccaactgtcacttctggttcccgcccctcctctgaaggagctccaagccaacaaggccacactagtgtgtctgatcagtgacttctacccgggagctgtgacagtggcctggaaggcagatggcagccccgtcaag

SEQ ID NO: 12881 - DNA, 2499 bp, Homo sapiens
  SIMILAR (868)..(1881): 821254mologous to Homo sapiens p40,accession number U93569,Smith-Waterman Score=1438.
atgagcgtgcagaggaaagaccgtgtgaggactcagcaaggaggctctgtggcctcctccatgctgactcaggagccagtagggtctgtggccctgggacagtcagccagggaccgggatcctgactgctctgactcagtctccgtctacctcatggacacctggcagtcggtcatcatcggttttgctgaatcagcagcaacattgggggaccccccagagctgcccatgcatccagaaggctctgaggcctcctatgagctgacacagccaccctcggtgtcagtgtccccaggacagacggccaggatcacctgctctggagatgcattgccaaagcaatatgcttattggtaccagcagaagccaggccaggcccctgtgctggtgatatataaagacagtgagaggccctcagggatccctgagcgattctctggctccagctcagggacaacagtcacgttgaccatcagtggagtccaggcagaagacgaggctgactattactgtcaatcagcagacagcagtggtacttatcccacagtgacacaagcagacagggaaacacctacccaccagtacagcagacaccccagctatgccaagggctttgtcttcctctgggggtcctgggcccagtctgccctgactcagcctgcctccgtgtctgggtctcctggacagtcgatcaccatctcctgcactggaaccagcagtgatgttgggagttataaccttgtctcctggtaccaacagcacccagggcaaagcccccaaactcatgatttatgaggggacagtaagcggccctcaggggtctctaatcgcttctctggctccaagtctgggcaacacggcctccctgacaatctctggggttccagggttgagggacgagggttgattattactgctgctcatatgcaggctctgttgcctcctatgagctgacacagctaccctcggtgtcagtgtccccaggacagacagccaggatcacctgctctggagatgtactgggggaaaattatgctgactggtaccagcagaagccaggccaggcccctgagttggtgatatacgaagatagtgagcggtaccctggaatccctgaacgattctctgggtccacctcagggaacacgaccaccctgaccatcagcagggtcctgaccgaagacgaggctgactattactgtttgtctggggatgaggacaatccctcagtgacacaggcagatggggaagacactggcataaggagtcactacgaaggtacgctggccctgtatttgtatccagaaccagtcaaagccacctgctctgtgacctcctatgtgctgactcagccaccctcggtgtcagtggccccaggacagacggccaggattacctgtgggggaaacaacattggaagtaaaagtgtgcactggtaccagcagaagccaggccaggcccctgtgctggtcgtctatgatgatagcgaccggccctcagggatccctgagcgattctctggctccaactctgggaacacggccaccctgaccatcagcagggtcgaagccggggatgaggccgactattactgtcagagcctttctactcttggccccaaaacactgggtgacacagttctcagacccatgatttatagtgtcagtattcaggcctcaggggtccctgatggcttctctggctccaagtctggaaacacagcctccatgaccatctctgggttccaggctgaggatgaggctgattattactgcaactcacataggagaggttctgtggtttcttctgagctgactcaggaccctgctgtgtctgtggccttgggacagacagtcaggatcacatgccaaggagacagcctcagaagctattatgcaagctggtaccagcagcacccaggcaaagcccccaaactcataatttatgatggccactaatcggccctcaggggtctctaatcgcttctctgcctccaaggtctggcaacacggcctccctgaccatctctgggctccagtctgaggacgaggctgattattactgcagctcatatgcaggcagcaacactcctcgggtggtattcggcggagggaccaagctgaccgtcctaggtcagcccaaggctgccccctcggtcactctgttcccgccctcctctgaggagcttcaagccaacaaggccacactggtgtgtctcataagtgacttctacccgggagctgtgacagtggcctggaaggcagatggcagccccgtcaaggcgggagtggagaccaccaaaccctccaaacagagcaacaacaagtacgcggccagcagctacctgagcctgacgcccgagcagtggaagtcccacagaagctacagctgccaggtcacgcatgaagggagcaccgtggagaagacagtggcccctacagaatgttcataggttcccaactctaaccccacccacgggagcctggagctgcaggatcc

SEQ ID NO: 12882 - DNA, 369 bp, Homo sapiens; identical to SEQ ID NO: 7968
  SIMILAR (109)..(234): 971254mologous to Homo sapiens Human secreted protein encoded by gene 66,accession number Y36289,Smith-Waterman Score=222.

SEQ ID NO: 12883 - DNA, 394 bp, Homo sapiens; identical to SEQ ID NO: 6145
  SIMILAR (76)..(372): 871254mologous to Homo sapiens p40,accession number U93569,Smith-Waterman Score=438.

SEQ ID NO: 12884 - DNA, 1180 bp, Homo sapiens; identical to SEQ ID NO: 6149
  SIMILAR (607)..(1392): 941254mologous to Homo sapiens p40,accession number U93564,Smith-Waterman Score=1267.

SEQ ID NO: 12885 - DNA, 735 bp, Homo sapiens
  SIMILAR (316)..(732): 501254mologous to Homo sapiens p40,accession number U93571,Smith-Waterman Score=340.
gtcatgctgatacaagagatgggctcccatggccttgggcagctccacccctgtggattttcagggtacaggtctgctactggctgctttcacaagcaggtgttgagtggctgtggcttttccaggcacatggtgcaagctggcatctcagaaagaaaggcagtagacccagtcaggggcttatacataaaactcccatctccctgggacagagcacctgggggagggggcagctgtgggcacagcctcagcagacttaagtcttccttcctactggctctgaagagagcagcggatctcccagcacagtgctcaagctctgcaaagggaccaactgcctccgatcacaattcctcgccagcaagggaacgaaactggacagagattgagtttgataaattgacagaagtaggcttcagaaggtgggtaataacaaactcctctgaactaaaggagcatgttctagcccaatgcaatgaagctaagaaccttgaaaaaaggttagacaaattgctaactagaataaccagtttagagaagaacataaatgaactgatggaactgaaaaacacagcacgagaactttgtgaagcatacacaagtatcaatagccaaattgatcaagcggaagaaaggatgtcagagattgaagatcaacttaatgaaataaagcatgaagacaagattagagaaagaagaatgaaaagtaatgaacaaagcctccaagaaatatga

SEQ ID NO: 12886 - DNA, 716 bp, Homo sapiens
  SIMILAR (264)..(695): 531254mologous to Homo sapiens p40,accession number U93574,Smith-Waterman Score=365.
gacataaagagttggtgcatgctgtgccctatatttggctgcatgctgaaaagcacaagacttcatccagcacaaccattccacttacacatccagggatgctctgtttcactgctgatgagagaactgggcagatgcctgccttggcccaggcactccccgacttcagccttcacccattcctcacaggcattactcttactccagcaggtcaacaacatcaaagaccaaaggtagataaatccacgaagataaggaacagccagcacaaaaaggttgaaaattccaaaaaccagaatgcctcttctcctccaaaggatcacaactccttgccagcaagggaacaaaaccggactgagaatgagtttgatgaattgacagaagtaggcttcagaaggtgggtaataacaaactcctctgagctaaaggagcacattctaacccaatgcaaggaagctaagaaccttgaaaaaagattacaggaattgctaactagaataaccagttcagggaagaacataaattacctgatggagctgaaaatcacagcacaagaacttaatgaagcacacgtaagtatcaatagcgaaatcgatcaagtggaagaaagaatatcagagattgaagatcaacttaatgaaagaaagcatgaagacaagattagagaaaaaacaatgaaaaggaacaaagcctccaagaaatatggcactatgtga

SEQ ID NO: 12887 - DNA, 1014 bp, Homo sapiens; identical to SEQ ID NO: 11685
  SIMILAR (457)..(1011): 941254mologous to Homo sapiens p40,accession number U93564,Smith-Waterman Score=887.

SEQ ID NO: 12888 - DNA, 1266 bp, Homo sapiens
  SIMILAR (727)..(1263): 971254mologous to Homo sapiens p40,accession number U93569,Smith-Waterman Score=873.
atgggaggaccattcaaaccaaaggcaaagaagtttgaaaactttgaaaaaaatttagaagaatgtataactagaataaccaatacagagaagtgcttaaaggagctgatggagctgaaaaccaaggctcgagaagtacgtgaagaatgcagaagcctcaggagccaatgcgatcaactggaagaaagggtatcagcaatggaagatgaaatgaatgaaatgaagcaagaagggaagtttagagaaaaaagaataaaaagaaatgagcaaagcctccaagaaatatgggactatgtgaaaagaccaaatctacgtctgattggtgtacctgaaagtgatgtggagaatggaaccaagttggaaaacactctgcaggatattatccaggagaacttccccaatctagcaaggcaggccaacgttcagattcaggaaagacagagaacgccacaaagatactcctcgagaagagcaactccaagacacataattgtcagattcaccaaagttgaaatgaaggaaaaaatgggactcctggttccaaactggaccaaccactcacccctatttcgggctattctttttgattataagggattttgccgatttgggaccacccatcaaacaggattttcgcctgctggggcaaaccagcgtggaccgcttgctgcaactctctcagggccaggcggtgaagggcaatcagctgttgcccgtctcactggtctgattggtgtacctgaaagtgatgtggagaaggaaaccaagttggaaaccactctgcaggatattatccaggagaacttccccattctagcaaggcaggccaacgttcagattcaggaaatacagagaacgccacaaagatactcctcgagaagagcaactccaagacacataattgtcagattcaccaaagttgaaatgaaggaaaaaatgttaagggcagccagagagaaaggtcgggttaccctcaaagggaagcccatcagactaacagcggatctctcggcagaaaccctacaagccagaagagagtgggggccaatattcaacattcttaaagaaaagaattttcaacccagaatttcatatccagccaaactaagcttcataagtgaaggagaaataaaatcctttacagacaagcaaatgctgagagattttgtcaccaccaggcctgccctaaaagagctcctgaaggaagcactaaacatggaaaggaacaaccggtaccagccgctgcaaaatcatgccaaaatgtaa

SEQ ID NO: 12889 - DNA, 1395 bp, Homo sapiens; identical to SEQ ID NO: 11689
  SIMILAR (607)..(1392): 941254mologous to Homo sapiens p40,accession number U93564,Smith-Waterman Score=1267.

SEQ ID NO: 12890 - DNA, 1227 bp, Homo sapiens
  SIMILAR (292)..(1224): 681254mologous to Homo sapiens p40,accession number U93569,Smith-Waterman Score=1093.
atggccaaacaggaacaactccagtttgtagctcccagcaagatcaatgcagaaggcagagcacctcggggaaggggtggctgtgggcgcagcttcagcagacttaaatgttcctgcctgccagctctgaaaagagcagtggatttcccggcacagctttcaacctctgctaagggacagactgcctcctcagaaagtaacagcatcaacatcaaccaaaaggacgtccacacagaaactccatctgaacctcaccaacatcaaagacctaaggtagataaatccacaaagatgaggaaaaaccagcgcaaaaaggctgaaaattccaaaaaccagaatgcctcttctccaaaggatcacaactcctcaccagcaagggagcaaaactggatggagaatgagtttgatgaattgacagaagtaggcttcagaaggtgggtaataacaaactcctctgagctaaaggagcatgttctaacccaatgcaaggaaggtaaaaaccttgaaaaaaggttagaggaattgctaactagaataaccagtttagagaagaacataaatgacctgatggaactgaaaaacacagcacaagaacttcatgaagcatacacaagtatcaatacccaaatcgatcaagcagaagaaaagatatcagagattgaagatcaactcaatgaaataaaaccaaatctacgtctgattggtgtacctgaaagtgatggggagaatggaaccaagttggaaaacactctgcaggatattatccaggagaacttctccaacctagcaaagcaggccaacattcaaattcaggaaatacagagaacaccacaaagatactcctcgagaagaacaaccccaagacacataattatcagattcaccaaggttggaatgaaggaaaaaatgttaagggcagccagagagaaaagtcgggttacccacaaaggaaagcccatcagactaacagtggatctctcggcagaaaccagaaaagagtgggggccaatattcagcatttgtaaagaaaagaattttcaacccagaatttcatatccagccaaactaagcttcataagcgaaggagaaataaaatcctttacaaacaagcaaatgctgagagattttgtcaccaccaggcctgccctacaagagctcctgaaggaagcactaaatatggaaaagaacaaccggtaccagccactgcaaaaacataccaaattgtaa

SEQ ID NO: 12891 - DNA, 1027 bp, Homo sapiens
  SIMILAR (128)..(2743): 991254mologous to Homo sapiens potassium channel; KvEBN1,accession number AF033348,Smith-Waterman Score=4600.
atggggaaaaaacagaacagaaaaactggaaactctaaaaagcagagcgcctctcctcctccaaaggaacgcagttcctcaccagcaacggaacaaagctggatggagaatgactttgacgagcagagagaagaaggcttcagacgatcaaattactctgagctacgggaggacattcaaaccaaaggcaaagaagttgaaaactttgaaaaaaatttagaagaatgtataactagaataaccaatacagagaagtgcttaaaggagctgatggagctgaaaaccaaggctcgagaactacaaagggtatcagcgatggaagatgaaatgaatgaaattaagcgagaagggaagtttagagaaaaaagaataaaaagaaatgagcaaagcctccaagaaatgtgggactatgtgaaaagaccaaatctacgtctgattggtgtacctgaaagtgatggggagaatggaaccaagttggaaaacactctgcaggatattatccaggagaacttccccaatctagcaaggcaggccaacgttcagattcaggaaatacagagaacgccacaaagatactcctcgaggagagcaactccaagacacataattgtcagattcaccaaagttgaaatgaaggaaaaaatgttaagggcagccagagagaaaggtcggtttacccacaaagggaagcccatcagactaacagcggatctctcggcagaaaccctacaagctagaagagagtgggggccaatattcaacattcttaaagacaagaattttcaacccagaatttcatatccagccaaactaagcttcataagcgaaggagaaataaaatactttacagacaagcaaatgctgagagattttgtcaccaccaggcctgccctaaaagagctcctgaaggaagcgctaaacatggaaaggaacaaccggtaccagccgctgcaaaatcatgccaaaatgtaaagaccatcgagactaggaagaaactgcatcaactaacaagcaaaatcaccagcta

SEQ ID NO: 12892 - DNA, 954 bp, Homo sapiens
  SIMILAR (271)..(852): 571254mologous to Homo sapiens p40,accession number U93570,Smith-Waterman Score=545.
atggatggagatctccacaagggagtggctgtgttctggccaccagatgctgctggaggccacacctgctgcaggagcatggtctgcaggagcctgctaggaggagcacagtggaaatttcatagttttaggtgtaggatccgttttgaattaattttacatatgatacaagaaaggaatagcatcaacatcagccaaaaggacgtccacacagaaactccatctgaaactcaccatcatcaaagaccaaaggtagataaatccatgaagatgaggagaaaccagtgcaaaaaggctgaaaattccaaaaaccagaaagcctcttctcctccaaaggaacacaactcctggagagcaagggaacaaaactggacagagaatgagtttgacaaattgacggaagtaggcttcagaaggtgggtaataacaaactcctctgagctaaaggagcatattctaacccaatgcaaggaagctaagaaccttgaaaaaacattagaggaattgctaactagaataaccagtttagagaagaacataaatgacctgatgaagctgaaaaacacagcatgagaacttcgtgaagcatacacaagtatcaatagccaaatcagtcaagcggaagaaaggatatcagagattgaagatcaacttaatgaaatgaagcatgaacacaggattagagaaaaaagaatgaaaaggaacaaacaaagcttccaagaaatatgggactatgtgaaaagaccaaacctacgattgatcagtgtacctgaaagtgacggggagaatggaaacaagtaggaaaacatacttcaggatattatccatggagaacttccccaatctagcaaggcaggccaatattcaaattcaggaaatacagagaacgccacagagatactcctcgagaagagcaactccaagacacataattgtcagattcaccaaagttga

SEQ ID NO: 12893 - DNA, 2227 bp, Homo sapiens
  SIMILAR (211)..(1014): 971254mologous to Homo sapiens protein-tyrosine- phosphatase,accession number X79510,Smith-Waterman Score=1391.
atgggggccagggcagggggcagctgcagctgtttaatgtggctcctcttggcttctggacactttatgggctgtgtggctgctggtgacactgttggaccagagaagttcagatcctgctataccattacccttttacagtcgaagctctcatattcatttgggaagaacaataaaaatttccagttaaggaaatgcttacagacagttgataacctctttgtgcccaaccagaacggatactactgtcactctcagacaagcttggatagagcccagattgacctcaacggtcggatccgtaatggcagtgtctacagtgcacacagcaccaactccttaaataatcctcagccctacttgcagccctcgccgatgtcgtccaaccctagcatcaccgggagtgacgtcatgaggcctgactacctcccgtcccatcggcacagcgccgtgatacccccgtcctaccgccccaccccagactatgagactgtgatgaagcagctcaacaggggcctggtgcatgcggaacggcagagccactcgctgcgaaacctcaacatcggcagctcgtacgcctacagcaggcccgcggcgctggtctacagccagcccgagatccgcgagcacgcacagctcccctcgccagcggccgcacactgcccgttcagcctgagctacagcttccacagcccgtctccctacccctaccctgccgagcggcggcccgtggtgggcgcggtcagcgtgccggagctgaccaatgcgcagctgcaggcgcaggactacccgtctcccaacatcatgcggacgcaggtgtaccggccacccccaccctacccgccccccaggcccgccaacagcacgccagacctgtcccgccacctttacatcagcagcagcaaccccgacctcatcacgcggcgcgtgcaccactcggtgcaaacgttccaggaggacagcctgcccgtggcgcactcgctgcaggaggaacgcagttcctcaccagcaacggaacaaagctggacggagaatgactttgacgagctgagagaagaaggcttcagacgatcaaattactccgagctacgggaggacattcaaaccaaaggcaaagaagttgaaaactttgaaaaaaaatttagaagaatgtataactagaataaccaatacagagaagtgcttaaaggagctgatggagctgaaaaccaaggctcgagaactacgtgaagaatgcagacgcctcaggatgccgatgcgatcaactggaagatagggtatcagcaatggaagatgaaatgaatgaaatgaagcgagaagggaagtttagagaaaaaaagaataaaaagaaatgagcaaagcttccaaagaaataggggactatgtgaaaagaccaaatctacgtctgattggtgtacctgaaagtgatgtggagaatggaaccaagttggaaaacactctgcaggatattatccaggagaacttccccaatctagcaaggcaggccaaccgttcagattcaggaaatacagagaacgccacaaagatactcctcgagaagagcaactccaagacacataattgtcagattcaccaaagttgaaatgaaggaaaaaaatgttaaaggcagtcagagagaaaggtcaggttacccacaaagggaagcccatcagactaacagcggatctttcggcagaaactctataagccagaagacagagtgggggccaatattcaacattcttaaagaaaagaatttttcaacccagaatttcatatccagccaaacctaagcttcataagtgaaggagaaataaaatactttacagacaagcaaatgctgagagatttttgtcaccaccaggcctgcccttaaaagagctcctgaaggaagcactaaacatggaaaggaacaaccagtaaccagccactgcaaaaacatgccaaatttgtaaagaccattgaggctagggaagaaacttgcatcaactaacgggcaaaataaccagctaacatcataatgacaggattcaaattcacacataacaatattaaccttaaatgtaaataggctaaatgctcgaattaaaagacacagactgggcaaattggataaagaatcaagacccatcagtatgctgtattcaggagacccatctcacgtgcagagacacacataggctcaaaataaagggatggaggaagatctaccaagcaaatggaaagc

SEQ ID NO: 12894 - DNA, 318 bp, Homo sapiens
  SIMILAR (1)..(318): 921254mologous to Homo sapiens synaptotagmin VII,accession number AF038535,Smith-Waterman Score=486.
gggagccgaggggagctgctcttgtctctctgctacaacccctctgccaactccatcatcgtgaacatcatcaaagcccggaacctcaaagccatggacatcgggggcacatcagacccctacgtgaaggtatggctgatgtacaaggacaagcgggtggagaagaagaagacggtgacgatgaagaggaacctgaaccccaatttcaatgagtcccttcgccttcgatatcccccacggagaaagctgagggagacgaccatcatcatcactgtcatggacaaggacaagctcagccgcaatgacgtcatcggcaag

SEQ ID NO: 12895 - DNA, 396 bp, Homo sapiens
  SIMILAR (318)..(40): 411254mologous to Ovis aries cytochrome b561,accession number D88157,Smith-Waterman Score=152.
ctcctcttcaccttagagttggggaccccactgcactcacaaactgaagaaaagcttctcattaatgcccgaaatgacggatgcgatggacagagagaggatggcggctccaaaaaagacgtggataggttttaggaggctgcgcagccacatggacgcccagggcaggaggaagacagcaaagcccaggaaccactgtggacaaaagggaggacacacccgactgtgctatgtgtgaccaaagcacatcccaccccatcagtgcctcctccccatctctgctccctggctcttctttcacaactcaaaccttcccacctggcattgcccactaccgtgctagcttcctcattgtggcctattacccaagcaacaagaacagtaaatgacatgctt

SEQ ID NO: 12896 - DNA, 976 bp, Homo sapiens
  SIMILAR (176)..(2737): 1001254mologous to Homo sapiens neuronal delayed-rectifier voltage-gated potassium channel splice variant,accession number AF074247,Smith-Waterman Score=4495.
gttatagggggcagaggccttcatgtaagtatctggtggaggccccactgtagcgtttggtggggggaagaaggctggattgaggtgaagggcaggtgggatggccccagggggaggtacagcaagatgaggaggtaatcgaggaggtgggggcatgagatgctggtagtggataccaggaggaggaggagggaccccaaagcttgaggagagaggtggtgggggtggaattggtggtgggggcagacccatcaggggaagggccgaaggaggacgattgaagtagggcagcacactggggggcttatccacacgagcagatgagggtacaaggttctcagagggtgtggcccgtccatcagcagaatcactagaatctcgggaatgggcccgtggaggtattccccctcttgggactcggacacactcacgtttccgagcctgtgcctcaaactgtgacaggttctgccgggtggccggcctcacgtccactttttctccattaagaactttccctggtaggagttccaacaattttggggacagagcttccagaggctaccaccacctcagcatacccctttggactggccatttgctcgattctctgcaaatttcaactccaccacatcatagactcctatagagcgaataacctggatcagctgctggtctgtggtcccccaggagaagctgcccacataaacggcagctcgtctattacgcaggccactgtaggtatacagaattgcaggggtcttgttgttgggcttgggagatggctcctggcgaacaggaggaggtggttcagtgctgctgcttctgtcatctgagggctgtgaggtggctgtcagcacatcatcatacaggtcaatctgatctgtattgttgaactctgggtcctggttgaactcctcgtcagcatatatatcaatcaagtccactccttctgacatggctccgacgaaatcgtcga

SEQ ID NO: 12897 - DNA, 1182 bp, Homo sapiens
  SIMILAR (676)..(795): 871254mologous to Rattus norvegicus synaptotagmin VII,accession number U20106,Smith-Waterman Score=168.
atggccgtggcacttatggaccactgcgttgcccccaggatgcacctttcctctctgaatgtgccccctggtctccccttgcacggagcccagcctctgaccaacctcattaagctctcctgcaagtggcctaagggctactacattccagccttggcccctgcgcttcccgtaaaaccaccaggccgccccccttgccagttgtggtggatgcgcctgctgcattgtcgcgtaaggaacgagtcctctttcacgatcgggctgcgacgagcaagtgaccacgcgcatttattcaccggtacgtatgctgaggtggtggtagcctctgaaaactctgtccacaaattgttggaactcctaccagggaaagttcttaatggagaaaaagtggacgtgaggccggccacccggcagaacctgtcacagtttgaggcacaggctcggaaactgtccctgctggaggatgagtatagtaatgtcagctacatgcagcgctctggaacgtacgtgatatgtagcatagtcgctggcagtgagcgcacatcaccaatccgagttggtggcgtgagggaccacagcacagataggaaccgagagggatcccgctttgagcttaatagccagccgagcaacgtgcacggaccaggtaaccacgcacaccggagccccgcaccaggcagggggagccgaggggagctgctcttgtctctctgctacaaaccctctgccaactccatcatcgtgaacatcatcaaagcccgggacctcaaaaacatggacatctggggcacatcattggttcctgggctttgctgtcttcctcctgccctgggcgtccatgtggctgcgcagctcctaaaacctatccacgtcttttttggagccgccatcctctctctgtccatcgcatccgtcatttcgggcattaatgagaagcttttcttcagtttgcatcctgaagtgcatcacctgacaccccgactagtacaccggggtgcggagaaccgagcaaaagctgatctaccaacttccgcggggtacctacagcgactcgctcccgccccacttcgtacacagaccatcccaacctactcacacgacgaccacacacaacaacgactcaccacaccacctaccgcgcacaacgacggcaaccggacaataccgacccaccccaaatga

SEQ ID NO: 12898 - DNA, 635 bp, Homo sapiens
  SIMILAR (481)..(591): 451254mologous to Streptomyces ansochromogenes SanE,accession number AF228524,Smith-Waterman Score=81.
gagcctgccaacttcaacaacagaataaacgatataatatcaacacgcaatgtgcccagagacccaggaaatccggactgcggcaaagatcggaaacgcctcgtcggggcaggagccgcgagcgggaacgtcgccctcgtccgggccaggcgggcgaaggcggcgaagggcgccacggttgtggacggctactttccgcgccaaggcgcgagccccggggtccttttgtttctgggaggggacaacaaaagaccctgccgccctggcgagcggcgtcggcggagccagagtggccccggcgcctcggcgcgaactctgtccctttcctcgcggtcccggccgctcttaccgtcccggtcgcacagctgaatggcctccaggctgaggtttttgatcacctcctcacaggggctgcctcaatcaccgcccccatgatagcgcctacagcctcttctgttcataccttcgctgtgttcgcacggtcggagcgcactggtcaacccttcctcaccctgacattcctcctacactacaccgcccgctggcaccggctgcccaacatgtgccggaccgtcgtacagcggtcatccgatcctaacctcacgatttgtattgatcggctcactctgtactag

SEQ ID NO: 12899 - DNA, 619 bp, Homo sapiens
  SIMILAR (583)..(362): 451254mologous to Homo sapiens hGCN5,accession number AF029777,Smith-Waterman Score=111.
tactgtatattcagttcttgggcttaaaaacccagtgtctccggacaagtcataggcaagggaacagcttttgccaccaaattttgtggaaacatccttgtgtttaaatttattggagttcttgttctctttcttgttgaggtcaataaaatagtgtgtaatgcgatcctttgattttgaatccatttcccatgaaatcttgaatgagtcacacgttatattgcttattttgatgttatgtggtacaggaagttcttccatctctgctatgccactgtcttgtgatttgttcccgtcccggtcgcacagctgaatggcctccaggctgaggtttttgatcacctcctcacaggggctggtggggctgttgagggcatgatccaggcgcggcacctccatttttccaacccactctgaagcccgcctgcttcgtatccaggctctctctgccggccgggtgggcaagaagagcgggaaagggagggggagtggcagagggagggaaggaggcctgggacgcggtgatgcggtgccgaggctgaggcgcggggctggagagccgccgcgaaggcgacggctgtggcaggagcacgaaatcgtcgacccgggatttccggac

SEQ ID NO: 12900 - DNA, 1185 bp, Homo sapiens
  SIMILAR (126)..(1): 851254mologous to Homo sapiens Human secreted protein, SEQ ID NO: 7217,accession number G03136,Smith-Waterman Score=182.
atggatgaagatggaaaccgtcattctcagcaaactatcacaagaacagaaaaccagacaccgcatgttctcactcataagtgggagttgaacaatgagaacacatggacacagggaggggaacatcacaccggggcctgtcggggaagcgtacccggctacgcctacgcccaacggcatttagctttggcgatatttgctgccgcgcacgaccagtacgcgaaccatattgtcacacgaagagaccgctacctgcgggactgtgcgttgctttttggtggtgggcggtacacctttggggacatggtgcactacgccaacgcgagtttacttaagtgtgtgattagacgaaaccataaagacgggggcagacggcagacgccggcccgcttccagaaaggaggcccaggagccgatataatacacttgcctgaagtgaaccctaccgcaacccggcgtgcgaaagggttgtcggccacatacggccgtgtcaccaaggggcacatggacacccagcaacgccgagttttacacctcagggccctagacccagcagccaacggtcactcccctgaaaaggtaaatcaaggggtttcttcttggtttggatccattgctggtctagtcacccagcaggtctaccaggctctgggctggtacagcagaggggttgtctgcacagagtcctgtgatgtgaacttccatgggtctctcagccatggataccagcacctgttctggtggaggtacttttcatttttaactcctaataacaaccctaatgaagtagctattattactcccccctcccccactcagcagataggggaactctgggccacaaaagtcaaacaacttaccgaacagctccaaaagaggttcccagaccccctgatttacctgctccagcctggggtggctgctcacctccaggtgatggcctcgggggagcctcttaagacttggagcagaggtggctccgaactgaaggacactgacaattggcagcttgcctctgtcctcttctctcccttccctcacaggaacggagctggacaactgagctcaccatacgaacgatcgaatcttattgcggaacatctgcgagccacgatccgtgctagtgggcagcaaccattcaaactacgagggcattcaaccatctcgctctttaacatcgtctag

SEQ ID NO: 12901 - DNA, 764 bp, Homo sapiens
  SIMILAR (333)..(467): 461254mologous to Homo sapiens PRLTS protein amino acids 267- 313 (exon 6 product),accession number R95937,Smith-Waterman Score= 121.
acctatcttcctcccctaagcccaccatcccagcttcagcaacatcagtccaactaggagaaaacttcagtgtgacctacctggttctgggtgagccagagattgctatggactttagctgcggtatatccagggcagaagataaacgctgcatctcccttcactcattgattccccagaggtggtcagaacggggacatgtacagtctgacaatgcacagaaggcagaaacaatgctttccatattactacggcttcaaacctgggtaatatggacattaagccaggtaaatcaaggggtttcttcttggtttggatccgttgctgacctatcttcctcccctaagcccaccatccaagcttcagcaacatcagtccaactaggagaaaacttcagtgtgacctacatggttctgggtgagccagagattgctatggactttagctgggtatatccagggcagaagctggctctggccgttccagcccgtggaatcagcatcattgcatctcccctcacagtaaggacagggccactgggcatctctttcagcagcaagatcccagagactgaaaaacagttaaccaggaatgaagagaaagctcaggatggccacgtggcctcttcagatctgaaggtctgtaacagggcagggaaaaaagaaagcaccaaaaggtcaatgcagaaatcacggagtggcaaagtatctatcaaagccaactgtctgggctcgaaagctgatagacagaagctagtacagtga

SEQ ID NO: 12902 - DNA, 1302 bp, Homo sapiens
  SIMILAR (95)..(883): 1001254mologous to Homo sapiens olfactory receptor,accession number AF211942,Smith-Waterman Score=1363.
tgataagacaggttgaatcacactggggtgacagcctcatccctccaggtacaaacaagaacaggccatggttaaccaaagctccacaccgggcttcctccttctgggcttctctgaacacccagggctggaaaggactctcttcgtggttgtcttcacttcctacctcctaaccctagtgggcaacacactcatcatcctgctgtctgcgctggaccccaagctccactctccaatgtactttttcctctccaacctctccttcttggacctctgtttcaccacgagttgtgttccccaaatgctggtcaacctctggggcccaaagaagaccatcagcttcctggactgctctgtccagatcttcatcttcctgtccctggggacaactgagtgcatcctcttgacagtgatggcttttgatcgctacgtggctgtctgccagcccctccactatgccaccatcatccacccccgcctgtgctggcagctggcatctgtggcctgggtcattgggctagtggagtcagtggtccagacaccatccaccctgcacctgcccttctgccccgatcggcaggtggatgattttgtctgtgaggtcccagctctaattcgactctcctgtgaagacacctcctacaatgagatccaggtggctgttgccagtgtcttcatcttggttgtgcctctcagcctcatccttgtctcttacggagccattacctgggcagtgctgaggattaactctgcaaaagggcggaggaaagcttttgggacctgctcctcccatctcactgtggtcaccctcttctacagctcagtcattgctgtctacctccagcccaaaaatccctatgcccaagagaggggcaagttcttccctacacacacctggggaatgcactctgcaggccacatgacgttgcttctgcatctgtctccctagctttgctgcatcagtcccagtgtccagcccacacaggcctcagtacgtgtccctatcacagctaagggcaaagtcacagaattatctgtttcaaaagcctgagtggataaacaaactgttgcctatccagggtgtcctaaaactaccaaggactgtgggaggagcaattggcaggaccatcttcaactgatgccaactattcattttccaaactgcaggcttatctactccatagacttcttctcttttcctagcggatatttcactgtgggaagaagagagactcaaattaagtccaactggtccaaggtggataatcacagtggaaagttttttagtggaagttcagaaat

SEQ ID NO: 12903 - DNA, 1302 bp, Homo sapiens
  SIMILAR (28)..(885): 991254mologous to Homo sapiens olfactory receptor,accession number AF211940,Smith-Waterman Score=1479.
atggttaaccaaagctccacaccgggcttcctccttctgggcttctctgaacacccagggctggaaaggactctcttcgtggttgtcttcacttcctacctcctaaccctagtgggcaacacactcatcatcctgctgtctgtgctggaccccaagctccactctccaatgtactttttcctctccaacctctccttcttggacctctgtttcaccacgagttgtgttccccaaatgctggtcaacctctggggcccaaagaagaccatcagcttcctggactgctctgtccagatcttcatcttcctgtccctggggacaactgagtgcatcctcttgacagtgatggcttttgatcgctacgtggctgtctgccagcccctccactatgccaccatcatccacccccgcctgtgctggcagctggcatctgtggcctgggtcattgggctagtggagtcagtggtccagacaccatccaccctgcacctgcccttctgccccgatcggcaggtggatgattttgtctgtgaggtcccagctctaattcgactctcctgtgaagacacctcctacaatgagatccaggtggctgttgccagtgtcttcatcttggttgtgcctctcagcctcatccttgtctcttacggagccattacctgggcagtgctgaggattaactctgcaaaagggcggaggaaagcttttgggacctgctcctcccatctcactgtggtcaccctcttctacagctcagtcattgctgtctacctccagcccaaaaatccctatgcccaagagaggggcaagttctttggtctcttctatgcagtgggcactccttcacttaaccctctcatatacaccctgaggaacaaggagctttgctgcatcagtcccagtgtccagcccacacaggcctcagtacgtgtccctatcacagctgctgctggtgctgaactcaccttccaggagagtctccagcatatccttccacactccagggagccatggtgtcctaaaactaccaaggactgtgggaggagcaattggcaggaccatcttcaacacttcccattttctgctggggtgagatcacagctggcccccaagcatccagaggaatccagggcctgcggatatttcactgtgggaagaagagagactcaaattaagtccaactggtccaaggtggataatcacagtggaaagtttttcaagtactggtctaagattcaaccagcccatgctttagtggaagttcagaaattggctcttaacagctgtcttacaaaaatctga

SEQ ID NO: 12904 - DNA, 1179 bp, Homo sapiens
  SIMILAR (28)..(885): 991254mologous to Homo sapiens olfactory receptor,accession number AF211942,Smith-Waterman Score=1479.
atggttaaccaaagctccacaccgggcttcctccttctgggcttctctgaacacccagggctggaaaggactctcttcgtggttgtcttcacttcctacctcctaaccctagtgggcaacacactcatcatcctgctgtctgcgctggaccccaagctccactctccaatgtactttttcctctccaacctctccttcttggacctctgtttcaccacgagttgtgttccccaaatgctggtcaacctctggggcccaaagaagaccatcagcttcctggactgctctgtccagatcttcatcttcctgtccctggggacaactgagtgcatcctcttgacagtgatggcttttgatcgctacgtggctgtctgccagcccctccactatgccaccatcatccacccccgcctgtgctggcagctggcatctgtggcctgggtcattgggctagtggagtcagtggtccagacaccatccaccctgcacctgcccttctgccccgatcggcaggtggatgattttgtctgtgaggtcccagctctaattcgactctcctgtgaagacacctcctacaatgagatccaggtggctgttgccagtgtcttcatcttggttgtgcctctcagcctcatccttgtctcttacggagccattacctgggcagtgctgaggattaactctgcaaaagggcggaggaaagcttttgggacctgctcctcccatctcactgtggtcaccctcttctacagctcagtcattgctgtctacctccagcccaaaaatccctatgcccaagagaggggcaagttctttggtctcttctatgcagtgggcactccttcacttaaccctctcatatacaccctgaggaacaaggagctttgctgcatcagtcccagtgtccagcccacacaggcctcagtacgtgtccctatcacagctgctgctggtgctgaactcacccttgcaggagagtttccagcatatcctaccacactccagggagccatcggatatttcactgtgggaagaagagagactcaaattaagtccaactggtccaaggtggataatcacagtggaaagtttttcaagtactggtctaagattcaaccagcccatgctttagtggaagttcagaaattggctcttaacagctgtcttacaaaaatctga

SEQ ID NO: 12905 - DNA, 646 bp, Homo sapiens
  SIMILAR (148)..(420): 931254mologous to Mus musculus MILI (Miwi like),accession number AB032605,Smith-Waterman Score=497.
atggatggattcggcatcagccacaacgacggtcctatttatacctctttgtgctgcaatctaatggaccgcattggtttccacaaggctctggaactttcaccagtctgggtcaatctttatgttaatttttcagcttgtggcccttcagcatgctgggtggatttctatcttcttgcccatcatgtacggcagggctgtggcattcctacgcattatgtctgtgttctcaacaccgcaaacctgagccctgatcatatgcagaggctgactttcaaactgtgccacatgtactggaattggcctggcaccatcagagttccagctccttgcaagtatgcccacaagctagctttcctgtcaggacacatcttgcatcatgaaccagccatccagctgtgcgagaacctgttcttcctgtgactgcacagcttggagatgggctggtgagaagaaaggcggcctcagaactcagctgtgactcttgcagaatcaacagagactgaagtgggcttttgtgttataattttccctttctccaaccctgtagaataagatttctttcttgtcttttaaacctaatatcaccaagaagcaagtgtctgagtaacagctgaaaatggccttgatgcctgtgtagagcaag

SEQ ID NO: 12906 - DNA, 404 bp, Homo sapiens
  SIMILAR (140)..(262): 871254mologous to Homo sapiens calbindin D28K,accession number S46006,Smith-Waterman Score=190.
  misc_feature (1)...(404): n = a,t,c or g
nnnnnnnnnnnnnnnnnnnnnnnnnnnnnnnnnnnnnnnnnnnnnnnnnnnnnnnnnnnnnnnnnnnnnnnnnnntgtgagtgaaatttggtcccgaaatttggtgccgtgactcggatcaggggcgtgggggggtggggacctcccttgggagatcaatcccctgtcctcctgctctttgctccgtgagaaagatctacttacgacctctggtcctcagaccaaccagcccaaggaacatctcaccaattttaaatcgggaccccactgttcaactcacctggcagccactcccagagcccctggaactctggcccaaggctctctgactgactccttcccagatttactcggcttagcggctgaagaccgatgctgcccgattgcctcggaagccccctaga

SEQ ID NO: 12907 - DNA, 381 bp, Homo sapiens
  SIMILAR (1)..(81): 811254mologous to Homo sapiens Human secreted protein, SEQ ID NO: 5576,accession number G01495,Smith-Waterman Score=98.
atggtctacagggcttccgaggcgatcgggcagtgtcagtcttcagctgctaagccgagaagatctgggaaggagtcagtcagagagccttgggccagagttccagggggctctgggagtggctgccagagatgggacgcggcttacgaggaatcccaggctgcaggcattccttggcctgatggccagatttccagcacttgtagcaagctcctgggggaggaggttctggaggaatgcctggctgctgcggttcaggcgtttggaagttcttgtgtgctggagatgtggctggggtttgtctcacagtggaggcaaggaattgcaactcagaaatatattgctacttggctgtctctactctattattgtacaccttga

SEQ ID NO: 12908 - DNA, 751 bp, Homo sapiens; identical to SEQ ID NO: 10177
  SIMILAR (1080)..(685): 861254mologous to Homo sapiens putative p150,accession number U93563,Smith-Waterman Score=596.

SEQ ID NO: 12909 - DNA, 629 bp, Homo sapiens
  SIMILAR (114)..(611): 781254mologous to Homo sapiens reverse transcriptase homolog= pol {retroviral element},accession number S61070,Smith-Waterman Score=633.
ataccacacctgaccctcatgactgtatctctctgatccacctgacattcaccccatttccccatatttccttctttcgtgttcctcacccttatcacatttggtttattgatggcagttccaccaggcctaaccgccactcaccagcaaaggcaggctatgctatagtatcttccacatctatcattgaggctactgctctgcccccctccactacctctcagcaagccgaactagttgccttaactcaagccctcactcttgcaaaaggactatgcgtcaatatttatactgactctaaatatgcctttcatatcctgcaccaccatgcaagaggtttcctcactacacaagggtcctctatcattaatccctctttaatgaaaatacttctcaaagctgctttacttccagaggaagctggagtcattcaccacaagggccatcgaaaggcatcagattccattgctctaggcaacacttacgctgataaggtggctagacaagaagctagcattccaacttctgtccctcaccgccagtttttctccttcatatcagtcactcccacctactcccccgctgaaacttccacctatcatctcttcccacacaaggcaaatggttaa

SEQ ID NO: 12910 - DNA, 487 bp, Homo sapiens; identical to SEQ ID NO: 1994
  SIMILAR (168)..(299): 551254mologous to Homo sapiens calbindin D28K,accession number S46006,Smith-Waterman Score=116.

SEQ ID NO: 12911 - DNA, 1238 bp, Homo sapiens; identical to SEQ ID NO: 6711
  SIMILAR (291)..(998): 291254mologous to Baboon endogenous virus strain M7 gag-pol precursor polyprotein,accession number D10032,Smith-Waterman Score= 232.

SEQ ID NO: 12912 - DNA, 513 bp, Homo sapiens; identical to SEQ ID NO: 10180
  SIMILAR (206)..(6): 731254mologous to Homo sapiens neutral protease large subunit,accession number M27826,Smith-Waterman Score=227.

SEQ ID NO: 12913 - DNA, 462 bp, Homo sapiens; identical to SEQ ID NO: 10181
  SIMILAR (71)..(130): 901254mologous to Homo sapiens Human secreted protein, SEQ ID NO: 5576,accession number G01495,Smith-Waterman Score=108.

SEQ ID NO: 12914 - DNA, 213 bp, Homo sapiens
  SIMILAR (71)..(127): 941254mologous to Homo sapiens Human secreted protein, SEQ ID NO: 5576,accession number G01495,Smith-Waterman Score=106.
atggtccaggaggcttctgaggtgatcgggcagcttcagtcttcagctgctaagctgagaagatctgggaaggagtcagtcagagagtcttgggccagagttccaggggctctgggagtggttgccagtcccaaccccaagcgttgctttcaatcttccttttctaccgacccatctgacctctcccttcatcccaagattgctcctcctcag

SEQ ID NO: 12915 - DNA, 1159 bp, Homo sapiens
  SIMILAR (1)..(696): 991254mologous to Escherichia coli recC protein (aa 1- 1122),accession number X03966,Smith-Waterman Score=1202.
atgaacgacggcgtttatccacgtcagcttgcgccattgggctttgacctgatgagccagaaaccgaagcgtggcgaccgtagccgtcgcgatgacgaccgctatctgttcctggaagcgttaatttccgcgcagcaaaaactctatatcagctatatcggtcgttccattcaggataacagtgagcgtttcccgtcggtactggtgcaggaactgatcgactacatcgggcaaagtcattatctaccgggcgatgaagcgctcaactgtgatgaaagcgaggcaagggtaaaagcgcatcttacttgcctccatacccggatgccgtttgatccacaaaactaccagccaggcgaacgacaaagctatgctcgtgaatggctacctgcggccagccaggctggtaaagcacattctgaatttgttcagccgctgccgtttaccttaccggaaaccgtgccgctggaaacgctacaacgattctgggcacatccggtgcgggcatttttccagatgcgtttgcaggtgaacttccgtactgaagacagcgaaatccccgacaccgagccatttattctggaaggacttagccgttatcaaatcaatcagcagttattgaatgcactggttgagcaggatgatgccgaacgcttgttccgccgcttccgagcggcaggggattacccaatctacggcgtgaagtgtggcgatgaagtgattaagcccgatgcgtatgtgatggcgtttggttcttactcgacggcgatgctcaaaggcattgttgatattccggtgtatccgctgaaaggctactcgctgaccattccaattgcgcaggaagatggtgcgccggtatccaccattcttgatgaaacctacaaaatcgccattacccgtttcgataaccgcattcgtgttggcggaatggcggagattgttggttttaataccgagctgttgcaaccgcgtcgtgaaacgctggagatggtggttcgcgatctctatccacgcggcggtcatgtcgagcaggcgactttctggactggtctgcgcccgatgacgccagacggcacgccggttgtcgggcgtacacgctttaaaaatctgtggctgaataccggtcacggcacgctcggctggacgatggcttgcggttccg

SEQ ID NO: 12916 - DNA, 864 bp, Homo sapiens; identical to SEQ ID NO: 1393
  SIMILAR (151)..(783): 791254mologous to Cloning vector pZC320 SopA,accession number U26464,Smith-Waterman Score=871.

SEQ ID NO: 12917 - DNA, 1158 bp, Homo sapiens; identical to SEQ ID NO: 6709
  SIMILAR (2677)..(5808): 951254mologous to Homo sapiens Gag-Pro-Pol-Env protein,accession number AF164611,Smith-Waterman Score=5293.

SEQ ID NO: 12918 - DNA, 1626 bp, Homo sapiens; identical to SEQ ID NO: 1996
  SIMILAR (133)..(642): 871254mologous to Homo sapiens v-fos transformation effector protein,accession number M84711,Smith-Waterman Score=763.

SEQ ID NO: 12919 - DNA, 179 bp, Homo sapiens
  SIMILAR (1)..(144): 771254mologous to Homo sapiens Human secreted protein, SEQ ID NO: 5576,accession number G01495,Smith-Waterman Score=191.
atggtctatggggattccgaggcgatcgggcagcatcagtcttcagtcgctaagccgagaagatctgggaaggagtcagagagccttgggccagagttccaggggctctgggagtggctgccagtttatgagctaggaaccctccatgcaggctctgaacctggtggagctcttccttg

SEQ ID NO: 12920 - DNA, 410 bp, Homo sapiens; identical to SEQ ID NO: 446
  SIMILAR (256)..(885): 491254mologous to Caenorhabditis elegans coded for by C. elegans cDNAs GenBank: CE5D1 (Z14791), CEL01F1 (M88817), CEL04B5(M88849), and CEL04C1(M75812); putative,accession number L14331,Smith-Waterman Score=564.

SEQ ID NO: 12921 - DNA, 714 bp, Homo sapiens
  SIMILAR (223)..(342): 901254mologous to Mus sp. PIN1,accession number AB009691,Smith-Waterman Score=181.
tcacatacggcacacagtccccattggtggtgcttcactgatttggcctaaggctatcattggctcctcctttctgcatgttccccctaacgacttagcattcttgaccctctgtattgcctgcatccttccctgctgcccttgggattccccaagcaagagctgtaacaccctttgtgtctccatgattgctggcatctctgagtttttgggcaccaccatgttccctttgtctagacgccagtgtctgacatggaagccacttgtggcatgctcagtccagctgcaggctgagatggagcttcgggctggctgcaagccaaatgcagccagaagagccaagtcatggaccgaggaggaaatgagcacagcaggcaccaggtgagctaggaactgcacaaccacagcagattcagaatcgaggaccatagagaacactgtgcaggtcatcccagtaaccaacaggtctggcaaccactcccagagcccctggaactctggcccaaagctctctgactccttcccagatcttctcggcttagcagctgaagactgacaccgcccaattgcctcggaagctctttgttgagtcccacaattaccattgttcttggcctggacttcaatccggcctcccacattattctggataccacacctcatcctcatgactgtatctctctgatccagctgacattcaccccatttccccat

SEQ ID NO: 12922 - DNA, 741 bp, Homo sapiens; identical to SEQ ID NO: 4793
  SIMILAR (307)..(717): 661254mologous to Homo sapiens reverse transcriptase,accession number L27428,Smith-Waterman Score=471.

SEQ ID NO: 12923 - DNA, 420 bp, Homo sapiens; identical to SEQ ID NO: 448
  SIMILAR (299)..(523): 311254mologous to Homo sapiens Human neurofilament-H wild type protein fragment 1,accession number Y20840,Smith-Waterman Score=72.

SEQ ID NO: 12924 - DNA, 679 bp, Homo sapiens
  SIMILAR (388)..(230): 901254mologous to Mus musculus stretch response protein 553,accession number AJ250188,Smith-Waterman Score=231.
atgttttcttatttcctacgagtttatgtgcttggaagcgagcgtggtcgtggaaaacccgtaaccgctaaattcatctgggtcccaaagactgagccggctggcctcgttatttatgtgagcggctatgtaaatgaggattcggagattgctctattgattggagagagctggaggaggcggtctctcttccagagcgctagttgggagcggacctgcctgtcattggtcaccagagccaatggaaaggggctgccgcgcggccgtaaagagtttgtagaggcagttcgggtgcggtacgttgcattccggtaccggacgccgagagcggtttgtctccgtctctggagttgtaggcgagaggtgatcatgtccggtcgcgggaaacagggcggcaaagcggcttccgaggcgatcgggcagtgtcagtcttcagccgctaagccgagaagatctgggaaggagtcagtcagagagccttgggccggagttccaggggctctgggagtggctgccagcaccagtgaagatgatggctatcctgaggacatggatcaagataagcatgatgacagtactgatgacagtgacaccgacaaatcagatggagaaagtgacggggatgaatttgtgcaccgtgataatggtgagagagacaacaatgaagaaaagaagtcag

SEQ ID NO: 12925 - DNA, 1161 bp, Homo sapiens
  SIMILAR (634)..(774): 551254mologous to Mus musculus N-formylpeptide receptor-like 2,accession number AF071180,Smith-Waterman Score=126.
atgaagctggtaactatcttcctgctggtgaccatcagcctttgtagttactctggctattggcccgaaaatgaacaaatgagtgttggaggtggagatgacaatggcgaggttctgtattccgccctgaggggggcttccgaggtgatcgggcagtgtcagtcttcagccactaagccgagaagatctgggaaggaatcagtcagagagccttgggccagagttccaggggctctgggagtgggtgtcagagagattgaccaaactttaggaattgacaccattctctgtcaccatcatgaaagacttcttcagtctcattacggaattcacaagtcttctttaatgtcagtaggaaattcacaagtcgcagctttgtaccagctgaatgtttatgttgttgctgacacagttggattaattatcaaatccaattcaatcctggactcagtccagcctaactattgctcaaataaacacatagagctcagaacacaagttggtggagctcggaatctgagagcaaactcacccatgacctccagctacaatcaagagagcagtagcatggagaatgtgtctgcattgtcactgttgactgtggagagtcccacgtccatgtttgactattgtgatgactctttggagagggtcaagtctgctcttgacatcttttccatgatcatctacacagtgactttcttcctaggcttggctggcaatggccttgtcatttgggtagttggattccacatgtcctgcacagtcaacacgtgtcttccttctgaccctcatctccatggaccactgacttgtgatcctgtggccaatctagtcctggaacaattgcacaccagcaaaggcaactctggggcccttgaggacctggcttttggcaatttgtttctctgttccctacttgatcttcaaggaaactcgtggtggaaagtgtcaccctctttgtacaaccagtatgatctgcagaatgaaactcaaggaagtcaccaactttggaaagagattatcattccatggcaccaaacgctggtcacaacagcccactttttctttggcttctttctccctctggctatcatcactggctactacatccttgtagccttgaagttaagagaaaggcagctggttaagtttagctga

SEQ ID NO: 12926 - DNA, 441 bp, Homo sapiens
  SIMILAR (249)..(383): 521254mologous to Human T-cell lymphotropic virus type 2 gag polyprotein,accession number AF139382,Smith-Waterman Score=146.
atgctggagcacgttttaatgttcggtctcattgaagaaatgaccgtgtcagaccacacagggacgtttactcactgcagggacgcctctctgatcattcacccacgtttcaagggtgtcagaccacgcagggacgcctgccttggtccttcacccttagcggcaagttccgcttttctggggaaggggcaaccacatctccggcacacaagaacttccaaacacctgaaccgcagtggccaggcattcctccagaacctcctcccacaggagcttgctacacgtgccggaaatctggccactgggccaaggaatgcccgcaggccaggattcctcctaagccgcatcccatctgtgtgggaccccactgaaaatcggactgttcaactcacctggcagccactcccagagcccctggaactctggcccaaggctctctga

SEQ ID NO: 12927 - DNA, 595 bp, Homo sapiens; identical to SEQ ID NO: 10187
  SIMILAR (247)..(402): 781254mologous to Homo sapiens Human secreted protein, SEQ ID NO: 5210,accession number G01129,Smith-Waterman Score=216.

SEQ ID NO: 12928 - DNA, 1467 bp, Homo sapiens
  SIMILAR (1104)..(1175): 911254mologous to Escherichia coli RecC1004,accession number AF176618,Smith-Waterman Score=116.
tcacgcctcgccattattacgaacccaggattttaactgttctaaagtaggcatttgtttaacttgagcagtaattgggtctacatcagataagctgaattgcgcagcagctccgttcagaccatatccattggcaacgcgatcccaatattgattaaacgcctgtatagacggttgcaaaaagccatctttcgctttaaccgctttttcaaaagcatttgccatagaaagtggcatatcggagaaattaaccattaccatatccgcagggttaaaagcggcataagtacgctgttttgctccagggacctctgttgccagcatatgaacaacatgggttgcaatttccagagcctgctccctggaggcaccacctaaattttcctgaagttgagcgaggttaatgttggcataacgataaaaaacacccgatgaaaattcctgagttcccagatgtgcagaaccttgttcctgtaaatcatctacagcggtgaaccagtcaatatcagaatcaacctgatgagtagtgatcgcatgcgcaatggacattgcaccatcaacttttcccaactcagtcatcatgccgctggttgccattcttccactaagcgcaatatcaacaccctgctgtaaattcacacgtatggcggcaatatcttccttaagaactttgagcagctttttatcatccagattatcagcctctgcttttgcaacctgctcacagaaccaggctatttctcccacaacccagggagtaaccgcatcggcagaaatcttttcggcttcatcaactgatttaccggagagcagcgctaatgtcttatcgatgattttttggtcaaaacgttcaccaagtttttgccgaagaacatcacgtaattgtgcaagatgaatggttctgagactggattcaccaatattttgtgcgtaataaccacttttacgcatcgcacgtttaaggctttgacttgaaattcttactcgtcttttgccgccgaaaatagcgtctttctgcatgttcatatcgtcgcggttcagacatgaagggtggttgagcaggatgatgccgaacgcttgttccgccgcttccgagcggcagggatttaccgtatggcgcttttggtgaaattttctaggaaacacagtgccaggagatgcagcagcttgccgaggaccatgcttcggtaacaatgatttcactcgaagcatggcgcttgtatcggaaaatggtttgtcggatatgggcttcgatgttgagattgtcggtgtgccatttatgcgcgccaaagagggtctggtctctaatttcccgtaacggttatcatttgccgggctcaatacactgacatgaccacaaggcttccgcgccgaatcatattcagattcagctgatgcccggacaccatcgctggtaagtctttccaggagaaaagactgacactgtgccccactgtccacggccat

SEQ ID NO: 12929 - DNA, 1593 bp, Homo sapiens; identical to SEQ ID NO: 10188
  SIMILAR (2724)..(4): 971254mologous to Homo sapiens putative p150,accession number U93569,Smith-Waterman Score=4555.

SEQ ID NO: 12930 - DNA, 433 bp, Homo sapiens; identical to SEQ ID NO: 10189
  SIMILAR (166)..(83): 821254mologous to Homo sapiens neutral protease large subunit,accession number M27826,Smith-Waterman Score=116.

SEQ ID NO: 12931 - DNA, 367 bp, Homo sapiens
  SIMILAR (226)..(837): 561254mologous to Mus musculus stretch response protein 553,accession number AJ250188,Smith-Waterman Score=508.
atgggggctgtctgtgaagctttgcggcagtacagcccagaaggggacggacttaccctccactgtgagagttacccgaagctcggcatccgtgatggtctgggaaggttccgaggtgattaggcagcgtcggtcttcagctgctaagctgagaagatctgggaaggagtcagagagccttgggccagagttccaggggctctgggagtggctgccagtcagagttactcttgctgctgctgctgctgctgctgctgctgctgctgctgctacggtggtggcggcggcggtggtggcggtggctgccgaggcctcatggttgtcagctccatgcctcctgaacttcactccactgaaatctggttgg

SEQ ID NO: 12932 - DNA, 2083 bp, Homo sapiens
  SIMILAR (260)..(469): 1001254mologous to Homo sapiens Human stomach carcinoma clone HP10415-encoded protein,accession number W88501,Smith-Waterman Score=356.
atgcctttcagccccaaggctgccacctgctcccttgagaggctacactctatacttcaggtggtcctaagggagaaagtgacccaagagctaatatccattagacattttagcagacatagccatagtgggtatcttggtttatctccagaaagtactaaaacccaggcccagaataaaactgaaggatgtcggaccggcactctcactgtttctaggcttccaggaggtcctggtgtcttagctgtggatctcccaatacctgcagaatatttttggcgtcacgaacaggattcaaaaaccaaactgtgccactttttggccacaaggacagggctggaaactcgaggaaatcccaaatccagggatgggaactccccaatatcactgtcaattcctacaggattgaacgaaggggacgaatgcagaaatgaagacaaagacaaaagatttgttttaaaagaagggagacaaaggagacacgttttatccatggacccaaaactccggtgcccgtcacggactgggaaggcagccttcccttggtgtttcatcattgcagggacgcctctctgatcattcacccacgtttcagaggtgtcagaccacgcagggacgcctgccttggtccttcacccttagtggcaagtcttgcttttctgaggaaggggcaatcccaaccccaagtgtcgctgagtctttccagtcttccttttctacagacccatctgacctttcccctcctccccagcctgctcatcgccaggccgagctaagtcccaattcttcctcagcctccactcctccaccctataatcctcctaccacctcccctcctcacacccggtccggcttacagtttagttccgcaactagctcttccccacctgcccaacaatttcctcttagagaggtggctggagctgaaggcatagtcaacgcacatgtacctttttctctatcagacctctctcagatcagtcagcatttaggctctttctcatcagaccccactaaatatatacaggaattccgatatctaactctgtcctacaacttaacctggagtgacctaaatgtcatcctgacttctaccctctccccagatgaacgggaaagagtttttcctgtatcccaatctcacgctgataaccgtcggcttcatgagccagacctccaggaaggcattagagcagttccccgagaggatcccccagtggaactaccaggcaaattccccaggaaaaaacttcaaaaattagaatctggccctcaaaccccacaacaggaattaatcaaccttgccttcaacgtgtacaataatagagaggaagcagccagacggcaatgcatttctgagttacaattacttgcctccactcagcagaagactgacaccgcccaatcgcctcagaagccaacagaaccatcacagatgctctggataactctcacagtggaggtggctgccgctgctttaatacttttagaggccctcaaaatcacaaactatactcaactcactctctacagttctcataacttccaaaatctattttcttactcatacctgacgcatatgctttctgcttcccggctccttcagctgtattcactctttgttgagtctcccacaattaccattgttcctggcccggacttcaatccggcctcccacattattccggataccacacctgaccctcatgactgcatctctctgatccacctgatgttcaccccatttccccacatttccttcttccctgtttctcaccctgatcacacttggtttattgatggcagttccaccaggcctaatcgccactcaccagcaaaggcaggctatgctatagtatcttccacatctatcattgaggctaccactctgcccccctccactacctctcagcaagccgaactagttgccttaactcaagctctcactcttgcaaaggactacgcgtcaatatctatactgattctaaatatgcctttcatattctgcaccaccatgcggtcatatgggctgaaagaggttttctcactacacaagggtcctccatcattaatgcctctttaa

SEQ ID NO: 12933 - DNA, 862 bp, Homo sapiens
  SIMILAR (91)..(327): 961254mologous to Escherichia coli RecC1004,accession number AF176618,Smith-Waterman Score=406.
atggaattttgtatttcattaggccggaaaataactttttcaaacatttttccctacaacggggccaattggaaggttttcttaaaaaagtcccaaccattattgaatgcactggttgagcaggatgatgccgaacgcttgttccgccgcttccgagcggcaggggatttaccgtatggcgcttttggtgaaattttctgggaaacacagtgccaggagatgcagcagcttgccgacagagtcattgcctgtcgccagccggggcagagtatggaaattgatctcgcctgcaacggtgtgcagataactggctggttgccgcagctttgggatgctgaagggatcagcttcagtgtcttcagctttgggatgctgaagggatcagcttcagtgtcttcagctttgggatgctggagcttgctacacatgctggaaatctgccactgggccaaggaatgcccacagcacggtattcctcctaagccacgtcccatctgtgtgggaccccaccgaaaatcggactgttcatctcacctggcagccactcccagagcccctggaactctggcccaaggctctctgactgactccttcccagatcttctcggcttagcggctgaagactgacgctgcccgatcgcctcggaagcctgacacttatactttctgctcccccggctccttcagttgtacccactctttgttgagtcccacaattaccattgttctcggcccggacttcaatccggtctcccacattattccagataccacacctgaccctcatgactgcatctctctgatccacctgacgttcaccccatttccccacatttccttcttccctgtttctcaccctcat

SEQ ID NO: 12934 - DNA, 3504 bp, Homo sapiens
  SIMILAR (757)..(1026): 881254mologous to Homo sapiens Human PRO1301 (UNQ667) amino acid sequence SEQ ID NO:212,accession number Y99398,Smith-Waterman Score=414.
ttaagctgaagggaggtcttgtggtaaggggtgatattgtggggatgttagaagaaacatttgtcgtatagaatgattggtgatggcctggatacggttttggatgaattgagaaactaaacggaagatacaaggtccaaataaaagaaggagaaaaatgggtattaaaggactaacaattgggaggacccaggacatccaattagagagtgcccaagggggttcagcgtaattacttgcttggttggcaagtttttgggctctatccttgagttttttaatgttgtcatacaccaggccagattgatttaggtaaaaacaacactcctcatttaagaatatgcagagtcctcctttttcagcagtgagtaagtcaaggcctcggcggttttggaggacaactgcagctaaagagtcaacttgggcctggaggactgataaagtttgtgatatgtctgtgatgctagcagagaagtcattagacaggctacggaaggtcatgacagacgttgaaatgcctgctattccagtaccgagagcaacagtggaggcagaaagtcctaaaccgaccatcaagggaattagtggaataactcttttttgttgtgtcggtgtcatgaggggaacagggagctcttcggtcccatttgcaaattgaattttgggggtaaggaagactagtgtacatgtgcctgtccaattggcaggtaggcacatgtaggtagaggatccacagaggaagaagagaccttgtgcgaggcaaaactggagatgtaaagtaaaaaggtgagaaggagtgctgaaaggggtgtcttgtacccagactcctagggatccagctagggcggcagctgtcagaggttgtaatggggactgatggggtaactgcgtagaggggaaggttcgattttcatggtgtatgagaaaacgtcgagtatctacgagcaatctttcactgttattttcggggctgggtataagtaaacaagaagagggcctgggaggagagtctgatgagcaaggggaagatagccaaggatggagtgaaatacagggcaagtgtcttcctaagcaataattactgctaatgtttttaagtttgtcagtattgatagagggcttgtctgtaatatggagctggaaggctccaattgtttcattgatgtttgtagttggacttcggagatgaagagtaaaggaacatcgagaaggtgaaagattacctaggggaattccagtgggtctttgccaagagatacacaaaggagcggccacaggaatagtagtttgtgttgtgagaggtccaaatatggggggagtagagttgatataaggagaaaggttttttaaataagtgcgaaggagggcggcagcttgctgatgtgaaatgtctggggaagtcttgctggacctgtctagaaagtaaatgagttcttcaggagggtaaaggtgagggctgttaaaggaagttcggaggtgtagggagatgggagatgttgcccagtctgtctgtaaggcggggacagctgtgtaggcatgttcttcagaaatatgagtgagtttaagggaagtgggggagagtacttgcgacttccaggaggaagaggagggattaggctggctgtccgatggacacagctttattctggaatggtgaacccagtggggaggattctgcaggcagacggcagtcggggtactatagatgactaagtagggtccggtccatcgaggttgtagagtttgaggggtcagattcttaacaagaactgatcgtccagctaggttgtcttcatatggctggggatctggagtaggcaagagaagattagcagcctggcgaatttcctgtctagcctgctggagtactggaagatagtcgcctagagggctggtgtctgggatgaggttggggccaagcaagaaagtgcgtccatataaaagttcaaatggactgtatcctgtagcatctcgaggacaggctctgattttgagaagagcaagaggtaaaagtgctgtccaatcctttgtaagttggaggctaaacttggtgaggtgtgcctttaaaagaccattagtccgttccacctttcctgaagattgaggacggtaaggggtatgaaggttccactgaataccaagagcctgagaaactacttgggtgatttggctagtaaaggctggtccgttatcagactgtatagaggtgggaaggccaaaccgaggaattatgtctacatagaagaggttatgaaatgatgacagaatagaatgggcctgtgaggctggaagaagatattttccttggtctaagaaccatttgccttgtgtgggaagagattgataggtggaagtttcagtgggggagtaggtgggagtgactgaagtgaaggagaaaaactggccgtgagggacagaagttggagagctagctgcttgtctagccactttatcaacataagcattgcctagagcaatgggatctgatgccttttgatgccccttgcagtgaatgaccccagcttcttttggaagtaaagcggctttgagcagagtttttattaaagaggcattaatgatggaggacccttgtgtagtgaggaaacctctttcagcccatatgactgcatggtggtgcaggatatggaaggcatatttagaatcagtatagatattgacgcatagtccttttgcaagagtgagggcttgagttaaggcaactagttcagcttgctgagaggtagtggagggaggcagagcagtagcctcaatgatagatgtggaagatactatagcatagcctgccttcgctggtgagtggcgattaggcctggtggaactgccatcaataaaccaagtgtgatcagggtgagaaacagggaagaaggaaatgtggggaaatggggtgaatgtcaggtggatcagagagatgcagtcatgagggtcaggtgtggtatccggaataatgtgggaggccggattgaagtccgggccaggaacaatggtaattgtgggagactcaacaaagtgtaagtatagctgaaggagtccgggagcagaaagtatatgtgtcaggtgtgaggaagaaaatagattttggaaattatgagagctgtagagagtgagttgagcatagtttgtgattttgagggcctctaaaagtattagggcagcagcagcggctgcacggagacatgatggccagcctaaaacagtaagatcaagttgtttggacaaaaaggctacaggacgcgatcctggtccttgtgtaagaattccgactgcacagccctgcacttcggctgtgtgtaatgaagcaggttgggatgagtcagggagagctagagtgggggcagtttctaaagctgtcttcaaggaacagaaagaggagtggggaaaggatttaggatctatggggtcagctaagtttccttttgtgagtttatataatggttttgttaggatggcaaaaccaggtatccaaaggcgaaagtatccaaccat

SEQ ID NO: 12935 - DNA, 1781 bp, Homo sapiens
  SIMILAR (291)..(350): 471254mologous to Homo sapiens Human secreted protein encoded by gene 185 clone HEBGB80,accession number W74912,Smith-Waterman Score=54.
atgtggtccccagtgctgcaggtggggcctgtgggaggtgtttgggtaatgggagcagatcccccatggcttggtgctgtccttgcaacagcttccgaggcgatcaggcagcatcagtcttcagccactaagccaagaagatctgggaaggagtcagtcagagagcctcgggccagagttccaggggctctggcagtggctgtcagactttcaaacttaacaccagtggtttgtcagtggctttcaagccttcagcgacagactgaaggctgcattgtcagcttccctacttttgaggtttggggactcagactggcttcctagctcttcagcttgcaaatgtcttatgctgggacttcactttgtgattgtaggtaacatctgtgctacactcaaggagaaatactcctcaatgctccatttagatgtgaccatgaagaaaaatggggagaaaagaacaaggctccaaaaaagaaagaagggaatgcctccacatccggcttatgaggacctaaacatagctgccatcactctccctgccaatgttgtccttcatcagccaagtggcttcagaacttcagggcagctggaccccgtttggtggtctcttgacacggacgcgcatgaaatttggtgccaagacccgggacttggatcaggggacttcccttgggagatcactcccctgtcctcctactctttgctccatgagaaagatccacctacgacctcaggtcctcagaccgaccagcccaagaaacatctcaccaatttcaaatccaagacaaaggagacaggttttatccatggacccaaaactccggcaccggtcacggactgggaaggcagccttcccttggtgtttaatcattgcagggacacctctctgattattcacccatgtttcaagggtgtcagaccacgcagggatgcctgccttggtccttcacccttagcggcaagtcccgcttttctggagaaggggcaagatttaattaacctcgccttcaaggtgtacaataatagaaaaaagttgcaattccttgcctccactgtgagacaaaccccagccacatctccagcacacaagaacttccaaacgactgaaccgcagcagccaggcgttcctccagaacctcctcccacaggagcttgctacatgtgccggaaaatctggccactgggccaagcgaatgcccgcagcccgggattcctcctaagccgcgtcccgtctgtgtgggaccccactggaaatcggactgtccaactcacctggcagccactcccagagcccctggaactctggcccaaggctctctgtctgactgactccttcccagatcttcttggcttagcagcttgaagactgacactgcacgatcgcctcggaagccccctagaccattcacggatgccgagctatgggtaactctcacagtggaaggtaagcccgtccccttcttaatcaatacggaggctacccacgccacattaccttcttttcaagggcctgtttcccttgcctccataacctgttgtgggtattgacgggccaggcttctaaacctcttaaaaactccccaactctggtgccaacttagacaatactcttttaagcactcctttttagttatccccatctgcccagttcccttattaggctgagacactttaactaaattatctgcttccctgactattcctggactacagctgtatctcattgctgcctttccccccagttcaaagcctccttcacatcctctctttgtatctccccg

SEQ ID NO: 12936 - DNA, 510 bp, Homo sapiens
  SIMILAR (213)..(413): 741254mologous to Homo sapiens Amino acid sequence of long human FAIM,accession number Y41257,Smith-Waterman Score=226.
atggataaatttctggacacatacaccctcccaagactaatccaggaagaagtggaatccctgaaaagatcaataacaccttctgaaattgaggcagtaattaatagcctaccaaccaaaaaaagcctgggaccagacggattcccagccaaattctaccagaggagaagaaaagagagccgaagattgaagcttgaagaagtccagcgtttcatatcagatgaggagcactggctggtaaatgaagaacgagaaggagcaactgaagaggcagtagacaatccaaacggatctagtatcatggaaaccaagtcagtggaggatctactggagtggcatggtcagctttgttgtgctttgataagaggattccagaaacataaagataatggtgaggtagctagtcgtgaacaaaatgactttaaacaattgcccccagacattccagatgaacaagatgtggaggaggaagacagtgatattgatgatcctgactctgtccaggactag

SEQ ID NO: 12937 - DNA, 684 bp, Homo sapiens
  SIMILAR (510)..(88): 281254mologous to Dictyostelium discoideum cyclic AMP-binding protein,accession number X55975,Smith-Waterman Score=113.
atgacggggaaaccctcctgttctcccgcagcctgccccgcctgtcgagcggccctctgtgctgccctgcagccagctctgccacgctcctgtgattccccagccgccatcagcacacccaaggattcttgcaagaccactcacagccgctttaagagaacagccagggcttctaggcaggagcacgacagtgttcacgctgatggccagggagcctcctcagccagcagcagccgactcgtgcttgtgcattgttcagatggaagcatgatcattggatggaagttcctggcacaggtgcaagttgaccctgagtcattccagaaggattcgggcctcaccggaaagaacgccaggaaaagccatagggcaacagctcttctgccatttcagtcctcatgggtgaaactgggtctatgggagacagctagcaagtgtctgggcagcccccctggccctaagaagttcccgtcgcagggtatgctggcaggaagtggtctgggtcatcttggagatgcaaggtttggatggcgttgggcactgcaggaggagctgcccagcagtgcaagctcccagggtcctggacctctgaccctgtgtcagcccttgtttggtggccctgagcagggccacccagaaggtgggggtggaggacagttcagccgcagcctggaggctcactga

SEQ ID NO: 12938 - DNA, 621 bp, Homo sapiens
  SIMILAR (1)..(216): 1001254mologous to Escherichia coli acetohydroxy acid synthase (AHAS) I,accession number J01633,Smith-Waterman Score=374.
atgaacaacgaagcgctggggctggtgcatcagcaacagagtctgttctacgagcaaggcgtttttgccgccacctatccgggcaaaatcaactttatgcagattgccgccggattcggcctcgaaacctgtgatttgaataacgaagccgatccgcaggcttcattgcaggaaatcatcaatcgccctggcccggcgctgatccatgtgcgcattggcaatggcggtcaccaggttagtcgcacccggtccgctacaggccatacagaccgaaacattgattttccgctgccagcgagctttatctgggatatgttcgtccgggtgttaccggaaatccccaaagagagcgcctttaacaaacttttgcgacaggccttcgatgttcccattccatatttaacttttctgcaattcagcacctgctctgttagcacacttcccttccaggcttttagcgtgaagcacctgcatttagatcagcctaagctgtgtgggatcagggtgtactcacagcccaaacttctagaacttcctctcattccaaggaggacctgcaagaaactcagatgtgatggttggagctgcagcagccatattgtgcacaaagccacacactaa

SEQ ID NO: 12939 - DNA, 432 bp, Homo sapiens
  SIMILAR (139)..(282): 1001254mologous to Homo sapiens Amino acid sequence of short human FAIM,accession number Y41256,Smith-Waterman Score=254.
tgtggcaaaggagcagagaactttgacaagttcttcacacgaggacagcccgtcttaacaccacctgatcagctggttattgctaacatagaccagtctgattttgaagggttctccatgcacaaacttcgtgagaccaacacagccgtgccctgcaggcaccagcacgtgcttttcagaggctgcggactttcttccagccattgtggcattggcctttccagtcttgggaggagcgcgctgctttggtctctcaccttgggtgaagattcagagatgccctatgccgcggtcacactcaacctcctggaagtgaaggctctttcagctgccaatgcgagggctggcggggaagctattttgaagaaaaacaaagggcaattttcaggtcttcagagcaatgtggtctctgccccactgggctggccctga

SEQ ID NO: 12940 - DNA, 3900 bp, Homo sapiens
  SIMILAR (10)..(99): 561254mologous to Bacillus anthracis pXO1-77,accession number AF065404,Smith-Waterman Score=61.
atggacctgcccaggggcctggtggtggcctgggcgctcagcctgtggccagggttcacggacaccttcaacatggacaccaggaagccccgggtcatccctggctccaggaccgccttctttggctacacagtgcagcagcacgacatcagtggcaataagtggctggtcgtgggcgccccactggaaaccaatggctaccagaagacgggagacgtgtacaagtgtccagtgatccacgggaactgcaccaaactcaacctgggaagggtcaccctgtccaacgtgtccgagcggaaagacaacatgcgcctcggccttagtctcgccaccaaccccaaggacaacagcttcctggcctgcagccccctctggtctcatgagtgtgggagctcctactacaccacagggatgtgttcaagagtcaactccaacttcaggttctccaagaccgtggccccagctctccaaaggtgccagacctacatggacatcgtcattgtcctggatggctccaacagcatctacccctgggtggaggttcagcacttcctcatcaacatcctgaaaaagttttacattggcccagggcagatccaggttggagttgtgcagtatggcgaagatgtggtgcatgagtttcacctcaacgactacaggtctgtaaaagatgtggtggaagctgccagccacattgagcagagaggaggaacagagacccggacggcatttggcattgaatttgcacgctcagaggctttccagaagggtggaaggaaaggagccaagaaggtgatgattgtcatcacagatggggagtcccacgacagcccagacctggagaaggtgatccagcaaagcgaaagagacaacgtaacaagatatgcggtggccgtcctgggctactacaaccgcagggggatcaatccagaaacttttctaaatgaaatcaaatacatcgccagtgaccctgatgacaagcacttcttcaatgtcactgatgaggctgccttgaaggacattgtcgatgccctgggggacagaatcttcagcctggaaggcaccaacaagaacgagacctcctttgggctggagatgtcacagacgggcttttcctcgcacgtggtggaggatggggttctgctgggagccgtcggtgcctatgactggaatggagctgtgctaaaggagacgagtgccgggaaggtcattcctctccgcgagtcctacctgaaagagttccccgaggagctcaagaaccatggtgcatacctggggtacacagtcacatcggtcgtgtcctccaggcaggggcgagtgtacgtggccggagccccccggttcaaccacacgggcaaggtcatcctgttcaccatgcacaacaaccggagcctcaccatccaccaggctatgcggggccagcagataggctcttactttgggagtgaaatcacctcggtggacatcgacggcgacggcgtgactgatgtcctgctggtgggcgcacccatgtacttcaacgagggccgtgagcgaggcaaggtgtacgtctatgagctgagacagaaccggtttgtttataacggaacgctaaaggattcacacagttaccagaatgcccgatttgggtcctccattgcctcagttcgagacctcaaccaggattcctacaatgacgtggtggtgggagcccccctggaggacaaccacgcaggagccatctacatcttccacggcttccgaggcagcatcctgaagacacctaagcagagaatcacagcctcagagctggctaccggcctccagtattttggctgcagcatccacgggcaattggacctcaatgaggatgggctcatcgacctggcagtgggagcccttggcaacgctgtgattctgtggtcccgcccagtggttcagatcaatgccagcctccactttgagccatccaagatcaacatcttccacagagactgcaagcgcagtggcagggatgccacctgcctggccgccttcctctgcttcacgcccatcttcctggcaccccatttccaaacaacaactgttggcatcagatacaacgccaccatggatgagaggcggtatacaccgagggcccacctggacgagggcggggaccgattcaccaacagagccgtactgctctcctccggccaggagctctgtgagcggatcaacttccatgtcctggacactgctgactacgtgaagccagtgaccttctcagtcgagtattccctggaggaccctgaccatggccccatgctggacgacggctggcccaccactctcagagtctcggtgcccttctggaacggctgcaatgaggatgagcactgtgtccctgaccttgtgttggatgcccggagtgacctgcccacggccatggagtactgccagagggtgctgaggaagcctgcgcaggactgctccgcatacacgctgtccttcgacaccacagtcttcatcatagagagcacacgccagcgagtggcggtggaggccacactggagaacaggggcgagaacgcctacagtacggtcctaaatatctcgcagtcagcaaacctgcagtttgccagcttgatccagaaggaggactcagacggtagcattgagtgtgtgaacgaggagaggaggctccagaagcaagtctgcaacgtcagctatcccttcttccgggccaaggccaaggtggctttccgtcttgattttgagttcagcaaatccatcttcctacaccacctggagatcgagctcgctgcaggcagtgacagtaatgagcgggacagcaccaaggaagacaacgtggcccccttacgcttccacctcaaatacgaggctgacgtcctcttcaccaggagcagcagcctgagccactacgaggtcaagctcaacagctcgctggagagatacgatggtatcgggcctcccttcagctgcatcttcaggatccagaacttgggcttgttccccatccacgggatgatgatgaagatcaccattcccatcgccaccaggagcggcaaccgcctactgaagctgagggacttcctcacggacgaggtagcgaacacgtcctgtaacatctggggcaatagcactgagtaccggcccaccccagtggaggaagacttgcgtcgtgctccacagctgaatcacagcaactctgatgtcgtctccatcaactgcaatatacggctggtccccaaccaggaaatcaatttccatctactggggaacctgtggttgaggtccctaaaagcactcaagtacaaatccatgaaaatcatggtcaacgcagccttgcagaggcagttccacagccccttcatcttccgtgaggaggatcccagccgccagatcgtgtttgagatctccaagcaagaggactggcaggtccccatctggatcattgtaggcagcaccctggggggcctcctactgctggccctgctggtcctggcactgtggaagctcggcttctttagaagtgccaggcgcaggagggagcctggtctggaccccacccccaaagtgctggagtgaggctccagaggagactttgagttgatgggggccaggacaccagtccaggtagtgttgagacccaggcctgtggccccaccgagctggagcggagaggaagccagctggctttgcacttgacctcatctcccgagcaatggcgcctgcttccctccagaatggaactcaagctggttttaagtggaactgccctactgggagactgggacaccttttaacacagacccttagggattttaaagggacacccctacacacacccaggcccacgccaaggcctccctcaggctctgtggagggcatttgctgccccagctactaaggtgctag

SEQ ID NO: 12941 - DNA, 524 bp, Homo sapiens
  SIMILAR (115)..(234): 971254mologous to Homo sapiens ITGA11, integrin alpha 11,accession number AL359064,Smith-Waterman Score=199.
atgcagatggggacaaagtcctttcttgagcaggttaatggcaaaatagaaggattttgccaggtgggcaaaatagaagagttttgtaacgtgggcaaaatagaaggattttgtcagatcgtgtttgagatctccaagcaagaggactggcaggtccccatctggatcattgtaggcagcaccctggggggcctcctactgctggccctgctggtcctggcactgtggaaggtacctcatgggaagcatgtggatgacacaatccctggggctgtgcattcccacgtcttcttgctgcagcctgcccctagacatggacgcaccggcctggctgcagctgggcagcaggggtaggggtagggagcctcccctccctgtatcaccccctccctacacacacacacacacacacacacacacacactgcctcccatccttccctcatgcccgccagtgcacagggaagggcttggccagcgctgttgaggggtcccctctggaatgcactgaataaagcctcgtgc

SEQ ID NO: 12942 - DNA, 371 bp, Homo sapiens
  SIMILAR (1)..(279): 401254mologous to Petromyzon marinus hemoglobin PMII',accession number AF248645,Smith-Waterman Score=175.
  misc_feature (1)...(371): n = a,t,c or g
gagaacgtgggggtggccatcctggtaaggttctttgtgaacttcccctcggccaagcagtacttcagccagttcaagcacatggaggatcccctggagatggagcggagcccccagttgcggaagcacgcctgccgagtcatgggggccctcaaccctgtcgtggagaacctgcatgaccccgacaaggtgtcctctgtgctcgcccttgtggggaaagcccacgccctcaagcacaaggtggaaccggtgtacttcaagatcctctctggggtcattcttggaggttggttcgccgaaggaattttgcccagtgactttcccaacttgagacgcanagagccttggggccaaggttgtgttgggcttca

SEQ ID NO: 12943 - DNA, 1241 bp, Homo sapiens
  SIMILAR (652)..(2451): 981254mologous to Homo sapiens pemphigus vulgaris antigen,accession number M76482,Smith-Waterman Score=3082.
atggagcaggcggcaggtcccaggaagagaaaggagagaggaagtggagagcccgggaaagaagcagagtttgagtggctgcccttcggctctgtggccgctgtgcagtgccaggctggcaggggagcctctctgctctgcgtgaagcagcctgagggaggtgtgggctggtcacgggctgggcccctgtgcctggggactggctgcagccctgacaacgggggctgcgaacacgaatgtgtggaggaggtggatggtcacgtgtcctgccgctgcactgagggcttccggctggcagcagacgggcgcagttgcgaggacccctgtgcccaggctccgtgcgagcagcagtgtgagcccggtgggccacaaggctacagctgccactgtcgcctgggtttccggccagcggaggatgatccgcaccgctgtgtggacacagatgagtgccagattgccggtgtgtgccagcagatgtgtgtcaactacgttggtggcttcgagtgttattgtagcgagggacatgagctggaggctgatggcatcagctgcagccctgcaggggccatgggtgcccaggcttcccaggacctcggagatgagttgctggatgacggggaggatgaggaagatgaagacgaggcctggaaggccttcaacgctcccacagcagccccaacagccctgggggaggctggtcttgccgagcacagccagagggatgaccggtggctgctggtggcactcctggtgccaacgtgtgtctttttggtggtcctgcttgcactgggcatcgtgtactgcacccgctgtggcccccatgcacccaacaagcgcatcactgactgctatcgctgggtcatcccatgctgggaagcaaagagccccaacagaaacccatgccccccaggggcagtcctgcacaggggttgcagaccttcagaaccagcgtgtgatggggtgcagacccccctcatggagtatggggcgctggacacatggccggggctgtcaccagggacccatgggggcttgcccagctggacagatggctttcctgctccccaggcccatccagggttcctctctcaaccacttagactttggctcttcaggaactcttgctttcctgggcccagcgcttcgttgaccaaggattacaccaaagccctttaagacctcaggggggcgggtgctggggtcttctccaataaatggggtgtcaaccttaaaaaaaaaaa

SEQ ID NO: 12944 - DNA, 326 bp, Homo sapiens
  SIMILAR (168)..(326): 921254mologous to Homo sapiens carbonic anhydrase V,accession number L19297,Smith-Waterman Score=275.
gcccctaccagtgccgacctgtcactatgcactcagctcccagcacgcaggcccagccccagtgtggccccggtgaccctgggcagacactcccagaatggagacctcgaggcttcgcctttgaccctctcaccatagccagaagttttggcaaaaactgcccacagagggacgcgcgggcggccatgcgccccttcgacccctccgctctgctgcccacctgctgggattactggacctatgtgggctcgctcaccaccccgccgctgaccgagtcggtcacctggatcatccataaggagcccgttgaagtggccccaagccaa

SEQ ID NO: 12945 - DNA, 494 bp, Homo sapiens
  SIMILAR (207)..(494): 1001254mologous to Homo sapiens carbonic anhydrase V,accession number L19297,Smith-Waterman Score=513.
tccagtgggggaattccaaagaagaccctgactctttttgttttttggctgtgagtgtattcaatgcaaaataatcctctctgattttactgaggtagctggccatgtccacgaccaaatctgcctttaaactggaattcggttgctgacccagcccgagcctcggctatcttgtcggcaccaggggcacagcactccgtctgtaggacgcgcgggcggccatgcgccccttcgacccctccactctgctgcccacctgctgggattactggacctacgcgggctcgctcaccaccccgccgctgaccgagtcggtcacctggatcatccagaaggagcccgttgaagtggccccaagccagctctctgcatttcgtactctcctgttttctgcacttggtgaagaggagaagatgatggtgaacaactatcgcccacttcaacccttgatgaaccggaaggtctgggcgtccttccaggccactaatgagggc

SEQ ID NO: 12946 - DNA, 1084 bp, Homo sapiens
  SIMILAR (232)..(381): 641254mologous to Plasmodium falciparum Acidic Basic Repeat Antigen Rhoptry (ABRA),accession number A12521,Smith-Waterman Score =166.
agacagcagggaacatcaccctcttcagactggagtcagtgggaacagacccaagatgttggggaggaacacttggaagacctcagctttctccttcttggttgagcagatgtgggcccctctctggagtcgttcgatgaggccagggcgatggtgttctcagcgttcctgtgcatggcaaaccagcaataacactttgcacccactctggacggtcccggtctccgtgccagggggcacccggcagtctcctattaacatccagtggagggacagcgtctatgacccccagctgaagccactcagggtctcctatgaagcggcatcctgcctgtacatctggaacactggctacctcttccaggtggaatttgacgatgccaccgaggcatcaggaattagtggtgggcccttggaaaaccactacagactgaagcaatttcacttccactggggagcagtgaacgaggggggctcagagcacacagtggacggccacgcgtaccccgcagagctgcatttagttcactggaattctgtgaaataccaaaattacaaggaagctgtcgtgggagagaatggtttggctgtgataggcgtgtttttaaagctcggggcccatcatcagacgctgcagaggctggtggacatcttgccggaaataaaacataaggagcgcgcgggcggccatgcgccccttcgacccctccactctgctgcccacctgctgggattactggacctacgcgggctcgctcaccaccccgccgctgaccgagtcggtcacctggatcatccagaaggagcccgttgaagtggccccaagccagctctctgcatttcgtactctcctgttttctgcacttggtgaagaggagaagatgatggtgaacaactatcgcccacttcaacccttgatgaaccggaaggtctgggcgtccttccaggccactaatgagggcacaaggtcctagagacattaggtccacatgaatagcagaactgactttgaaggaaggaagcgttgtttcccaagtttcacaatgtgattgtacatgacttctgaaattaaaaagagagcatg

SEQ ID NO: 12947 - DNA, 1236 bp, Homo sapiens
  SIMILAR (341)..(691): 751254mologous to Homo sapiens dual oxidase,accession number AF213465,Smith-Waterman Score=459.
atgcccagcctggtggaaatattttataatgtaaactgtctcagtccttacgagttggtggagctggactgcctcacttccatccccaaggtcaggcgctgggctggcggggggcagagtgaatgggacagacagagcccacctttcacggagcccacctttggcttgtcacttcaaccatacagcaaccccttgcgagtgaactcatataaccctaatgtagacaatgcctcaggaattagtggcgggcccttggaaaaccactacagactgaagcaatttcacttccactggggagcagtgaatgaggggggctcagagcacacagtggacggccacgtgtaccccgcagagctcggggcccatcatcagatgctgcagaggctggtggacatcttgctggaagtaaaacataagctctccacacgcttccctgcatccagcgcccagctctccacacgcttccctgcatccagcgcccagctctccatacgcttccctgcatccagcacagctcgaaaagatgacggggacaagagtgtcgcctttctccaagatcagctgagaaaaggctttgagggagaaggagaaattccaaagaaatgtagtttatttattcagcagcaaacaaaagaattccagggcagaaggagtcaacgcaagcctcagatgtgcggaaggatgaggcttcaacctgtgttaacaatggtgcgggctggtccagatggagctggggcaagcccttcctcgcggttcaaggagccgtttgatctccagaagttttggcaaaaactgcccacagagggtccccaccctccatgcctggacaagctgcaagctcctcaggctgctggggccccccctcctccctgccttcgcaagagtcagggctaccggggaattggctgccttgtggagctggaaacagcccaccaggacgcgcaggcggccatgcgccccttcgacccctccgctctgctgcccacctgctgggattactggacctatgtgggctcgctcaccaccccgccgctgaccgagtcggtcacctggatcatccagaaggagcccgttgaagtggccccaagccaactctctgcatttcgtactctcctgttttctgcacttggtgaagagaagaagatgatggtgaacaactatcgcccacttcaacccctgatgaactggaaggtctgggcgtccttccaggccactaatgagggcacaagatcctag

SEQ ID NO: 12948 - DNA, 1503 bp, Homo sapiens
  SIMILAR (1101)..(82): 921254mologous to Homo sapiens putative p150,accession number U93574,Smith-Waterman Score=1612.
ctagccagttttcccagcaccatttgttaaatagggaatcctttccccatttcttgtttttctcaggtttgttaaagatcgatagttgtagatatgcaacattatttctgagggctctgttgtgttccattgatctatatctctgttttggtaccagtaccatgctgttttggttactgtagccttgtagtatagtttgaagtcaggtagcatgatgcctccagctttgttcttttggcttaggattgacttggcgatgcgggcacttttttggttccatataaactttaaagtagttttttccaattctgtgaagaaagtcattggtagcttgatggggatggcattgaatctataaattaccttgggcagtatggccattttcacgatattgattcttcctacccatgagcatggaatgtttttccatttgtttatatcctcttttatttcattgagcagtgctttgtagttctccttgaagaggtccttcacatcccttgtaagttggattcctaggtattttattctctttgaagcaattgtgaatgggagttcactcaggatttggctctctgtttgtctgttattggtgtataagaatgcttgtgatttttgcacattgattttgtatccagagactttgctaaaggtgcttataagcctaaggagattttgggctgagacgatggggttttctaggtatacaatcatgtcatctgcaaacagggacaatttgacttcctcttttcctaattgaataccctttatttctttctcctgcctaattgccctggccagaacttccaacactatgttgaataagagtggtgagagagggcatccctctcttgtgccagttttcatagggaatgcttccagtttttgcccagtcagtatgatattggctgtgggtttgtcataaatagctcttattattttgagatatgtcccatcaatacctaatttattgagagtttttagcatgaagggctgttgaattttgccaaaggtcttttctgcatctattgagataattatatggcttttgtcgttggttctgtttatatgttgaccattgtggataagctttttgatgtgctgctggattcggtttgccagtattttattgaggatttttgcatcgatgttcatcagggatattggtctaaaattctctttttttgttgtgtctctgccaggctttggtatcaggatgatgctggcctcataaaatgagttagggaggattccctctttttctgttgattggaatagttttacaaggaatggtaccagttcctccttgtacctctggtagaattcggctgtgattccatctggtcctggactctttttggttggtaagctattaattattgcctcaatttcagagcctgttattggtctattcagagattcaccttcctcctggtttagtctgtctcctcctctctgtgctgactgtttcagttcagaagcacacttttcttcacctggcat

SEQ ID NO: 12949 - DNA, 1710 bp, Homo sapiens; identical to SEQ ID NO: 10088
  SIMILAR (646)..(1665): 701254mologous to Homo sapiens putative p150,accession number U93563,Smith-Waterman Score=1094.

SEQ ID NO: 12950 - DNA, 1698 bp, Homo sapiens; identical to SEQ ID NO: 7070
  SIMILAR (586)..(1677): 921254mologous to Homo sapiens putative p150,accession number U93574,Smith-Waterman Score=1805.

SEQ ID NO: 12951 - DNA, 1578 bp, Homo sapiens
  SIMILAR (23)..(1549): 991254mologous to Homo sapiens prostacyclin synthase,accession number D84124,Smith-Waterman Score=2647.
tcatctggagctttcttctctcagctcatcaaagtcattctccatccagctttgttccgttgctggtgaggaacagcgttcctttggaggaggagaggcactctgctttttagagtttccagtttctctgctctgttttttccccatctttgtggttttatctacttttggtctgttgtttcctgactttttaatgattgccattctaactggtgtgagatggtatctcattgtggttttgatttgcatttctctgatggccagtgatgatgagcattttttcatgtgttttttggctgcataaatgtcttcttttgagaagtgtctgttgatgtccttcacccactttttgatggggttgtttgtttttttcttgtaaatttgtttgagttcattgtagattctggatattagccctttgtcagatgagtaggttgcgaaaattttctcccattttgtatgttgcctgttcactctgatggtagtttcttttgctgtgcagaagctctttagtttaattagatcccatttgtcaattttgtcttttgttgcaattgattttggtgttttagacatgaagtccttgcccatgcctatgtcctgaatggtaatgcctaggttttcttctagggtttttatagttttaggtctaacgtttaagtctttaatccatcttgaattgatttttgtgtaaggtgtaaggaagggatccagtttcagctttctacatatggctagccagttttcccagcaccatttattaaatagggaatcctttccccattgcttgtttttctcaggtttctcaaagatcagatagttgtagatatgcggcattatttctgagggctctgttatgttccattgatctatatctctgttttggtaccagtaccatgctgttttggtgactgtagccttgtagtatagtttgaagtcaggtagtgtgatgcctccaactttgttcttttggcttaggattgacttggcgatgcaggctcttttttggttccatatgaactttaaagtagttttttccaattctgtgaagaaagtcattggtagcttgatggggatggcattgaatctataaattaccttgggcagtatggccattttcacgatattgattcttcctacccatgagcatggaatgttcttccatttgtttgtatcctcttttatttcattgagcactggtttgtaattctccttgaagaggtccttcacgtcccttgtaagttggattcctaagtattttattctctttgaagcaattgtgaatggcagttcactcatgatttggctctctgtttgtctgttattggtgtataagaatgcttgtgatttttgtacattgattttgtatcctgagactttgctgaagttgcttatcagcagttcctccttgtacctctggtagaattcggctgtgaatccatctggtcctggactctttttggttgttaagctattgattattgccacaatttcagctcctgttattggtctattcagagattcaatttcttcctggtttagacttgggagagtgtatgtgttgaggaatttatccat

SEQ ID NO: 12952 - DNA, 1281 bp, Homo sapiens; identical to SEQ ID NO: 5683
  SIMILAR (3)..(281): 381254mologous to Drosophila melanogaster neuralized protein,accession number X61617,Smith-Waterman Score=176.

SEQ ID NO: 12953 - DNA, 1527 bp, Homo sapiens
  SIMILAR (777)..(562): 861254mologous to Homo sapiens Human secreted protein encoded by gene No. 118,accession number Y27684,Smith-Waterman Score=311.
tcaaagatcagatggttgtagatgtgtggtgttatttctgagggctctgttctgttccattggtctatctctctgttttggtaccagcaccatgctgttttggttactgtagccttgtagtatagtttgaagtagtgtgttgcctccagctttgttcttcttgcttaggattgttttggcaatgcaggctcttttttggttccatatgaactttaaagtagttttttccaattctgtgaagaaagtcattggtagcttgatggggatggcattgaatctataaattaccttgggcagtatggccattttcacgatattgattcttcctatccatgagcatggaatgttcttccatttgtttgtgtcctcttttatttcgttgagcagtagtttgtagttctccttgaagaggttctttacatcccttgtaagttggattcctcggtgttttattctctttgtagcaattgtgaatgggagtttgctcatgatttgggtctctgtttgtctgttattggtgtataggaatgcctgtgatttttgcacattgattttgtatcctgagacattactgaagttgcttatctgcttaaggagattttgggctgagatgatggggttttctaaatatacaatcatatcatctgccaacagggacaatttaacttcctcttttcctaatggaatactctttatttctttctcttgtctgatggccctggccagaacttccaacactgttagttgatgcagtttcttcctagcattgatggtctttacagtttggcatgtttttgcagtggctggtacccgttgttcctttccatgtttagtgcttccttcaggagctcttctgaagtctacttgtgtcagctcgtcaaagtcattctctgtccagctttgttctgttgctggcgaggagctgtgatcctttggaggagaagaggtgctctggtttttaggattttcagcttttctgctctggtttctccccatctttgtggttttatctacctttggtcttgaggtaccaggcttgcgtggaggggctgctgtgccttgcatggccatgcagggactcaggccctctccagcgtgtggtttgcaaggttgccctggcccttgctgcttagctggatgggaccggatcacagcgctgagaagcactggggctgaagccttgattggggctgaaggatctacagctgttgatagtttaggccttttgcctgcaaccagctctctgttcctgtccacatgaacttcttgtgctgcttggatgtcctttggtgtggcatctggcctcctccatcctgctgactttatcattttctcacgctgaatcacgatttgtaaattgaggaaggaagcacggataagtagggatggtgccacactacctctcaggctgggcgctcgggggtcttggctcccaactctctgatgattctttggctgtgtccttctgagcaacatttgtttctctacaggatgaatgttgtcggtgttagcgctgagaaccagagt

SEQ ID NO: 12954 - DNA, 1482 bp, Homo sapiens
  SIMILAR (370)..(576): 301254mologous to Lycopersicon chilense reverse transcriptase,accession number AJ001213,Smith-Waterman Score=73.
ttatgttttctttaagtttgaatggtgccttccaattgtcacttgccgtaacaccgagccagcaaataagagcagattgtcagcacgcaaatacatgtgatctgcccactctgactctttttccccctccaccctgagtgaaagcttcctaaagccatcatgagaagcagctgctggcaccatacttcttgtacagcctgtattgcagcaataaggttcctgtgtgcccagcttcctgtttgattcctgttctccagtggggagccattgcatgggcattactttagtctcatggcggtagttaggtggaagaagagctggggaattcactctttctttgggcagtaacgtgtcctgctgacattctgttaagacgggcaccacgacagatactttcaattcgatatatgggagttgataagtgtctggcacagatgcttcaattgagttgggaatgtatccctgatgtacaaattctgcaactgcaccgggcttctctggagccttccctctccaacatgctgttttggttactgtagccttgtagtatagtttgaagtcaggtagcgtgatgcctccaactttgttcttttggcttaggattgatttggcgatgcgggctcttttttcgttccatatgaactttaaagtagttttttccaattctgtgaagaaagtcattggtagcttgatggggatggcattgaatctataaattaccttgggcagtatggccatttccacgatattgattcttcctacccatgagcatggaatgttcttccatgtgtttgtatcctcttttatttcattgagcagtggtttgtagttctccttgaagaggtccttcacatcccttgtaagttggattcctaggtattttattctctttgaagcaattgtgaatgggagttcactcatgatttggctctctgtttgtctgttgttggtgtgtaagaatgcttgtgatttttgtacattgattttgtatcctgagactttgctgaagttgtttatcagcttaaggagattttgggctgagacaatggggttttctagatatacaatcatgtcatctgcaaacagggacaatttgacttcctcttttcctaattgaataccctttatttcctcctgcctaattgccctggccagaacttccaacactatgttgaataggagtggtgagagagggcatccctgtcttgtgccagttttcaaagggaatgcttccagttttttcccattcagtatgatattggctgtgggtttgtcatagatagctcttattattttgagatacatcccatcaatacctagtttattgagagtttttagcgtgaagggttgttgaattttgtcaaaggccttttctgcatctattgagaaaatcatatggtttttgtctttggttctgtttatatgctggattacatttattgaaccagccttgcatcccagggatgaagcccacttgatcat

SEQ ID NO: 12955 - DNA, 1869 bp, Homo sapiens
  SIMILAR (221)..(397): 371254mologous to Arabidopsis thaliana putative ankyrin,accession number AC006284,Smith-Waterman Score=117.
tcaccagcacctgttgtttcctgactttttaatgatcgccattcttactggtatgagatggtatctcattgtggttttgatttgcatttctctgagggccagtgatgatgagcattttttcatgtgtctgttggctgcataaatgtcttcttttgagaaatatctgttcatatccttcgcccactttttgatggggttgtttgattttttcttgtaaatttgtttaagttctttgtagattctggatatgagccctttgtcagatgggtagattgcaaaaatgttctcccattctgtaggttgcctgttcactctgatggtagtttcttttgctgtgcagaagctctttagtttaattagatcccatttgtcaattttggcttttgttgccattgcttttggtgttttagttatgaagtccttgcccatgcctatgtcctgaatggtatcgcctaggttttcttctagggtttttatggttttaggtctaatatttaagtctttaatccatcttgaattaatttttgtataacgtgtaaggaagggatccagtttcagctttctacatatggctagccagttttcccagcaccgtttattaaataggtaatcctttcccaatgtcttgtttttgtccagtttgtcaaagatcaggtggttgtagatgtgtggtattatttctgagggctctgttctgttccattggtctatatctctgttttggtaccagtgccatgctgttttggttactgtagccttgtagtatagtttaaagtcaggtagtgtgatgcctccagctttgttctttttgcttaggattgtcttggcaatgtgggctcttttttggttccatatgaactttaaagtagttttttccaattctgtgaagaaagtcattggtagcttgatggggatggcattgaatctataaattaccttgggcagtatggccattttcatgatattgactctccctatccataagcttggaatgttcttccatttgtttgtgtcctcttttattttgttgagcactggtttgtagttctccttgaagaggtccttcacatcccttgtaagttggattcctaggtattttattctctttgaagcaattgtgaatgagactgcactcatgatttggctctctgcttgtctgttattggtgtataagaatgcttgtgatttttgcacattgattttgtatcctgagactttgctgaagttgcttatcagtttaaggagatttttggctgagacgatgggattttctaaatatacaatcatgtcatctagcttattgagagtttttagcataaatggctgttgaattttgttgaaggccttttctgcatctattgagatactcctgtggtttttgtctttggttctgtttatatgctggattacgtttattgatttgcatatgttgaaccagccttgcatcccagggatgaagccaacttgattgtggtggataagctttttgatgtgctgctggatttggtttgccagtaatttattgaggatttttgcattgacgttcatcagggatattggtctaaaattctctttttttgttgtgtctctgccaggctttggtatcaggatgatgttggcctcataaaataagttagggaagattccctctttttctattgattggaaaagtttcagaaggaatggtaccagctcttctttgtacctctggtagaattcggctgtgaatccgtctggtcctggactttttttggttgataggctattaattattgcctcaatttcggagcctgttattgttctattcagagattcaacttcttcctggtttagtcttgggagggtgtatttgtccaggaatttatccat

SEQ ID NO: 12956 - DNA, 1638 bp, Homo sapiens
  SIMILAR (641)..(895): 901254mologous to Homo sapiens huntingtin interacting protein 1,accession number AJ238403,Smith-Waterman Score=410.
atggataaattcctcgacacatacaccctcccaagactaaagcaggaagaagttgaatctctgaatagaccaataacaggctctgaaattgtggcaataatcaataacttaccaaccaaaaagagtccaggaccagatggattcacagccgaattctaccagaggtacaaggaggagctggtaccattccttctgaaactattccaatcaatagaaaaagagggaatcctccctaactcattttatgaggccagcatcattctgataccaaagccgggcagagacacaaccaaaaaagagaattttagaccaatatccttgatgaacattgatgcaaaaatcctcaataaaatactggcaaagcgaatccagcagcacatgaaaaagcttatccaccatgatcaagtgggcttcatccctgggatgcaaggctggttcaatatacgcaaatcaataaatgtaatccagcatataaacagaaccaaagacaaaagccacgtgattatctcaatagatgcagaaaaggcctttgacaaaattcaacaacccttcatgctaaaaactctcaataaattagctgataagcaacttcagcaaagtctcaggatacaaaatcaatgtaccaaaatcacaagcattcttatacaccaaaaacagacaaacagccaaatcatgagtgaactcccattcacaattgcttcaaagagaataacatacctaggaatccaacttacaagggatgtgaaggacctcttcaaggagaactaccaaccactgctcaatgaaataaaagaggatacaaacaaatggaagaacattccatgctcatggataggaagaatcaatatcgtgaaaatggccatactgcccaaggtaatttatagattcaatgccatccccatcaagctaccaatgactttcttcacagaattggaaaaaactactttaaagttcatatggaaccaaaaaagagcccgcattgccaagtcaatcctaagccaaaagaacaaagctggaggcatcatgctacctgacttcaaactatactacaaggctacagtaaccaaaacagcatggtactggtaccaaaacagacatatagatcagtggaacagaacagagccctcagaaataatgccgcatatctacaactatctgatctttgacaaacctgagaaaaacgagcaatggggaaaggattccctttttaataaatggtgctgggaaaactggctagccatatgtagaaagctgaaactggatcccttctttacaccttttacaaaaattaattcaagatggattaaagacttaaatgttagacctaaaaccataaaaaccctggaagaaaacctaggcattaccattcaggacataggcatgggcaaggacttcatgtctaaaacaccaaaagcaatggcaacaaaagccaaaattgacaaatgggatctaattaaactaaagagcttctgcacagcaaaagaaactaccgtcagaatgaacaggcaacctacagaatgggagaaaattttcgcaacctactcatctttcaaagggctaatatccagaatctacaatgaactcaaacaaatttacaagaaaaaaacaaccccatcaaaaagtgggcaaagaatatga

SEQ ID NO: 12957 - DNA, 1836 bp, Homo sapiens; identical to SEQ ID NO: 2310
  SIMILAR (40)..(123): 531254mologous to Homo sapiens dJ322I12.1 (novel protein similar to C. elegans C05C8.6 (Tr:016313)),accession number AL033518,Smith-Waterman Score=89.

SEQ ID NO: 12958 - DNA, 1587 bp, Homo sapiens
  SIMILAR (1)..(897): 671254mologous to Homo sapiens putative p150,accession number U93570,Smith-Waterman Score=968.
atgggagactttaacaccccactgtcaacattagacagatcaatgaggcagaaagttaacaaggatacccaggaattgaactcagctctgcaccaagtggacctaatagacatctacagaactctccattgcaaatcaacagaatatacatttttttcagcaccacaccacacctattccaaaattgaccacataggtggaagtaaatctctcctcagcaaatgtaaaagaacagaaattataacaaactgtctctcagaccacagtgaaatcaaactagaactcaggattaagaaactcactcaaaaccactcaactacatggaaactgaacaacctgctcctgaatgactactgggtacataacgaaatgacggcagaaataaagatgttccttgaaaccaacaagaacaaagacacaacataccagaatctctgggacacgttcaaagcagtgtgtagagggaaatttatagcactaaatgcccacaagagaaagcaggaaagatccaaaattgacaccctaacatcacaattaaaagaactagaaaagcaagagcaaacacattcaaaacctagcagaaggcaagaaataaaaatacaaactaccatcagagaatactacaaacacctctacacaaataaactagaaaatctagaagaaatgaataaattcctcgacacatacaccctcccaagactaaaccaggaagaagttgaatctctgaatagaacaataacaggctctgaaattgtggcaataatcaatagcttaccaaccaaaaagagtccaggaccagatggattcacagccgaattctaccagaggtacaaggaggaactggaaaaccccatcgtctcagtccaaaatctccttaagctgataagcaacttcagcaaagtctcaggatacaaaatcaatgtacaaaaatcacaagcattcttatacaccaacaacagacaaacagagagccaaatcatgagtgacctcccagtcacaattgcttcaaagagaataaaatacctaggaatccaacttacaagggacgtgaaggacctcttcaaggagaactacaaatcactgctcaatgaaataaaagaggacacaaagaaatggaacaacattccctgctcatgggtaggaagaatcaacatcgtgaaaatggccatactgcccaaggtaatttatagattcaatgccatccccatcaagctaccaatgactttcttcacagaattggaaaaaactactttaaagttcatatggaaccaaaaaagagcctgcatcgccaagtcaatcctaagccaaaagaacaaagctggacgcatcacgctacctgacttcaaactatactatgaggctacagtaaccaaaacagcatgggacatggatgaagctggaaaccatcattctcagcaaactattgcaaggacgaaaaaccaaacaccgcatgttctcactcatagatgggaattgaacaatgagaacacatggacacaggaaggggaacatcatacactggggcctgttgtggggtgtggggagtggggagggatagcattaggagatatacctaatgttaattga

SEQ ID NO: 12959 - DNA, 1851 bp, Homo sapiens; identical to SEQ ID NO: 2007
  SIMILAR (274)..(1779): 931254mologous to Homo sapiens putative p150,accession number U93572,Smith-Waterman Score=2471.

SEQ ID NO: 12960 - DNA, 1632 bp, Homo sapiens
  SIMILAR (244)..(1530): 551254mologous to Homo sapiens disrupter of silencing SAS10,accession number AF271212,Smith-Waterman Score=884.
atgaatgaaatgaagcaagaagagaagtttagagaaaaaagagtaaaaagaaacgaacaaagcctccaagaaatatgggactatgtgaaaagaccaaatctacgtctgattggtgtacctgaaagtgacagggagaaaggaaccaagttggaaaacactctgcaggatattatccaggagaacttccccaacctagcaaggcagaccaacattcaaattcaagaaatacagagaatgccacaaagatactcctcgagaagaccaaatccaagacacataattgtcagattcaccaaatttgaaatgaaggaaaaaatattaagggcagccagagagaaaggtcgggttacccacaaagggaagcccatcagactaacagcggatctcttggcagaaactctacaagccagaagagtgttggaagttctggccagggcaatcaggcaggagaaagaaataaagagtattcagttaggaaaagaggaagtcaaattgtccctgtttgcagacgacatgattgtatatttagaaaaccccattgtctcagcccaaaatctccttaagctgataaacaacttcagcaaagtctcaggatacaaaatcaatgtacaaaaatcacaagcattcttatacaccaataacagacaaacagagagccaaatcatgagtgaactcccattcacaattgcttcaaagaggataaaatacctaggaatccaacttacaagggatgtgaaggacctcttcaaggagaactacaaaccactgctcaaccaaataaaagaggacacaaacaaatggaagaacattccatgctcatggataagaagaatcaatattgtgaaaatggccatactgcccaaggtaatttatagattcaatgccatccccatcaagctaccaatgactttcttcacagaattggaaaaaactactttaaagttcatctggaaccaaagaagagccctcattgataagacaatactaagccaaaagaacaaagctggaggcatcacgctacctgacttcaaactatactacaaggctacagtaaccaaaacagcatggtactggtaccaaaacagagatatagaccaatggaacagaacagagccctcaggaataatgccgcatatctacaaccatctgatctttgacatacctgacaaaaacaagaaatggggaaaggattccctatttaataaatggtgctgggaaaactggctagccatatgtagaaagctgaaactggatcccttccttacatcttatataaaaattaatgcaagatggattaaagacttaaatgttagacctaaaaccataaaaaccttagaagaaaacctaggcaataccactcaggacatacgcgtgggcaaggacttcatgtctaaaacaccaaaagcaatggcaactaaagccaaaattgacaaatgggatctaattaaactaaagagcttctgcagagtaaaagaaactaccatcagagtgaacaggcaacctacaacatgggagaaaatttttgcaatctacccatctgacaaagggctaatatccagaatctacaaagaatttaaacaaatttacaagaagaatcaaacaaccccatcagaaagtgggcaaaggatatga

SEQ ID NO: 12961 - DNA, 2623 bp, Homo sapiens
  SIMILAR (16)..(96): 921254mologous to Homo sapiens Human secreted protein sequence encoded by gene 2 SEQ ID NO:250,accession number Y91577,Smith-Waterman Score=141.
tcacaacagggcagactcttgcaactttcgggggctggcagcctctgcatcccactctggacagaccaccattgtctgggttggtgggcctgctgaacgtggcttccagggccctctggtcagcgccagatctgggcgcagctgctgagtgcacacagctgctaggtttggggcaaggagatcaggaatggattcagggttgggtgtgtcgttggaggcatccgcatagagctgttggagcttagaggccccctggactgaagcatacacgtgggactcgtagtacagagatatgtactgaagctgaaggacttgtgaggtttgtgtgcatgtgtctttatagcagcatgatttatattcctttgggtatatacccagtaatgggatggctgggtcaaatagtatttctagttctagatccctgaggaattgccacactgtcttccacactggttgaactggtttacagtcccaccaacagtgtaaaagtgttcctatttctccacatcctctccagcacctgttgtttcctgactttttaatgattgccattctaattagtgtgagatagtatctcattgtggttttgatttgcatttctctgatggccagtgatgatgagcattttttcatgtgtctgttggctgcataaatgtcttcttttgagaagtgtctgttcatatccttcacccactttttgatggggttgtttgtttttttcttgtaaatttgtttgagttctttgtagattctggatattagccctttgtcagatgagtagattgcaaaaattttcttccattctgtaggttgcgtgttcactctgatggtagtttcttttgctgtgcagaagctctttagtttaattagatcccatttgtcaattttggcttttgttgccattgcttttggtgttttagtcatgaagtccttgcccatgcctatgtcctgaatggtattgcctaggttttcttctagggtttttatggttttaggtctaacatttaagcctttaatccatcttgaattaatttttgtgtaaggtgtaaattttgtataaggatccagtttcagctttccacatatggctagccagttttcccagcaccatttgttaaatagggaatcctttccccatttcttgtttttgtcaggtttgtcaaagatcagatagttgtagatgtgtggtattatttctgagggctctgttctgttccattggtctgaatctctgttttggtaccagtaccatgctgttttggttactgtagccttgtagtatagtttgaagtcaggtagcatgatgcctccaattttgttcttttgggttaggattgacatggcaatgcgggctcttttttggttccatgtgaactttaaagtagttttttccaattctgtgaagaaagtcattggtagcttgatggggatggcattgaatctataaattaccttgggcagtatggccattttcatgatattgattcttcctacccatgagcatggaatgttcttccatttctttgtatcctcttttattttgttgagcagtggtttatagttctccttgaagaggtccttcatatcccttgtaagttggattcctaggtattttattctctttgaagcaattgtgaatgggagttcactcatgatttggctctctgtttgtctgttattggtgtataagaatgcttgtgatttctgcacattgattttgtatcctgagactttgctgaagttgcttatcagcttaaggagattttgggctgagacgatggggttttctagatatacaatcatgtcttctgcaaacaggaacaatttgacttcctcttttcctaattgaataccctttatttccttgtcctgcctaattgccttggccagaaattccaacacattttttattgtgtctatttgattcttctctctcttcttctttattagtcttgctagctgtctatcaattttgttgatcttttcaaaaaaccagtccctggattcattgattttttgaagagttttttgtgtctctatctccttcagttctgctctgatcttagttatttcttgccttctgctagcttttgaatgcgattgctcttgcttttctagttcttttaattgtgacgttagggtgtcaattttagatctttcctgctttctcttgtgtgcatttagtgctatatatttccctctacacactgctttaaatgtgtcccagagattctggtatgttgtgtctttgttctcattggtttcaaagagcatctttatttctgccttcatttcgttatgtacccagtagtcattcaggagcaggttgttcagtttccatgtagttgagaggttttgagtgagtttcttaatcctcagttctagtttgattgcactgtggtctgagagacagtttgttataatttctgttcttttacatttgctgaggagtgctttacttccaactatgtggtcaattttggaataagtgtgatgtggtgctgagaagagtgtatattctgttgatttggggtggagagttctgtagttgtctgttaggtctgcttgatgctgagctgagttcaattcctggatatctttgttaactttctgtcttgttgat

SEQ ID NO: 12962 - DNA, 6128 bp, Homo sapiens
  SIMILAR (2050)..(3135): 941254mologous to Homo sapiens putative p150,accession number U93563,Smith-Waterman Score=1740.
ttaagaatatttggggctgagactgtagggttttccagctagaggattatgccatctgcaaacagggacagtttcagctcctctcttgctatttggatgcctatttttttctttctcttgcctgatttccctggccaggacttccaatgctatgttgaatagcagtggtgagagaaggcatccttgtcttttgcgggtttttaacgagaatgcttccagcttttgcccattcagtatgatgttggctatggggttgtcatagttggctcttattattttgtggtatgttccttcaattactagtttcttgagagtttttaaaatgaatggatgttgaattttatcaaacgtcttttctgcatctattgaaataatcatatgctttttttctttagttctgtttatgtgatgaatcacatttattgatttgcatatgttgaaccaactttgcatcccagagaaaaagcccactacatcgtgttggataagtctttttatgtgctgctggattcgatttctcagtatttcattgaggatttttggattgctgttcatcaaagatattggactgaaattatctttctttgttgtatctcttccaggttttggtatcaagatgatgctgtcctcacagttagttaaggaggagttcttcctcttcaactcaatattttggaatagtttcagaaggaaaagtaccagctcttctttgtacatctggtagaattctgctgtgaatccatctggtctgagcttcttttggttggtaggtgtggttttgatttgcatttctctgatggccattgatggtgagcattttttcatgtgtttttttggctgcataaaatgtcttcttttgagaagggtctgttcatgtcctttgcccactttttgatggggttgtttgtttttttcttgtaaatttgtttgagttcattgtagattctgcatattagccctttgtcagatgagtaggttgagaaaattttctcccattttgtaggttgcctcttcactctgatggtagtttcttttgctgtgcagaagctctttagtttaattagatcccatttgtcaattttggcttctgttgccattgcttttgttcccatttcttttggtgttttagacatgaagtccttgcccatgcctatgtccctgaatggtaatgcctaggttttcttctagggtttttatggttttaggtctaacgtttaagtctttaatccatcttgaattagtttttgtataaggtgtaaggaagggatccagtttcagctttctacatatggctagccagttttcccagcaccatttattaaatagggaatcatcctttccccattgcttgtttttgtcaggtttgtcaaagatcagatagttgtagatatgtggcgttatttctgagggctgtgttctgttccactggtctatatctctgttttggtaccagtaccatgctgttttggtaccagtacagtcccatgctgttttgattactgtaagccttgtagtatagtttgaagtcaggtagccacgatgcctccagctttgttcttttggcttaggattgacttggcaatgtgggctctttttttggttccatatgaacttgaaagtagtttttttccaattctgtgaagaaagtcattggtagcttgatggggatggcattgaatctgtaaattaccttgggcagtatggccattttcacgagattgattcttcctcctacccatgagcatggaatgttcttccatttgtttgtatcctcttttatttcattgagcagtggtttgtagttctccttgaactcctttgaagaggtccttcacatcccttgtaagttggattcctaggtattttattctctttgaagcagttgtgaatgggagttcactcatgatttggctctcttgtttgtctgtgttattggtgtataagaatgcttgtgatttttgtacattgactttgtatcctgagactttgctgaagtttgctatcagcctaaggagactttgggccgagacgatgggggtttctaggatatacatcatgtcatctgcaaacaggggacagtttgacttcctcttttcctaattgaataccctttatttccttctcctgcctaattggccctggcccagaacctccaacactatgttgaataggagtggtgagagagggcatccctgtcttgtgccagttttcaaagggaatgcttccagtttttgcacatttagtatgatattgactgtgggtttgtcatagatagctcttattattgtgagatacttcccatcaatacctaatttattgagagtttgtagcaggaagtgatgttgaattttgtcaaaggccttttctgcatctattgagataatcatgtggtttttgtctttggctctgtttataccctggattacatttattgatttgcgtatattgaaccagacttgcatcccagggatgaagcccacttgatcatggtggataagctttttgatgtgctgctggattcggcttgccagtattttactgaggagttttgcatcaatgttcatcaaggatattggtctaaaattctctgtgctggtggtgtctctgcccggctttgggatcaggatgatgctggcctcataaaatgagttagtggaggattcccgctcccttctattgactggaatagtctcagaaggaatggtaccagttcctccttgtacctctggtagaattcggcagtgaatccatctggtcctggactgtgcatggtgtggtaagctattgattattgccacaatttcagctcctgttattggtctattcagagattcaacttcttcctggtttagtcttgggagagtgtatgtgtcaaggaatgtatccatttcttctagattttctagtttatttgcgtagaggtgtttgtagtattctctgatggtagtttgtatttctgtgggatcggtggtgatatcccctttatcattttttattgtgtctatttgattcttctctctttttttctttattagtcttgctagcggtctatcaattttgttgatcctttcaaaaaaccagctcctggattcattgattttttgaagggttttttgtgtctctatttccttcagttctgctctgattttagttatttcttgccttctgctagcttttgaatgtgtttgctcttgcttttctagttcttttaattgtgatgttagggtgtcaattttggatctttcctgctttctcttgtgggcatttagtgctataaatttccctctacacactgctttgaatgcgtcctagagattctggtatgttgtgtctttgttctcgttggtttcaaagaacatctttatttctgccttcatttcgttatgtacccagtagtcattcaggagcaggttgttcagtttccatgtagttgagcggctttgagtgagattcttaatcctgagttctagtttgattgcactgtggtctgagagatagtttgttataatttctgttcttttacatttgctgaggagagcttcacttccaagtatgtggtcaattttggaatagctgtggtgtggtgctgaaaaaaatgtatattctgttgatttggggtggagagttctgtagatgtctattaggtctgcttggtgcagagctgagttcaattcctgggtatccttgttgactttctgtctcgttgatctgtctaatgttgacagtggggtgttaaagtctcccattattaatgtgtgggagtctaagtctctttgtaggtcactcaggacttgctttatgaatctgggtgctcctgtattgggtgcatacatatttaggatagttagctcctcttgttgaattgatccctttaccatcatgtaatggccttctttgtctcttttgatctttgttggtttaaagtctgttttatcagagactaggattgcaacccctgcctttttttgttttccatttgcttggtagatcttcctccatccttttattttgagcctatgtgtgtctctgcacatgagatgggtttcctgaatacagcacactgatgggtcttgactctttatccaacttgccagtctgtgtcttttaattggagaatttagtccatttacatttaaagttaatattgttatgtgtgaatttgatcctgtcattatgatgttagctggtgattttgctcgttagttgatgcagtttcttcctagtctcgatggtctttacattttggcatgattttgcagtggctggtaccggttgttcctttccatgtttagcgcttccttcaggagctcttttagggcaggcctgctggtgacaaaatcggtcagcatttgcttgtctgtaaagtattttatttctccttcacttatgaagcttagtttggctggatatgaaattctgggttgaaaattcttttctttaagaatgttcaatattggcccccactctcttctggcttgtagggtttctgccgagagatccgctgttagtctgatgggcttccctttgagggtaactcgacctttctctctggctgcccttaacattttttccttcatttcaactttggtgaatctgacaattatgtgtcttggagttgctcttctcgaggagtatctttgtggcgttctctgtatttcctgaatctgaacgttggcctgccttgctagattggggaaagtctcctggataatatcctgcagagtgttttccaacttggttccattctccgcatcactttcaggtacaccaatcagacgtagatttggtcttttcacatagtcccatatttcttggaggctttgctcgtttctttttattcttttttctctaaacttcccttcttgcttcatttcattcatttcatcttccattgctgataccctttcttccagttgatcgcattggctcctgaggcttctgcattcttcacgtagttctcgagccttggttttcagctccatcagctcctttaagcacttctctgtattggttattctagttatacattcttctaaatttttttcaaagttttcaacttctttgcctttggtttgaatgtcctcccgtagctcagagtaatttgagcgtctgaagccttcttctctcagctcgtcaaaatcattctccatccagctttggtccgttgctggtgaggaactgcgttcctttggaggaggagaggtgctctgcgttttagagtttccagtttttctgttctgttttttccccatctttgtggttttatctacttttggtctttgatgatggtgatgtacagatgcgttttcggtgtggatgtcctttctgtttgttagttttccttctaacagacaggaccctcagctgcaggtctgttggaataccctgccgtgtgaggtgtcagtgtgcccctgctggggggtgcctcccagttaggctgctcgggggtcaggggtcagggacccacttgaggaggcagtctgcccgttctcagatctccagctgcgtgctgggagaaccactgctctcttcaaagctgtcagacagggacatttaagtctgcagaggttactgctgtctttttgtttgtctgtgccctgcccccagaggtggagcctacagaggcaggcaggcctccttgagctgtggtgggctgcacccagttcgagcttccccggctgctttgtttacctaagcaagcctgggcaatggcgggcgcccctcccccagccttgctgcggccttgcagtttgatctcagaccgctgtgctagcaatcagcgagattccgtgggcgtaggaccctccgaaggccaggtgtgggatatagtctcgtggtgcgccgttttttaagccggtctgaaaagcgcaatattcgggtgggagtgacccgattttccaggtgcgtccgtcacccctttctttgactcggaaagggaactccctgaccccttgcgcttcccaggtgaggcaatgcctcgccctgcttcggctccgcacggtgcgcgcacccactggcctgcgcccactgtctggcactccctagtgagatgaacccggtacctcagatggaaatgcagaaatcacccgtcttctgcgtcgctcacgctgggagctgtagaccggagg

SEQ ID NO: 12963 - DNA, 747 bp, Homo sapiens
  SIMILAR (1)..(87): 861254mologous to Homo sapiens Human secreted protein sequence encoded by gene 2 SEQ ID NO:250,accession number Y91577,Smith-Waterman Score=142.
ctccaaattatgttttcttatttcagtgaagaaaaaatgactgctgcccgcattagaaaatgccacaagtgtgggactggcctcatcaaatctgaaggctgcaaccgcatgtcttgccgctgtggtgcccagatgtgctacctctgtcgagtttctattaatggatatgaccatttctgccaacatccccgctcaccaggagccccttgccaggagtgttcaagatgctctctctggaccgatcccactttgggcagctcctaccgattcctcccgagagatctcgtgaacggcccttccagcctcccccatcggactatgctgctcattggctgcagcctcgggaatctcggccacgtgcctggctttcatgggggaggggagaggggtggccgccggaacctcgctgaggtgaccccgacttccctctgcagcagccacctgcccctgccaatctcaagacttgcgccccacgcccccgagggaccacctatcacagcgcagccctcccagttgcgtcatcagcagccaatcagcgcttgctctgctgccgacggcggggaggatgcgggggaacagggggctccggcctgcagtgccctggctgcccccgggacgccccgcgtgtcccaaattccgtcgccatcaccgccttcccagcgcacaatgactggacgccaggtccctccgctccaggctgcgccttactgctcctcccctcagtcttctcgcagctgctatccttag

SEQ ID NO: 12964 - DNA, 797 bp, Homo sapiens
gagaaggtgctcccccagaccatcctgtataagtactatgagcgaaaagccgaggaggaggttgcggcagcctacgccgacgagcttgtcaggtgcccgtcctgtagctttccggctctgttggacagtgatgtgaagaggttcagctgtcctaatcctcactgccgaaaggaaacctgtaggaagtgtcagggactctggaaagaaacataatggcctcacctgtgaagagctggctgaaaaagacgacatcaagtaccgtacctctattgaagaaaaaatgactgctgcccgcattagaaaatgccccaagtgtgggactggcctcatcaaatctgaaggctgcaaccgcatgtcttcccgctgtggtgcccagatgtgctacctctgtcgagtttctattaatggatatgaccatttctgccaacatcgccgctcaccaggagccccttgccaggagtgttcaagatgctctctctggaccgatccccctgaagatgatgagaagcttattgaggaaatccagaaggaggctgaagaggaacagaaaagaaagaatggagagaacaccttcaaacgcattggacccccgctggagaagcctgtggagaaggtgcagagggtggaggccctcccgaggccccgttccgcagaacctgccacagccacagatgccaccctatgccttcgcgcacccacccttccccctgcctcccgtgcggcctgttgtcaacaacttccccactcacatggggcctatcccagccccgtacgtgccccctctgcccaacgtgcgg

SEQ ID NO: 12965 - DNA, 418 bp, Homo sapiens
  SIMILAR (434)..(108): 331254mologous to Homo sapiens Human secreted protein sequence SEQ ID NO:210,accession number Y87171,Smith-Waterman Score =100.
ttaatctgcaagtcaagtctctgcaggaaatctctggctgacacttcctcaggctgcacaggctgaacatcagattcttgaggactgggaggagggaggtcttccccggccaccactggctcctcttcctgagaaaaactgttatcagcagtttcattttctggagaatcaatggagttaagtccattaaacaacaaaggcttctctgatataactgggatgttcaaagttttcttcagaaatatacaatcattggtaaacagtttattggcccttttaatctgttccatcgtgacaccgtacttgagcgcgatgccctgcagcgtgtcgaaagcgcgcacccggtgctccacatggagctcgatgacgacggcgcccagcggcgcccgcacgctggcggtggtccgttcgaccgaag

SEQ ID NO: 12966 - DNA, 930 bp, Homo sapiens
  SIMILAR (826)..(927): 971254mologous to Homo sapiens secretogranin III,accession number AF078851,Smith-Waterman Score=163.
atggctcactgcagcctcgaactcctggtctcaagtaatcttcccatctctgccttggcagggttctgccagggctctatcgccaatggagcaggggtccacctggggcctaggacgcctgcagatagccctctcttagccccaacggccgcgggcttcagcgctccccggctccctcgctctgcagggtcttcccggtaccggcaggccgcggcgggagctgctttcgctcttaaccttgcaggacccatggcggattcctcgcccgcactgtccctgcgggaaggcggcccccgcgcgccgcggccctcggccccctcgccgccgccgcgctcgcgctccggctccgagtccgaggaggccgagctgtcgctgagcctggcccgcaccaagacccgctcgtacggcagcaccgccagcgtgcgggcgccgctgggcgccggcgtcatcgagcgccatgtggagcaccgggtccgcgcgggcgacacgctgcagggcatcgcgctcaagtacggtgtcacgggaatgcaggtagcggaagctaagcagatcagagtccaaatgccagctgttatttcctgtgtagccttagcctactcacttcgcctctctgagccccagattcctcatctctcagtggatggtaatatccgcttgcagacatcagtacagtcacaaaagcagtcactcgcttacataaagcaaaacacagaaccaggccctgttctaagtgccagagatgtcccgcccaaggaatgcacagcgtcattagagctatggttggccctgctcagtgatgtcatggataggtgtgttactgccaaggagatgagagacttcatcaataaacaagctgatgcttatgtggagaaaggcatccttgacaaggaagaagccgaggccatcaagcgcatttatagcagcctgtaa

SEQ ID NO: 12967 - DNA, 1640 bp, Homo sapiens
  SIMILAR (1)..(108): 881254mologous to Homo sapiens R33374_1,accession number AC005786,Smith-Waterman Score=164.
atggggttcctcgggaccggcacttggattctggtgttagtgctcccgattcaagctttccccaaacctggaggaagccaagacaaatctctacataatagagaattaagtgcagaaagacctttgaatgaacagattgctgaagcagaagaagacaagattaaaaaaacatatcctccagaaaacaagccaggtcagagcaactattcttttgttgataacttgaacctgctaagggcaataacagaaaaggaaaaaattgagaaagaaagacaatctataagaagctccccacttgataataagttgaatgtggaagatgttgattcaaccaagaatcgaaaactgatcgatgattatgactctactaagagtggattggatcataaatttcaagatgatccagatggtcttcatcaactagacgggactcctttaaccgctgaagacattgtccataaaatcgctgccaggatttatgaagaaaatgacagagccgtgtttgacaagattgtttctaaactacttaatctcggccttatcacagaaagccaagcacatacactggaagatgaagtagcagaggttttacaaaaattaatctcaaaggaagccaacaattatgaggaggatcccaataagcccacaagctggactgagaatcaggctggaaaaataccagagaaagtgactccaatggcagcaattcaagatggtcttgctaagggagaaaacgatgaaacagtatctaacacattaaccttgacaaatggcttggaaaggagaactaaaacctacagtgaagacaactttagggacttccaatatttcccaaatttctatgcgctactgaaaagtattgattcagaaaaagaagcaaaagagaaagaaacactgattactatcatgaaaacactgattgactttgtgaagatgatggtgaaatatggaacaatatctccagaagaaggtgtttcctaccttgaaggcttggatgaaatgattgctcttcagaccaaaaacaagctagaaaaaaaatgctactgacaatataagcaagcttttcccagcaccatcagagaagagtcatgaagaaacagacagtaccaaggaagaagcagctaagatggaaaaggaatatggaagcttgaaggattccacaaaagatgataactccaacccaggaggaaagacagatgaacccaaggggaaaaacagaagccctatttggaagcccatcaggaaaaaatattgaatggttgaagaaacatgacaaaaagggaaataaagaagattatgaccctttccaaagatgagaggtttccttcaataacaaagctgatgccttatgtggagaaaggcatccttgacaaggaagaagccgaggccatcaagcgcatttatagcagcctgtaaaaatggcaaaagatcccaggagtctttcaactgtttcagaaaacataatatagcttaaaacacttctaattctgtgattaaaattttttgacccaagggttattagaaagtgctgaatttacagtagttaaccttttacaagtggttaaaacatagctttcttcccgtaaaaactatctgaaagtaaagtttgtatgtaagactgaaaaaaaaaaaaaaaaaaa

SEQ ID NO: 12968 - DNA, 882 bp, Homo sapiens
  SIMILAR (157)..(339): 1001254mologous to Homo sapiens glutathione S- transferase,accession number X68677,Smith-Waterman Score=321.
atgggaagtggagccagtgctgaggacaaagaactggccaagaggtccaaggagctagaaaagaagctgcaggaggatgctgataaggaagccaagactgtcaagctgctactgctggctgcctgcaagctcctgccgataggaggtgcatcacttctgccctacttgattgatggggctcacaagatcacccagagcaacgccatcctgtgctacattgcccgcaagcacaacctgtgtggggagacagaagaagagaagattcgtgtggacattttggagaaccaggctatggacgtctccaatcaactggccagagtctgctacagccctgactttgggagtccctccctggtaaagagccactggctgggacccaactataccaaggaaggccctgaggggaatgacatccgccggaccaatgtgccagacatccgcgtgggctaccggtacgagaccctgtgccaggagctggcgctcatcacgcaggcagtccagagtgagatgctggagaccattccagaggaggcggtgcttcaggcttcagcagccttggagaagcatcagctgagaggagctatcacatgggagccgggactgctcagcaaagctggttatgccatctgcctgttcggggaatacgcagactcacactatgggaatttggaacaagtgaacaattctaaacttttcaactgctacgtgtttcagaagaaccaagacagctcctgctcccccgccaggtttttggaaggcccaaccccccacttaactctgtactggcctggttccccattttgggtacattcctatggttcccgaaccgggaacaccctattcaccttcttaatttctaaagcccaactcaggctcttataa

SEQ ID NO: 12969 - DNA, 1076 bp, Homo sapiens
  SIMILAR (533)..(1330): 801254mologous to Homo sapiens mevalonate kinase,accession number M88468,Smith-Waterman Score=998.
ctcctgattatgacagaagccagtggctgaatgaaaaattcaagctgggcctggactttcccaatgtaggccctggtctcctctttgcccttgcatatgggaaggggatgctggggagcctggtggcccaactgagcttccccggtttcccatctatccagctgccctacttgattgatgggactcacaagatcacccagagcaacgccatcctgcggtacattgcccgcaagcacaacctgtgtggggagacagaagaggagaagattcgtgtggacattttggagaaccaggctatggacgtctccaatcagctggccagagtctgctacagccctgactttgagaaactgaagccagaatacttggaggaacttcctacaatgatgcagcacttctcacagttcctggggaagaggccatggtttgttggagacaagatcacctttgtagatttcctcgcctatgatgtccttgacctccaccgtatatttgagcccaactgcttggacgccttcccaaatctgaaggacttcatctcccgctttgagggcttggagaagatctctgcctacatgaagtccagccgcttcctcccaaaacctctgtacacaagggtggctgtctggggcaacaagtaatgccttgaaggccaggaggtgggagtgaggagcccatactcagcctgctgcccaggctgtgcagcgcagctggactctgcatcccagcacctgcctcctcgttcctttctcctgtttattcccatctttacccccaagactttattgggcctcttcacttcccctaaacccctgtcccatgcaggccctttgaagcctcagctacccactttccttcatgaacatccccctcccaacactacccttccctgcactaaagccagcctgaccttccttcctgttagtggttgtatctgctttaaagggcctgcctggcccctcgcctgtggagctcagccccgagctgtccccgtgttgcatgaaggagcagcattgactggtttacaggccctgctcctgcagcatggtccctgccttatgcctacctgatggaag

SEQ ID NO: 12970 - DNA, 406 bp, Homo sapiens
  SIMILAR (50)..(304): 531254mologous to Mus musculus protein kinase,accession number U02313,Smith-Waterman Score=202.
  misc_feature (1)...(406): n = a,t,c or g
ggaaggctgttttcaaaagatcaagcttgaccacatattatcccctccacccatgccgttttggaaatgcagcaacccagatgtggcttttggccctggaaaatccctgaagtataaaagacagctgagttaggatggaagacagctaaggcgagggagcctgggaggagccctgactgggaggtaccttcttccaaacccggtggcgggacaggcctggccggcctctgcagagacgtccaacctcgtgggcatgcgcagccaggccctgggccagtcggcgccctcgctcaccgccagcctgccctgtgtgtccaaatgctgggagaacatccccccttggatgaattgcccccccattaaataaaacatatccaaagctcnnnnnnnnnnnnnnnnnnnnnnn

SEQ ID NO: 12971 - DNA, 500 bp, Homo sapiens
  SIMILAR (457)..(155): 591254mologous to Mus musculus protein kinase,accession number U02313,Smith-Waterman Score=290.
tttgagctttggatatgttttatttaatgtggtggcaattcatccaaggggtgatgttctcccagcatttggacacacagggctgacaatctcataacagcatcttgcctagaaagcagtttctctcacttctcttgtctattacccagtcacaatcactgcttctgcacaaacttcctcttctggggagactcagctccttcaggctggcggtgagcgagggcgccgactggcccagggcctggctgcgcatgcgcacgaggttggacgtctctgcagaggccggccaggcctgtcccgccaccgggtttggaagaaggtacctcccagtcagggctcctcccaggctccctcgccttagctgtcttccatcctcactcagctgtcttttatacttcagtgattttccagggccagaagccacatctgggttgctgcatttccgaaacggcatgggtggaggggataatatgtggtcaagctcctcgtcctgctcctcc

SEQ ID NO: 12972 - DNA, 1359 bp, Homo sapiens
  SIMILAR (1)..(549): 951254mologous to Homo sapiens mevalonate kinase,accession number M88468,Smith-Waterman Score=865.
atgcattacaacgaaagaaagaagagacaacgcaggagagacgcagaacgagaacaaacaacaaaaccaacacgacagaaagacggacaacacgacacagcaaaagaaaagaagacagaaagagcagagagacacagaacagaacgagaaaagaggaagaaagacacgacggaaaaaagagaacaacgctatacggatcttgaccacatattatcccctccacccatgccgtttcggaaatgcagcaacccagatgtggcttctggccctggaaaatcactgaagtataaaagacagctgagtgaggatggaagacagctaaggcgagggagcctgggaggagccctgactgacattgcgctaaaggttaaagctagaaaacagaaaagatacagtcatcttccttgggacacttccatccaagtccacagacacaaaaccacaaccattaagacaacatggcaaaagtcgggacagagtcaggcagcaactgcttcctatggaccagatgctgaaggcatcgtgcagctcatcacattacaccacccaaaaggatcagaaaacagtgcatctaatctatacatcttcgaatataaggaacatcatgtggacgtcaaaagtgatgagcaaatagtatcatttggccgtttccttcttttttttgttttctcacacaatcgtaggtcccagtggacaggggagagcggcaccaagaaccagacaacaacaagagacaacgagagagaagaaaagagacgaacacaagaaacacgacaaagaaaagaaagaggaaaaaagaagaacagagacacaacagaagaacacaagaagaaacacaaaacaaaagatctatgtgtcacaggaaaaggggagacatctgcccgatctgaccccagaggtcaacgatgccagggcgacacactccccaggcggccacagaatggacgcaacctcccacgaggacctgcggaccagacacgccgggcccgcaccgccacacgggaacgaccgaatacactccatgggcgacaacggaccaagacccccacacacgggccacaccggaagacaaccgcccggcgcccagaccacgcgcaccgacctgccaccggcccaccgcggtcccaccggcccaaaacggcacggcaggaccggtccattttatgtatttattttcaactgccacacgtcaggcctctggtgtctggttgggttcagccccatggggagatccctggcacggagaccacggatgacccagaacggatggggatgaaattacgacgaaactttggtcgacttccgaacactcacttgctccctggctccctgctggtggctttagcactggatggctga

SEQ ID NO: 12973 - DNA, 447 bp, Homo sapiens
  SIMILAR (40)..(228): 981254mologous to Homo sapiens dJ181C9.2 (Rho GTPase activating protein 8 (RhoGAP, p50RhoGAP)),accession number Z98743,Smith-Waterman Score=315.
cattacgccaagcttggcacgaggccgaggttgaagttcatgagttcgcccagcctcagtgacctgttcaagagagagccggccgccgccgcggacgagcggggcacgcagcagcgccgggcctgcgccaacgccacctggaacagcatccacaacggggtgatcgccgtcttccagcgcaaggggctgcccgaccaggagctcttcagcctcaacgagggcgtccggcagctgttgaagacagagctggggtccttcttcacggagtacctgcagaaccagctgctgacaaaaggcatggtgatccttcgggacaagattcgcttctatgagggtgagtgtgggccccttggcggccactctgggccatgctgggtcctggctggctgctggactgctgggcctcgtgctgggggcctctgggtgcaaggtgtggctctctggtcc

SEQ ID NO: 12974 - DNA, 654 bp, Homo sapiens
  SIMILAR (3)..(101): 1001254mologous to Homo sapiens dJ181C9.2 (Rho GTPase activating protein 8 (RhoGAP, p50RhoGAP)),accession number Z98743,Smith-Waterman Score=173.
gttcgcccagcctcagtgacctgggcaagagagagccggccgccgccgcggacgagcggggcacgcagcagcgccgggcctgcgccaacgccacctggaacaggtaaggccgcgccctcccggccacccggaggctcatctgcaaaatgggtggccaagtcacagggaagggtagagttaaagcagatgaggacgttaggagcatggtggcagctgcctgctttgtggtgtgggcagcatcgtgtggacagctgtcccctccaaggtgagaagtgtggtgctggtctgccataggacgcaaggggctgcccgaccaggagctcttcagcctcaacgagggcgtccggtgagtgcctgtcccaccttggtccagggtctccgtgcagaatacagccagggtgtctgtctggggcagtctctcttctagcgtcccatgtggctcatactgttctgcttttgaccatgagaagcgtgcatctgagtcctcaggttagcgcaggagttcatggacaggagctggaccctatgcaaacatccgattggttgtggaaagtgacccatcagaagctgaagttacaaagttatactcctatgcaaatgaagacttggcccaaccaattgtggtaggggacgaatcagaggttcttgcagttt

SEQ ID NO: 12975 - DNA, 2378 bp, Homo sapiens
  SIMILAR (712)..(1164): 991254mologous to Homo sapiens transglutaminase X,accession number AF206510,Smith-Waterman Score=852.
atcgctaccgggacacgcttcgccgcgccatcctgctgctcagcccacagggagcccactccttcatcaacgaggccgtggagaccaacctggcttccaaggacagccactgggtctttgtgaatgaggaaatcagtgacccggagatcctggatctggtccatagtgcccttggaaggatgaccgtggtccggcaaatctttccgtctgcaaaggacaatcagaaatgcacgaggaacaaccaccgcatctcctccctgctctgcgacccccaggaaggctacctccagatgctgcagatctccaacctctatctgtatgacagtgttctgatgctggccaacgcctttcacaggaagctggaggaccggaagtggcatagcatggcgagcctcaactgcatacggaaatccactaagccatggaatggtgggaggtccatgctggataccatcaaaaagggccacatcactggcctcactggggtgatggagtttcgggaggacagttcgaatccctatgtccagtttgaaatccttggcactacctatagtgagacttttggcaaagacatgcgcaagttggcgacatgggactcagagaagggcttgaatggcagcttgcaagagaggcccatgggcagccgcctccaaggattgactcttaaagtggtgactgtcttggaagagcctttcgtgatggtggctgagaacatcctaggacagcccaagcgctacaaagggttctccatagatgtcctggatgcactggccaaggctctgggctttaaatatgagatttaccaagcccctgatggcaggtacggtcaccagctccataacacctcctggaacgggatgatcggggagctcatcagcaagagagcagacttggccatctctgccatcaccatcaccccagagagggagagcgttgtggacttcagcaagcggtacatggactattcagtggggattctaattaagaagcccgaggagaaaatcagcatcttctccctctttgctccatttgatttcgctgtgtgggcctgcattgcagcagccatccctgtggttggtgtgctgatatttgtgttgaacaggatacaggctgtgagggctcagagtgctgcccagcccaggccgtcagcttctgccactctgcacagcgccatctggattgtctatggagccttcgtacagcaaggtggcgaatcttccgtgaactccatggccatgcgcatcgtgatgggcagctggtggctcttcacgctcattgtgtgctcctcctacacagccaaccttgctgccttcctcacagtgtccaggatggacaaccccataaggactttccaggacctgtccaaacaagtggaaatgtcttatggcactgtccgggattctgctgtatatgagtacttccgagccaagggcaccaaccccctggagcaggacagcacgtttgctgaactctggcggaccatcagcaagaacggaggggctgacaactgcgtgtccagtccttcagaaggcatcaggaaggcaaagaaggggaactacgccttcctgtgggatgtggccgtggtggaatacgcagccctgacggatgacgactgctcggtgactgtcatcggcaacagcatcagcagcaagggttacgggattgccctgcagcatggcagcccctacagggacctcttctcccagaggatcctggagctgcaggacacaggggacctggatgtgctgaagcagaagtggtggccgcacatgggccgctgtgacctcaccagccatgccagcgcccaggccgacggcaaatccctcaagctgcacagcttcgccggggtcttctgcatcctggccattggcctgctcctggcctgcctggtggctgccctggagttgtggtggaacagcaaccggtgccaccaggagacccccaaggaggacaaagaagtgaacttggagcaggtccaccggcgcatgaacagcctcatggatgaagacattgctcacaagcagatttccccagcgtcgattgagctctcggccctggagatggggggcctggctcccacccagaccttggagccgacacgggagtaccagaacacccagctctcggtcagcacctttctgccagagcagagcagccatggcaccagccggacactctcatcagggcccagcagcaacctgccgctgccgctgagcagctcggcgaccatgccctccatgcagtgcaaacacaggtcacccaacggggggctgttccggcagagcccggtgaagacccccatccccatgtccttccagcccgtgcctggaggcgtccttccagaggctctggacacctcccacgggacctccatctga

SEQ ID NO: 12976 - DNA, 2196 bp, Homo sapiens
  SIMILAR (310)..(2172): 991254mologous to Homo sapiens transglutaminase X,accession number AF206510,Smith-Waterman Score=3321.
atggatctcctgaccatctgggaactgaaggaaggagcaggaaacggaactcgcgttgagccctcatgctgtaccaggaaacaattcttagcccctgagacagtagggtcactggagagctgggctgtgacaatgggcaccctgctttttctgctgcactgtgcagaaggaaggaggccgagcctcgatatccgtaatcacaaaagggccaccccatcacagctgcctattgatgattctgtgcatagagacctgggtggtaacaagcaggtgaagggtgcacactggtcatggcgtggaggggctgacatgataggagagccaaagaagcttgggacagaaccatcaactattccgttcagggccttttcctcaaaggtctgtcttccttccattctgagctccaggggtgataggacagccactgaggctgcagctggccccagcttcacattcccttacatggagatacacagaaggccagagaggaagacagatatccccgcacattgcagatgtagtgagttaagcagtgtccttccagggaagagacagcataaggacagagagctcactacctggtataatgcagagtcctgtaaggagcgagggacgcccacccctgtcctcacccctgacctgccaggaatgcccttatggaccaatgaatggaggagagatgaaggagacgtgcctatcacaggtgtggtctctattaacctcacatgcacgatgcaacttgctgatgtcattcaaccagttatttcaccaacagttcctgaatgtctactaggtctgtatgggggatcccagaagcacagagaagtagctaacccatgggtaggagctaaagaaatgcttcctagaagagggaacattaagctgagtcagaaagggactttccaggacctgtccaaacaagtggaaatgtcttatggcactgtccgggattctgctgtatatgagtacttccgagccaagggcaccaaccccctggagcaggacagcacgtttgctgaactctggcggaccatcagcaagaacggaggggctgacaactgcgtgtccagtccttcagaaggcatcaggaagtcaatttcccacaatgactcgaattcagcattatcctcttatacagctgaggatcgggtggctctgactcatgactccttgggttacaagctggggaactggcatttatccaacacagtgaggcccactgggaagatggtcgtgcacaggatgacttgtacaggatcccatgctcaggatgatttttcattgccatttagccacattgaacagcagaagatgtctaggctctggagcttgacatatttaggtgtgaattccagtttcagagcagaccagtctggagatggctgtgccctaagtgaggatgacgacttgaatccagaaactacagaacaaatccagcaagtagggtattatgggcctagtattcagggaggaacagcctctccaaatcccaaacagagtctgctgccatgcagtgtaggcagcctggcaaaggtcaggtggggatccagggaagatgctggagaccatgttacagctccaatccaaagggactctgaagacactgcgctgagcatgtctggggagggcaggccatatactgtggtccttgcaaaagaccctccatcgggcagcttgctgtttaatatgggaagtgagagagatgcggaaatgccagcagaacaacctggagtgatgtgtcagaaactctacaaggctatagaagaagcaatcaataggactttgtatttctccatgatcacagaaccatcttcaccacgggcgaagattgagctagtgcctttgaaggtggttgttttgctttgccccactgggtgcattgtggctgtagccttgggctcagacagacatttgaaaggaaggagacgatggaccgaaagatggcgaaaactcacatacaccggacagaacaactccgccgttcgccggacacagcagaccagctgtgcgcacgcgagaagcgcttccacctcccaggctgcgcctacgctgcagccctgcgacactcacgcacatcccctgcgcccgcacgccccgctcctccggcataacgcgctccttcagccccgggagatatctgtaaaagcatatggaaaatacgagggatgtgtacaatggtatactattcagccttaa

SEQ ID NO: 12977 - DNA, 2727 bp, Homo sapiens
  SIMILAR (1)..(1059): 981254mologous to Homo sapiens beta-arrestin 1,accession number L04685,Smith-Waterman Score=1817.
  misc_feature (1)...(2727): n = a,t,c or g
atggatacattcctcgacacatacactctcccaagactaaaccaggaagaagctgaatctctgaatagaccaataacaggagctgaaattgtggcaataatcaatagtttaccaaccaaaaagagtccaggaccagatggattcacagccgaattctaccagaggtacaaagaggaactggtaccattccttctgaaactattccaatcaatagaaaaagagggaatcctccctaactcatttgatgaggccagcatcattctgataccaaagccgggcagagacacaaccaaaaaagagaattttagaccaatatccttgatgaacattgatgcaaaaatcctcaataaaatactggcaaaccaaatccagcagcacatcaaaaagcttatccaccatgatcaagtgggcttcatccctgggatgcaaggctggttcaatatccgcaaatcaataaatgtaatccagcatataaacagagccaaagacaaaaaccacatgattatctcaatagatgcagaaaaagcctttgacanaattcaacaacccttcatgctaaaaactctcaataaattaggtactgatgggacgtatttcaaaataataagagctatctatgacaaacccacagccaatatcatactgaatgggcaaaaactggaagcattccctttgaaaactggcacaagacagggatgccctctctcaccactcctattcaacatagtgttggaagttctggccagggcaatcaggcaggagaaggaaataaaaggtattcaattaggaaaagaggaagtcaaattgtccctgtttgcagacgacatgattgtttatctagaaaaccccattgtctcagcccaaaatctccttaagctgataagcaacttcagcaaagtctcaggatacaaaatcaatgtacaaaaatcacaagcattcttatacaccaacaacagacaaacagagagccaaatcatgagtgaactcccattcacaattgcttcaaagagaataaaatatctaggaatccaacttacaagggatgtgaaggacctcttcaaggagaaccacaaaccactgctcaaggaaataaaagaggatacaaacaaatggaagaacattccatgctcatgggtaggaagaatcaatatcgtgaaaatggccatactgcccaagctgagagaagaaaagttacaagaggaaaaaccctctgaagatcaaatccacaagctgttaccagaggatacagaaacagggaaaaggaaaatggatgaacagaaaaaaagagatgaaccattagtactgaaaacaaatctggaacgttgtcctgcacgtctctcagattcagagaatgaagaaccttctcgaggccagatgacacagacacatcgctcggcatttgtttccaagaacaactcctactccttagctttcctggcagggaagctaaactccaaggtggaaaggagtcagagctgtagtgacacagcccaggaaagagcgaagagcagagtcagagcagttccaggcaacaaagccaaggtcacaactatgactccagcctccaaccccatcattggtgtcctcttgtcaactcaaaacaaccgctgcgtctcggcccctgacttaaccatcgaaaagcgtctacccttcagctccctttcatccttggcttccctgcataagccagagcgttctgtcagccctgagagcaatgacagcatctccgaagaactaaaccatttcaagcccattgtctgctcaccatgtactcctcccaagagactccctgatggccgtgtgctaagtcctctcatcatcaaatcaactccacgcaacctaaacagaagcctgcagaagcagacttcttatgaggccagtccacggatcctcaaaaagtgggaacagatctttcaggagcggcagatcaaaaagaccctttcaaaagccactcttacctctctggctcctgaaatgggggaagagttactaggctctgaaggtatccattctagcaaggagaagccacttgtggctgtaaatacaagattatctggtgggcaggtcctctctgagtatactggacccacctctgctgatcttgatcatttcccctctgttagccaaacaaaagcagaacaggacagtgataataaaagtagcactgagatcccactggaaacctgctgttcctcagaactcaaaggaggaggcagtgggacttctttggagagggagcagtttgaggggttagggtcaactccagatgccaagttagacaaaacctgtataagcagagccatgaaaatcaccacagttaattcagtgctaccccaaaacagtgttttgggtggagtcctcaaaacaaagcaacaattgaagacattaaatcattttgatctgactaatggtgttctagttgagagcctaagtgaagagccacttccttctttgcgtcgaggccggaaaagacactgcaagaccaagcacttagaacaaaatggctcccttaaaaaactgcgacaaaccagtggggaggtgggtctggccccaacagacccagtcctgcgagagatggagcagaagcttcagcaagaggaagaagaccgacagttggctctgcagttgcagcgcatgttcgacaatgagaggcggactgtgagccggcgaaaaggaagtgtggatcagtatctcctacggtccagcaacatggccggggccaagtag

SEQ ID NO: 12978 - DNA, 533 bp, Homo sapiens
  SIMILAR (219)..(40): 951254mologous to Homo sapiens Similar to ribosomal protein S2,accession number BC001795,Smith-Waterman Score=297.
acgcttaattcactttatttttcttgtataaaaaccctatgttgtagccacagctggagcctgagtccgctgcacggagactctggtgtgggtcttgacgaggtggtcagtgaactcctgatagggagacttggtgaatacagtctccttccagaggtcgggggtcaggtagctgtaggtcttagaaatggcatcaaaggtggccttgcgaagttgcccagggtggcagtgcagccccgggctgaggtgtagcagtcatcgataccagccatcatgagcagcttcttaggcacaggtgcggagacgatgccagtgcccctgggtgcagggatgaggcgtaccagcacagagccgcagcgggtctgcttctgcactggcataatcttcaaaacctcatccttgagagaggcccccaggaagaaatcaatgatctctgattccttaatgggcagggagaagagatagatctcctccagggacttgatcttcatgtccttgaccaagcggcccaacttggtgacgggcatcactcc

SEQ ID NO: 12979 - DNA, 822 bp, Homo sapiens; identical to SEQ ID NO: 11336
  SIMILAR (1)..(819): 831254mologous to Rattus norvegicus ribosomal protein S2,accession number U92697,Smith-Waterman Score=1126.

SEQ ID NO: 12980 - DNA, 896 bp, Homo sapiens
  SIMILAR (250)..(582): 801254mologous to Rattus norvegicus ribosomal protein S2,accession number U92697,Smith-Waterman Score=433.
  misc_feature (1)...(896): n = a,t,c or g
atggctagaaggaaaaacgggaaatgggaatctgagatcattgacttttgcctggggggctctctcaaggatgaggttttgaagattatgccagtgcagaaacagacccgcgccggccagtgcaccaggttcaaggcgtttgttgctatcggggactacaatggccacatcggtctgggtattaagtgctccaaggagcggccactgccatccgcagggccatcatactggccaagctctccattgtccccgtgtgcagaggctactgggggaacaagatcagcaaaccccacattgtcccttgcaaggggcactggcattgtctcagcacctgtgtccaagaagctgctcatgatggctagtatcaatgactgctacacctcagccaggggctgcactgccatcctgggcaacttcgacaaggccacctttgatgccatctctaagacctacagctacctgactcccaacctctggaaggagactgtattcaccaagtctccctatcaggagttcactgaccaccttgtcaagacctacaccagagtctccatgcagagcacccaggctccagccttggcgaagttgcccagggtggcagtgcagccccgggctgaggtgtagcagtcatcgataccagccatcatgagcagcttcttaggcacaggtgcggagacgatgccatttctaagacctacagctacctgacccccgacctctggaaggagactgtattcaccaagtctccctatcaggagttcactgaccacctcgtcaagacccacaccagagtctccgtgcagcggactcaggctccagctgtggctacaacatagggtttttatacnnnnnnnnnnnnnnggggcggccgtttaaaagaaacccttggggggccc

SEQ ID NO: 12981 - DNA, 1288 bp, Homo sapiens
  SIMILAR (412)..(948): 501254mologous to Homo sapiens Similar to ribosomal protein S2,accession number BC001795,Smith-Waterman Score=304.
  misc_feature (1)...(1288): n = a,t,c or g
aaatggcgaataaccccggtgccaacgggcaggcccggggccctggtggcccggggatgggaaaaccccgttgctttccggcgaggttttcggcattgtcatccgggccgggagtcccggccctggaacggggccgggccgaagngcgcgaagctgccggagcaaaggccgaggattaggagttggatgcccgtccaccaagttgggccgcttggtcaaggacatgaagatcaagtccctggaggagatctatctcttctccctggccataaagaaatcagagatcatgagttttcttctggggggcctcctctcaagggatgaggtttttgaatgattatgcccagtgcaagagcaagacccgtgccggccagccgcaaccaggttcaaggcgtttgttgccttgactacattggggactacaaatggcccacgtcggtctgggttgttaagttcctccaagggaggtggccaccggcaattcgtgggggccattcatccttggccaggctctccattcgtccccggtgcgcagaggcctactggggggaaccaagaattcggccaagcccccaacacttgtcccttggcaaaggtgaccaagggccgcttgcgggctctgtgctgggtacgccttcatccccttgcaacccaggggccaattggcatcggtctccgcaacctgtgccttaagaagctgctcatgatggctggtaccgatggcctgcaacaactctcagcgccggggctgcactgccaccgtggggcaaccttgccaaagccaccacctttgatgccatttctaagacctacagctacctgacccccgacctctggaaggagactgtattcaccaagtctccctatcaggagttcactgaccacctcgtcaagacccacaccagagtctccgtgcagcggactcaagctccagctggggctacaacataagggttttattccagaaaaaaataaggtgaattaagcgtgaaaaaaaaagacaactaaaaaggggccgccgtttttaagggatccctgaggggccccaagtttacccgggcttgcaaggcaaaacctttttccttaaagggggccgtattaaaacctacctgggaatttttggaaaggaccctaattttgggggggggaaaaattgggccaaattactttcggagattaaaagttttagggtaatattaaaattttaaagcgaataaggggtaaaactacttcgtaaacgtttgttgtttaaaaactttgctaacggatgtggattaaagaaaaattg

SEQ ID NO: 12982 - DNA, 478 bp, Homo sapiens
  SIMILAR (1102)..(3372): 821254mologous to multiple sclerosis associated retrovirus polyprotein,accession number AF009668,Smith-Waterman Score=3109.
  misc_feature (1)...(478): n = a,t,c or g
gggggggaaaccggtgtaattattagccatggtcaaaccccaccgtgttntttngacattgccgtcgacgggcgagcccttgggccgcgtntcctttgagctgtttgcagacaaggtcccaaagacagcaggttggatggcaagcatgtggtgtttggcaaagtgaaagaaggcatgaatattgtggaggccatggagcgctttgggtccaggaatggcaagaccagcaagaagatcaccattgctgactgtggacaactcgaataagtttgacttgtgttttatcttaaccaccagatcattccttctgtagctcaggagagcacccctccaccccatttgctcgcagtatcctagaatctttgtgctctcgctgcagttccctttgggttccatgttttccttgttccctcccatgcctagctggattgcagagttaagtttatgattatgaaataaaaactaaataacaaaaaaa

SEQ ID NO: 12983 - DNA, 857 bp, Homo sapiens
  SIMILAR (153)..(584): 521254mologous to Homo sapiens peptidylprolyl isomerase,accession number X52851,Smith-Waterman Score=280.
aaaccgtgtactattagccatggtcaaccccaccgtgttcttcgacattgccgtcgacggcgagcccttgggccgcgtctcctttgaggtaaggggcctggataccaagaagtgactgctcatctaatccataaagctatgttaacagattggagctgtttgcagacaaggtcccaaagacagcagaaaattttcgtgcctctgaagcattgaagagaaaggatttgggttataaggggttccctgctttcacagattatttcccagggttttatgtgtcaggggtggtgactttcacaccgccataaatggcacctggtggcaagtccattctatggggagaaaatttgaagatgagaacttcatccctaaagcatacgggtcctggcatcttgtcccatggcaaaatgctggacccaaacacaaatggttcccagtttttcatctgcactgccaagactgcagtggttggatggcaagcatgtgtgtgtttggcaaagtgaaagaaggcatgaatattgtggaggccatggaggctctttgggtccagggattgcaagaccagcaagaagatcaccattgcttgactttggacaacttcgaattaagtttgactttgtgtttttatctttaaccaccaagatcatttccttctgtgctctcctctcaggagagcaccccctccaccccatttggctcggagtaatcctagaatctatgtggctctcgcttgcagttcccttttgggttccatgttttccttgttccctcccatgcctagctggattgcagagttaagtttatgattattgaaataaaaactaaataacaattgtcaaaaaaaaaaaaaaaagcgg

SEQ ID NO: 12984 - DNA, 723 bp, Homo sapiens
  SIMILAR (648)..(866): 841254mologous to multiple sclerosis associated retrovirus polyprotein,accession number AF009668,Smith-Waterman Score=308.
atgagctgggaggtggtgtgcgcccttctcctgcctccagctcctctctggacccctgtcctggcacctcttcggtccctggttcggtctgcccctttcccaccgcggcccgtcttaggccaggatgtgctccctgccctgcggactctggagcagggcccggccactccccggagcctgtatgacgggaaccgccccgcgccctctcccctacgcggggcaggccagccctggggcgccttaaaaaccggagctggcgcttggcatcgccactctgggcaggatccaacgtcgctccagctgctcttgacgactccacagataccccgaagccatggcaagcaagggcttgcaggacctgaagcaacaggtggaggggaccgcccaggaagccggtttaccatggaaccatctctgcaatgcagccccttccacattgccccagccccatggagctggtgctccggtggcgctgtgcaattgcctgttcctgtgtgcctctgctcccccgacactaggagccctggagggcagggccagggtgcatctgagaaagacatcgtgcactctggcttggcatacacaatggagcgttctgccaggcaaattatgcgcacagccatgaagtataacctgggattggacctgagaacagctgcctatgttaatgccattgagaaagtcttcaaagtgtacaatgaagctggtgtgaccttcacatag

SEQ ID NO: 12985 - DNA, 3100 bp, Homo sapiens
  SIMILAR (251)..(108): 461254mologous to Homo sapiens Human secreted protein, SEQ ID NO: 8145,accession number G04064,Smith-Waterman Score=82.
gggcaacccgcgcgggacccttcctccctagtcgcggggagtctgagaaagcgcgcctgtttcgcgaccatcacgcacctcccctccgcttgtggccatgtaccgctacctgggcgaagcgctgttgctgtcccgggccgggcccgctgccctgggctcggcgtccgccgactcggccgcgttgctgggctgggcccggggacagcccgccgccgccccgcagccggggctggcattggccgcccggcgccactacagcgaggcggtggccgaccgcgaggacgaccccaacttcttcaagatggtggagggcttcttcgatcgcggcgccagcatcgtggaggacaagctggtggaggacctgaggacccgggagagcgaggagcagaagcggaaccgggtgcgcggcatcctgcggatcatcaagccctgcaaccatgtgctgagtctctccttccccatccggcgcgacgacggctcctgggaggtcatcgaaggctaccgggcccagcacagccagcaccgcacgccctgcaagggaggtatccgttacagcactgatgtgagtgtagatgaagtaaaagctttggcttctctgatgacatacaagtgtgcagtggttgatgtgccgtttgggggtgctaaagctggtgttaagatcaatcccaagaactatactgataatgaattggaaaagatcacaaggaggttcaccatggagctagcaaaaaagggctttattggtcctggcattgatgtgcctgctccagacatgagcacaggtgagcgggagatgtcctggatcgctgatacctatgccagcaccatagggcactatgatattaatgcacacgcctgtgttactggtaaacccatcagccaagggggaatccatggacgcatctctgctactggccgtggtgtcttccatgggattgaaaatttcatcaatgaagcttcttacatgagcattttaggaatgacaccagggtttggagataaaacatttgttgttcagggatttggtaatgtgggcctacactctatgagatatttacatcgttttggtgctaaatgtattgctgttggtgagtctgatgggagtatatggaatccagatggtattgacccaaaggaactggaagacttcaaattgcaacatgggtccattctgggcttccccaaggcaaagccctatgaaggaagcatcttggaggccgactgtgacatactgatcccagctgccagtgagaagcagttgaccaaatccaacgcacccagagtcaaagccaagatcattgctgaaggtgccaatgggccaacaactccagaagctgacaagatcttcctggagagaaacattatggttattccagatctctacttgaatgctggaggagtgacagtatcttactttgagtggctgaagaatctaaatcatgtcagctatggccgtttgacggttcaaatatgagagggattctaactaccacttgctcatgtctgttcaagagagtttagaaagaaaatttggaaagcatggtggaactattcccattgtacccacggcagagttccaagacaggatatcgggtgcatctgagaaagacatcgtgcactctggcttgggcattacacaatgggagcgttctgcccaggcaaattatgcggcacagcccatggaagttattaacctgggggattgggaccttgaggaacagctggcctattgtttaatggccctttggaggaaagtctttccaaagtgttacaatgtaagctggtgtgaccttcacatagatggatcatgggctgacttcctcactattcctcttcacatgtaaacttctggcagacctattcacaagtttacatgttaaccacaggaaatccctttcttctcctggactcattactaatgggatacctttcttcaacaagtcaatccaagtcagcccgttaagggaggaaaggaaatttaaggttaggcgggtccatgttacaagctgagtgtggaagttgggaattcacctacaccaggggagccttttgggtatttttgcctttaaataaaaagcctcctttatctggctgtgcagccttgctctgtggcttttcccaacacaatcagtgctagtgctggggaggaacagtcaagagcagtcagttgcttgcttattttttctggatgagtctgggacacactgtaactttaacacatttaagaagtaggtgtgtggccttttcagaaggtggcatggtcctcaagtgagttcttagtattttatatcagcaaaataattcaattttgcaggttgcaaacaaatataaaacctgtttctgtttatgaatattattcttttagaatagaataagtacatgctgctgtaataaaattgcctttaatcacttaacaagcctaaccttgactcaaacagtgaatgcctatagaaataataaatgaaaaaaactagtatttttatatcataaaacaatgtcatttatagcttatcattcatgtattgtccagcagacattaaaagccctgtggataattaagttatcttcatacctgcaaaatggtggaggctattttcattaaaactgtcagaatttgcttaccataattatgatacagtccaaagaatgcagtcactttttatcatgttaactaattgttctcttttgaagatctatggttgactaattaaacaataattcaagtagagtgtcccagaaaaaaaccacttgggctccctgtttggagtctggctggctctgagcattgccaatggcccctactcacctgactttgtatcctctccttttagaggctttgcattctgcacccagcttcactaacagtgggctgaaaacatccttgggttgagtgtttcatttgggagttatttggccagggccttttgaacagtagtgtccccatgaagtgctagataatatatgtgtaagagtcagcttttttttttttttttaactctaacacccttcagaaatttctaactgactttgtaactgcatggcttaacctggtgataaaagcagttattaaaagtctacgttttccaaaaaaaaaaaaaaa

SEQ ID NO: 12986 - DNA, 990 bp, Homo sapiens
  SIMILAR (1)..(438): 971254mologous to Escherichia coli alpha-glucan phosphorylase,accession number U18997,Smith-Waterman Score=751.
atggaaactggcaaacactacaaacctgagctttcctgttctctccactggagacctgtggttaaacatttacccacagatgacggggtcaacaagcagaagtggctgcaagtggcccttcaaggagtgaagctgcagaccttcgcagtgagtgctacagctcttaaggcagctcgtctggagttgttcgttcctcccgatgggctcgaggtcttgctggcttcaggaatgaagctgcagaccttcgtggtgagtgttacagctcataaaggcagtgtggacccaaagactagacataaaggttctccacgtccccaccagactcaggagcccagctggcttcacccagtggatgctgcactggggctgcaggtggagctgcctgccagtcctgcgccagtcccgtgccgtgtgcctgcaatcctcagcccttgggtggtcaatgggactgggcaccatggagcagggggcggagctcgtcggggaggctcaggcggcacaggagcccacggagtgggggaggatcaggcttggcgggctgcaggtcccgagccctgccccgcgggaaggcagctaaggcccggcgagaaattaagcacagcagctgctggcccaggtgctaagcccctcattgcccggggctggtgggggcccgccggccgctccgagtgcggggtccgccgagcccacgcccacccggaactcgcgctggcccgcaagcaccacgcgcagcccggttcccgcctgcacctctccctccacacctcctcccaagctgagggagccggctccgaccttggccagctcaggaaggggctcccacagtgcagcggcgggctgaagggctcctcaagtgccgtcaaagtgggagcccaggcagaggaggcgccgagagcgagcaagggctgtgaggactgccagcacgctgtcacctctcagtgggagagtggaatgcttgatatggagcctatagaggaatcgctgttgtag

SEQ ID NO: 12987 - DNA, 342 bp, Homo sapiens
  SIMILAR (181)..(339): 621254mologous to Homo sapiens Secreted protein of clone DA306_4,accession number W69344,Smith-Waterman Score=171.
ctggccaaatttcgcagtctcctgtgcacagcggagggtgaagcagcagcttttctgcaacctgagggagccggctccggccttggccagcccagaaaggggcccccacagtgcagcggcgggctgaagggctcctcaagtgccgccaaagtgggagcccaggcagaggaggcgctgagagcgagcaagggctgcgaggactgccagcacgctgtcacctctcattatcagtctttccactacggaggaaaaatacaacaatcctttacttaccatacttatatagaaaaatcctgttatggaaccttgatcgaggaatgtgttgaatcggggaaaagttaa

SEQ ID NO: 12988 - DNA, 444 bp, Homo sapiens
atggcggaaggtgaaggggaagcaagtgtactagtgttgaacagctgtggaataacctgtgcaggagatgaaaaagaaattgctgctttctgcgctcatgtgtcggaactagatctttctgacaacaaactcgaagactggcatgagtgcagcggtgggctgaagggctcctcaagtgccgccaaagtgggagcccaggcagaggaggcgccaagagcgagcgagggctgtgaggactgccagcacgctgtcaccactgccagcacgctgtcacctctcagcatggccacagtcaaaagtagcctcagtggtgaggaccatgagaagagcggagtaaaatgtacaaggtggatgctgcatggatactctgttgacagacttacttctgagctcaggtacctttggggacacccagaaacgcttaagaggctagttgccctgtga

SEQ ID NO: 12989 - DNA, 2784 bp, Homo sapiens
  SIMILAR (1)..(513): 981254mologous to Escherichia coli BaeR,accession number D14054,Smith-Waterman Score=873.
atggtgcccctcacaagccgcagcggctggtgcccgggctaccagggacatgccagagggctcgatgacttgtctctgcagggcgctttggtggttgttcagctggctaaaggttcaccggtgaaggcagggccagcagggccggccggctgctccgagtgcggggcccgccaagcccacgcccacccggaactccagctggctcttgctcgcagccccggttcccactcgcacctctccctccacacctccctgcaagctgagggagccggctccggccttggccagcccagaaaggggctcccacagtgcagcggtgggctgaagggctccacaagtgccgccaaagtgggagcgcaggcagaggaggcgcagagagcagcgagggctgtgaggactgccagcacgctgtcatctctcagcaacactcttgcattgtgtagacagtgcagtttcctgtgcatgaagctggggaaggcagccgtgtctgaaccagtccgtccatttccaacgacttcaggaccaggcagtgtggcctcttctgcagccagagtgggaaatggaggcaggaatcagcaaatggaactgctattgttagaatgtcccttgcaaaactcatgtggaaatttaattgccattgtgatggtattaaaaaggcatctatttccgggctgtaagcagctgacacctgcccagtggaagctggcatccctccccttgtgggttcagagctgcaagaagcaccaggctcggccacttcagaagccccagcctcgacctagcccaccctctcagggccacagtgcagaagcctgcacacctgccaagtctctccgactccttgcagctgctgtcagcatggcccaggctcctgctgacccgggcagagaaggccaccttgaacaaagaatcctgcaggtgctgacagaggctggctccccggtgaaacttgcccagctggtgaaggaatgccaagcacccaagagggagctcaaccaagtcctctaccgaatgaaaaaggagttgaaagtctccctcacatcccctgccacctggtgcttgggcgggactgatcctgaaggcgagggtcctgcagagctggccttgtccagccctgccgagaggccccagcaacatgcagctacaattccagagacccctggccctcagttcagccaacaacgggaggaagacatctacaggtttctcaaagacaatggtccccagagggccctggtcatcgcccaagcactgggaatgaggacagcaaaagatgtgaaccgagacttgtacaggatgaagagcaggcaccttctggacatggatgagcagtccaaagcatggacgatttaccgcccagctctggcctcccacttggccctactgactcggaacgcccagggtattttaacaagctccccaggagaatttggtgctgccgactggtattgggaacccctgacccatagacagtggcaaagggatacagttgaatattattttgcagaagattctggaagaagagcaaagtcagcctcaattatttaccagcacaatccaatcaacatgatctgccagaatggacccaacagctggatttccattgcaaactccgaagccatccagattggacacgggaacatcattacaagacagacagtctccagggaggacggtgattcctcaacttgggggaccctagttgatccctgggggccccaggacatccacatggagcagtccatactgagacgggtgcagctgggacacagcaatgagatgaggctccacggcgtcccgtccgagggccctgcccacatcccccctggcagccccccagtctctgccactgctgccggcccagaagcttcgtttgaagcaagaattcccagtccaggaactcaccctgagggggaagccgcccagagaatccacatgaaatcgtgctttctcgaggacgccaccatcggcaacagcaacaaaatgtctatcagcccaggggtggctggcccaggaggagtcgcagggtctggagagggggagccaggggaggacgcaggtcgtcgtcccgcagacacacaatccagaagtcactttcctcgagacattggtcagcccatcactcccagccactcgaagctcacccccaagctggaaactatgactcttggaaacaggagtcacaaagctgcagaaggcagccactatgtggatgaagcctcacacgaggggagctggtggggaggtctcgactgcaggggcggcctggaggggaggagcgcggagccggcctttcacagccttggcccgagcgccctctgctggccgcacgccgccggccgccgctcaccaggctgggctcggaaacttccagggcctgagtctagctccttgtttgagtctgacaatgtgctcagacccctggaccaggggctggtccccgaggtcccatccagggtcagagtttctgattctgagaccccctacacccaccccatctctgcagaccctcaaatcccaagtcaggccgttcgtctgcggagcacaggtgatgctctgcgcatgcccgtctgcccagagcccactgtgattcctggaccagggccatggcagccaggatgcatctcggattccctgggggccacagttgggtccggaaagatcaaggtgcccggtcaccagaacacccccattggaatgtttgtgccatcctcgtgctcaacccaggccgtcctgtggcctgaaaactccatccaggccaagtcccgaatccacggagaatga

SEQ ID NO: 12990 - DNA, 1066 bp, Homo sapiens
  SIMILAR (319)..(837): 951254mologous to Escherichia coli alternate gene name srlQ,accession number U29579,Smith-Waterman Score=835.
tcagcccttgggtcgtcgatgggactgggcgccgtagagcagggggcggtgcttgtcggggaggctccggcagcacagcagcccacagagagggggaggctcaggcatggcgggctgcaggtcccgagccatgccccgcagggaggcagctaaggccggtgagaaatcgagcccagtgccggtgggcggcactgctctgagtacagggcctccacagccgctggccctggtgctaagcccctcattgcatggggccggcagggcctgccggctgctccgagtgcgggcccgccaagcccacgcacacctggagctccagctggcccggaagtgcccgcacagcccctgttcccgctcatgcctctccctccacacctccttgcaagctgagggagccagctccggccttggccagcccagaaaggggctcccacagtgcagcggtgggctgaagggctcctcaagtgccgccaaagtgggagcccaggcagaggaggcgccgagagcgagcgagggctgtgaggactgccagcacgctgtcacctctcaagctgacatcggcagctgtgaggacccacctgttagtctgcacttgaaacagagctataattgtccagtgaatgcagaggaagaagctccagtgtgctgctctgctcgttacaacttagcaattttggccttttttggtttcttcattgtgtatgcattacgtgtgaatctgagtgttgcgttagtggatatggtagattcaaatacaactttagaagataatagaacttccaaggcgtgtccagagcattctgctcccataaaagttcatcataatcaaacgggtaagaagtaccaatgggatgcagaaactcaaggatggattctcggttcctttttttatggctacatcatcacacagattcctggaggatatgttgccagcaaaataggggggaaaatgctgctaggatttgggatccttggcactgctgtcctcaccctgttcactcccattgctgcagatttaggagttggaccactcattgtactcagagcactagaaggactaggagag

SEQ ID NO: 12991 - DNA, 580 bp, Homo sapiens
  SIMILAR (341)..(487): 421254mologous to Bombyx mori silk fibroin (AA 37 - 252),accession number X13869,Smith-Waterman Score=74.
atgatctcctttgacctcatgtctcacatccaggtcacagtgatgccaaaggtctttgggcctgtgatgagaggggctgccatgaaggattttgcagaaaagaagtccacagcaaaggccctggaagatgtaaaggcaaacttttactgtgaattatgtgacaagcagtatcacaaacaccaggagtttgacaatcatattaattcttatgaccatgctcataagcagactcaggagcccagctggcttcacccagtggatcccacaccggggttgcatgtggagctgcctgccagtcctgggccatgcgctcacactccttagcccttgggcggtcgatgggactgggcgctatggagcagggggtggcactcgttggggaggctccggcggcacaggggcgcacggagcagctgagggacccagctccggccttggccagcccaggaaggggctctcactgtgcagcggcgggctgaagggctcctcaagtgccgccaaagtggaagcccaggcagaggaggcgctgagagtgagcgagggctgtgaggactgccagcacgctgtcacctctcaatag

SEQ ID NO: 12992 - DNA, 2395 bp, Homo sapiens
  SIMILAR (2481)..(1864): 971254mologous to Escherichia coli peptidase N,accession number M15273,Smith-Waterman Score=1066.
tgggctggtggtctcgctggcttcaggagtgaagccgcagaccttcgcggtgagtgttacagttcttaaggcggcgcgtctggagttgttcattcctccccgtgggctcgtggtctctctggcttcaggagtgaagctgcagaccttcgcggtgagtgttacagctcataaaagcagcgtggacccaaagaactcaggagcccagctggcttcacctagtggatcccgcaccagggcagcaggtggagctgcctgccagtgccacgctgtgcgctcgcactcctcagcccttgggtggtcgatgggactgggtgccgtggagcagggggtggtgctcgtcggggaggctcgggccgcacaggagcccatggagtgggtgggaggctcaggcatggcgggctgcatgtcccgagccctgccccatggaaaggcagctaaggcctggcgagaaatcgagcacagcgccggtgggccggcactgctgggggacctagtacaccctctgcagccgctggcccgggtgccaagtccctcactgccttgtgcgagcagggctggccggctgctccgagtgcaggcccgccaaacccacgcccacccggaactccagctggcccccaagcgctgcacgcagccccggttcccgctcgcgcctctccctccacacatccctgcaagctgagggagccggctgtggccttggccagcacagaaaggggctcccacagtgcagcggtgggctgaagggctcctcaagtgccgccaaagtgggagcccaggcagaggaggcactgagagcgagcgagggctgtgaggactgccagcacgctgtcacctctcaactcagtctcccacatggcgtggccacccttgtgtctgttaaactctttctctacaaaaatgccatggtctttctttgtgcagtggtcaggaaaaaccccttgggcagatacaaaagttctttcaggcatctgtttccagaatagcgaggtttcctccatattgaagatttgctgtggcaagtaaatctcctccataatcaagcttccaaaactcttcagctgccttcacatcagcacccacagactcagcattcatgttaacattatgtaatgcataacgatcctcaaatcatgtaaaccacccggaactggcagtaaatctgataccaaagtcaggtccagcctttcctttcaacatcaaaaacatactttttgctctggccatgaccgccgtggtgctgaaaccgcctctgcaaaaattataacagaaaattatgaccgtgaaaggacaactaacctaaccgactccatcttgcttctaatctccaagctgtccttgttcatccccgggcgtaggctcaacctactttgggaggaacttagtttacagtgtgaaaggaaaataaatcttggggccccaaaatcactaagccaaagcagaaagtcaagctgggaactgcttagggcaaacctgcctcccattctattcctaaaaaagatagctactacgattaaaaagctacatacctccctcacaaggaaattccttgtggacaaatgacagaactcaaagccacctctgctcactgagatagatgcgtctctgcctgcctcctttggaaaggccaatcagaaactcaaaagaatgcaaccgtttgcctcttatctacctatgacccagaagtccctccctgcttcgagttgtcccacctttctggatggaaccaatgtataccttacatatactgattgatgtcccatgtctccctaaaatgtataaaaccaagctgtgcccgaccaccttgggcacatgtcgtcaggacttcctgaggctgtgtcacgggcacacatccttaactttggcaaaataaacttcctaaatcgactgagacctgtctcagatatttggggttcacaatggtttaactttgaaacaaagacaataacaactcttttccaaaacaaagtccctgcctgcctgaggatcagactgcctttgtaggactaacaaatttgccatgagattagaaattatggtgtaggagtaatgcagctggaggtggcgggattctgaacctccttaaattgctcctgtgataacctaagatgagtgcttaacatcttttacagaccctgtattcagtggatcagctggcaccacccaaatagataaattggcccatctggtcttgtggcccccacccaggaatggactcagctcaagaggacagcttcagctccctaagattttatcttggacccgaacaatcagcactcccgacttactggccctctactcaccaagttatccttaaaaacctcaatccctgagttttcagagagactgatttgaataataataaaactccggtcttccacacggccgactctgc

SEQ ID NO: 12993 - DNA, 326 bp, Homo sapiens
  misc_feature (1)...(326): n = a,t,c or g
ggcacgaggtacttcccccaccttaatgacatctcaggttgcttcagagcctggagaggcaaagaagatggaagacaaggaaaaggataataagcttatctcagctaactcctcggagaagtatatctttcagaggccttcagtcttgattcacatgaagcactgagggccctaacagagcaagatgtaaaacttgnnnnnnnnnnnnnnnnnnnnnnnnnnnnnnnnnnnnnnnnnnnnnnnnnnnnnnnnnnnnnnnnnncccagatgcattataaatcatattttctctcaggcagaattatggacatgtcacatgtaaagaa

SEQ ID NO: 12994 - DNA, 1113 bp, Homo sapiens
  SIMILAR (3)..(686): 921254mologous to Escherichia coli No definition line found,accession number U00039,Smith-Waterman Score=1109.
atggcttcactcctgaagtcagcaagaccacaaacccactggaaggaagaaactccagagacatctaaacgtctgaaggaacaaactccggacataccatctttaagagctgtaacactcatcgcgaaggtccacagcttcattcctgaagtctgcgagaccaagaacccactggaaggaatacattctggacacattttggcgcccaatgtggggccttcaccaagcagaagacaggcaagggtgcaggttttcgagaatgtgtcagtaagggccactaaatctgatcttcctcagtcctccttgtggtctaggaggaaaactactgtttctgctgctgcgtcgaagaaaacaagcaaagaaatctccaaaggaccacaaaaacccccaggttatcggttacgtccccttcaagctgtagggggaggggaatttggcccaacccaggtacatgtccacttctccctctctgatttaaagcagatcaaggtagatctggggaagatttcagatgatcctgataggtatatagatgtcctacagggtttagggcagaccctcgatctctcttggagagatgtcatgctattgttagatcaaaccctggcctttaatgaaaagaatgcggctttagctgcagcccaagagtttggagatacctggtatcttagtgaagtaaatgacagaatgacagctgaagaaagggacaaattccctaccgaggatggggaaccaatcaagtgtgactgccaacaaattatagtccagacttatgccgctcaagatgatatcttagaagtccccttagctaatcctgaccttaacctatataccgatggaagttcatttgtggagaatgggatacgaagggcaggttatgccatagttagtgatgtaaccatacttgaaaggccaaatctcttccgggccatccaacaggtagtcaaagcctgtgaggtgtgccaaaggaagaatcctttggtccatcctcctaattacctgtacaagactctcaacttaacccactctctgttaaaccagtccaatccttccctggcaaatgactgttggctttgtagctctctatccgtcagcgcagagccatacaactaa

SEQ ID NO: 12995 - DNA, 1779 bp, Homo sapiens
  SIMILAR (175)..(399): 891254mologous to Escherichia coli topoisomerase IV subunit,accession number U28377,Smith-Waterman Score=337.
atgcaggactgggcggcggccaaagcggatcggacagtgctccgagaacgggtgcgcatagaaattgcatcaacgcatatagcgctacagcacgccatagtgactggcgatgctgtcggaatggacgatatcccgcaagaggcccggcagtaccggcataaccaagcctatgcctacagcatccagggtgacggtgccgaggatgacgatgagcgcattgttagatttcatacacggtcccaggagaaaaaggaagaagctatcaccttactgaaggattccatcaaatatggtccagagtttgcagatgcatattcaagcttagcttcgttattggctgagcaggcccctgaaggcctttgtccgttgtcgtcaggactaggtcggtctcgcccaatggcgacagagtggtcacccgggaaccggatctgcgcggctccgtggcctaaagaggtggccgagcctgcttgcgtccctaggccgccttcccgggccctccacgccttaatggcctccgccgcgcggcgttcaagcggccgccatactttccggcccaccacgcccggcgccgcccaaaggcgctgcgtcccagcgactctgcgggggtttcgtcgaggcccggcaggcttgggtcgggagacgcggcggccggcggggtcccgtcggggagacgcagccgccgccatcagtcatccagccgccctcccgcggggcagggctcgggaccagcagcccgccatgcctgagcctcccaccccctccgtgggctcctgtgcggcccgagcctcccagattagcgcggccccctgctccacggcgcccagtcccatcgaccacccaagggctgaggagtgccggcgcaccgtgtgggactggcaggcagctccacctgcagcccaggtgcgggatccattgggtgaagccagctgggctcctgagtctggtggagatgtggagaacctttatgtcttgctcagggattgtaaatacaccagtcagcaccctgtgtctagctcagggtctgtgaatgcaccaatcgacactctgtatctagctactctgctcagggattgtaaatacaccaatcggcactctgtatctagctcaaggtttgtaaacacaccaatcagcaccgtgtctagctcagagtttgcgaatgcaccaatcgacactctgcatctagctactctgaaggaagaaactccgaacacatctgaacatcagaaggaacaaactccggacatgccgcctttaagaactgtaacagtcacggcgagggtccgcggcttcattcttgacgtcagtgagaccaagaacccaccaattccagacacattttggcgacccagatgggaccttcgccaatcaccaagcaatcaaaccctggcgtttaatgaaaagaatgcggctttagctgcagcccaagagtttggagatacctggtatcttagtcaagtaaatgacagaatgacagccgaagaaagggacaaattcccgactgaatttattccttctagtgggttcttggtcttgctgacttcaagaatgaagccgcagacatttgcggcgagtgttacagctcttaaagatggcgtgtctagagtttgttccttcagatgtgtccagagtttcttccttccgagtgctgattggtgcatttacaaacctttagctcgatacagagcgctgattggtgcatttttacagagtgctcattggtgcgtttacaaacctttagctagacacagtgtgctgattggtgcatttacaaacctttag

SEQ ID NO: 12996 - DNA, 2020 bp, Homo sapiens
  SIMILAR (19)..(663): 561254mologous to Cloning vector pTM30 repressor LacI- q,accession number AF023620,Smith-Waterman Score=459.
atggcagagggcaaggcaggcggcgcggccggcctcttcgccaagcaggtgcagaagaagtttagcagggcccaggagaaggtgctgcagaaattggggaaagctgtagaaaccaaagatgaacgatttgaacaaagcgctagcaacttctaccaacaacaggcagaaggccacaagctgtacaaggacctgaagaacttccttagtgcagtcaaagtgatgcatgaaagttcaaaaagagtgtcagaaaccctgcaggagatctacagcagcgagtgggacggtcatgaggagctgaaggccatcgtatggaataatgatctcctttgggaagactacgaggagaaactggctgaccaggctgtaaggaccatggaaatctatgttgcccagttcagtgaaattaaggagagaattgccaagcggggtcggaaactcgtggactatgacagtgcccgacaccacctggaggcagtgcagaatgccaagaagaaagatgaggccaagactgccaaggcagaggaagagttcaacaaagcccagactgtgtttgaagatctgaaccaagaactactagaggagctgcctattctttataatagtcgtattggctgctatgtgaccatcttccaaaacatttccaacttgagggatgtcttctacagggaaatgagcaagctgaaccacaatctctacgaggtgatgagcaaactggagaagcaacattccaataaagtctttgtggtgaagggactgtcaagcagcagcaggcgctctttagtcatttctcccccagttcgaacagctacagtctccagtcctcttacctcacctactagtccctctacactttccttgaagagtgagagtgaatctgtctcagcaactgaagatctggcacctgatgcagcccaaggggaagacaattctgagatcaaggagctcttagaagaggaggaaatagagaaggaaggatctgaagcaagctcctctgaggaagatgagcctctaccagcctgcaatggccccgcccaggcccagccctctcctaccactgaaagggccaagtcccaggaggaagttctccccagctccacaactccatcaccaggcggagccctgagcccttcagggcagccttcatcatctgccacagaagtagtcctccgaacccgcaccgcaagtgaaggatctgaggcgaccaaaaaagacagcctctatccagaggacctcagcaccccctaggaggcctcctccacccagagccactgcaagccccaggccctgctcagggaacataccttccagccctacagcctctggaggggggtcagcgcaccagccctagggcctccttggggactgggactgcaagtcctaggacctccctagaggtctctcctaatccagaacgcaccagagaagccagtaagaactcctgaggccaaagaaaatgaaaacatccacaatcagaaccctgaagaactttgtacttcccccaccttaatgacatctcaggttgcttcagagcctggagaggcaaagaagatggaagacaaggaaaaggataataagcttatctcagctgactcctcggagggccaagaccagcttcaagtctccatggtaccagaaaacaacaacctcacagcacctgaacctcaagaagaggtatccacaagtgaaaatccacaactctgaagagaaactaccaagactcctcctgccccaaacctcgccagagaagctcttcaaccagagggtataggtcagagagatataagagccagcatccatccctgggttctcagtaggaatgctggtgctgtctaaagacctggcattaatggaggcggaggagcagccttacgggagggatggagggaggcaggctggggagaagagaacattagactcagggaatatttaattctggttttagcattattagaataagactttatacattaactaaagtggagctttaatcactataaaaagcaaaagtatctatagacat

SEQ ID NO: 12997 - DNA, 470 bp, Homo sapiens
  SIMILAR (341)..(445): 411254mologous to Pan troglodytes putative,accession number M57946,Smith-Waterman Score=74.
taacattaggtggcaaatgggtcacagacactctgctgctttgcaccctctttgcacagaacgagggctgtgcacaccctagtttaggcggcatgcagtcaaggattcctgtcagttactcagaaaaactgcaagaaaaagccacctcagagaagtatcagggtagttctaagcagtgcatcatggtgtgggcacgcatgcttttcccgtcttctaggcatacttttgttgttttcttccgtgtgatgatggctgaactagagaagacggtgaaaaaaattgagcctggcacagcagcagactcgcagcagtgcagccgcatgctggacagctcctcaagcgtggccagagtggtggccaaggccaaggaggtgccgagagtgagcgagggccgcgagggctgccagcacattgtcacctctcagaagtacaaattaaacgtcaataagataccactatacatcaattag

SEQ ID NO: 12998 - DNA, 448 bp, Homo sapiens
  SIMILAR (245)..(409): 381254mologous to Xenopus laevis upstream binding factor 1,accession number X57201,Smith-Waterman Score=109.
aaaacaccgggaagatgttctgagcttactggaaaccttccagttggacacaaggctgcttcatcaccctgtgtgggcattccccaagattcaccaggacacgagacctcaccccaacatgtgccctctgcctcaaaaagacccctggaacttttagtttgcagagtcaaagctatgctcactctcaacaattgtagagaggctttctggctgggcaatctaaaaaaaccgggacttgcagggtgaagagattaagtcccaaaattcccaggagagcacagcagatgagagtgaggatgacatgtcatcccaggcctccaagagcaaagccactgaggatggtgaagaagacgaagtaagtgctggagaaaaggagcaagatagtgatgagagttatgatgactctgattagaccccagataaattgttgcctgcttctgtgtctcaa

SEQ ID NO: 12999 - DNA, 678 bp, Homo sapiens
  SIMILAR (511)..(675): 381254mologous to Xenopus laevis upstream binding factor 1,accession number X57201,Smith-Waterman Score=109.
atgactatcactggtgatcaggaagatgcttctagaggagaagatctaggacgtcagattgtgctgggcctcaaagcttcccttgccagacaattcctctgtcgggtgtggccaagtggggataaagagaagagcaacatctctaatgaccagctccatgctctgctctgtatctacctggagcacacagagagcattctgaaggccatagaggagattgctggtgttggtgtcccagaactgatcaactctcctaaagatgcatcttcctccacattccctacactgaccaggcatacttttgttgttttcttccgtgtgatgatggctgaactagagaagacggtgaaaaaaattgagcctggcacagcagcagactcgcagcagatttcatgaagagaaactcctctactgggaacatgggctgttcgagacttcagtatcctcattcaacttggattaaaggtattttgatagttcatcctgttctggcatgtatgtttgaagggtgaagagattaagtcccaaaattcccaggagagcacagcagatgagagtgaggatgacatgtcatcccaggcctccaagagcaaagccactgaggatggtgaagaagacgaagtaagtgctggagaaaaggagcaagatagtgatgagagttatgatgactctgattag

SEQ ID NO: 13000 - DNA, 373 bp, Homo sapiens
  SIMILAR (11)..(61): 581254mologous to Xenopus laevis kuzbanian,accession number AF011380,Smith-Waterman Score=55.
  misc_feature (1)...(373): n = a,t,c or g
actggcttgaaattcttgctgccagcacagaaatcaacctgaaatcaacctgaaatgctcaagcttggtgcnnnnnnnnnnnnnnnnnnnnnnnnnnnnnnnnnnnncagttttaccctcaccgtnnnnnnnnnnnnnnnnnnnnnnnnnnnnnnnnnnnnnnnnnnnnnnnnnngcaaggccactgtnnnnnnnnnnnnnnnnnnnnnnnnnnnnnnnnnnnnnnnnnntctctgaaaaacaggcagcagccccagtcaggggcttgtagataaaacccccatctaactgggacagagcacccagggaaaggggcggctgtgggtgcagcttcagcagaattaaacgctcatgcctgacggctgtgaagacn

SEQ ID NO: 13001 - DNA, 716 bp, Homo sapiens
  SIMILAR (16)..(237): 381254mologous to Homo sapiens Human secreted protein sequence SEQ ID NO:103,accession number Y87064,Smith-Waterman Score =83.
  misc_feature (1)...(716): n = a,t,c or g
attggggaagggaagctaccgctttgtttgtaagtttccttaaaccacagggccttttcaacagtctgcggaatttctggagagtccactccaaacccttttgcctagatttctccacggaagcctccaaacaaccaaagattccggccttgttcctcctttggaattcctcatccaaaggacgcacccccccaaatgccagccagagttctcctgtatagggtgtctgttgtccctnnnnnnnnnnnnnnnnnnnnnnnnnnnnnnnnnnnnnnnnnnnnnnnnnnnnnnnnnnnnnnnnnnnnnnnnnnnnnnnnnnnnnnnnnnnnnnnnnnnnnnnnnnnnnnnnnnnnnnnnnnnnnnnnnnnnnnnnnnnnnnnntgaagctgcacccacagccgcccctttccctgggtgctctgtcccagttagatgggggttttatctacaagcccctgactggggctgctgcctgtttttcagagannnnnnnnnnnnnnnnnnnnnnnnnnnnnnnnnnnnnnnnnnacagtggccttgcnnnnnnnnnnnnnnnnnnnnnnnnnnnnnnnnnnnnnnnnnnnnnnnnnnacggtgagggtaaaactgnnnnnnnnnnnnnnnnnnnnnnnnnnnnnnnnnnnngcaccaagcttgagcatttcaggttgatatcaggatgatttctgtgctggcagcaataatttcaatccagt

SEQ ID NO: 13002 - DNA, 654 bp, Homo sapiens
  SIMILAR (4266)..(3604): 981254mologous to Cloning vector pSacBII SacB,accession number U09128,Smith-Waterman Score=1157.
atggatgaaactggaaaccattctcagcaaactaacacaggaacagaaaaccaaccactacatattctcactcataagtgggagttgagcaatgagaacacatggaaacatggaggggaacatcacacagctgggcctgctggagggtgggggggtgcactgtcccagagagatgggagttttatctataagcccctgactggggctgctgcctttctttcagagatgccctacccagagaggacgagtctagagatgcaggatgcagtctggctacagcagctttactatgctgcagtgggctccacccagtctgaatgtcccggcagctttgtttaccctgtgaggggaaaaccacttattcaagcctcagtaatggtggatgcccctccccccaccaagctccaatgtcccaggtcgacttctgactactgtcctggcaacaagaatttcaagccagtggatcttagcttgctgggctctgtgggtcccaataagatgaaccgggtacctcagttagaaatgcagaaatcacccacgttctgtgttgatccctttgggaactgcagaccggagctgttcctatttgaccatcttgcccagaacccaatagatcctttagataaaaaagccctcaaaacacatgtttcataa

SEQ ID NO: 13003 - DNA, 606 bp, Homo sapiens
  SIMILAR (518)..(736): 481254mologous to Homo sapiens Human secreted protein, SEQ ID NO: 5223,accession number G01142,Smith-Waterman Score=180.
ccccagaggaggcactctgtgccttagcagagctcgagcgctgtgctgggagagctgctgctctcttcagagccgagaggcagaaacgtttacgtctgctgaagctgcacccacagccgccccattcccccaggtgctctgtcccagggagatgggagttttatctataagcccctgaggggggctgctgcctttctttcagagatgccctgcccagagagcagttttacaggctttttacagacagatcagaccgagtccctgaaaactccgtgacagatgtttgtcacattgaaagtaaaatggagcctctccgcctcggcccacaaacgtctccattatgagaccaagcctggtctgctcgttcaccactctggtctttaatttcctcaaatgctcagagctctctcgtagcttagggtctttggagttgctgtttcctctccctaaatggttcctctcaatccttgcataattagtcattgagatatcagcttaaatagcacctgttcagtgagacatttttttcaccaggcattctgaggtagttatgtcgtcccttttgatctccgggtacggaccggaatctcgtaatgcatggtcatg

SEQ ID NO: 13004 - DNA, 887 bp, Homo sapiens
  SIMILAR (1)..(441): 971254mologous to Mus musculus ribosomal protein,accession number M76763,Smith-Waterman Score=746.
  misc_feature (1)...(887): n = a,t,c or g
ccaggaaatgaaataataaaaattagagcagaaatcaattcaattgaaaataggaaccagagaaaaataatgtaatcaaaagccagcgctttgaaaagatccataaaattgataagcccgctaaccgttcccctttccttgaaaaaggggctgcaagcaagggagccaagtggtctggctcgggtgggtcccacccccaaaggagcccagcaagctaagatccactggcttgaaattcttgctgccagcacagaaatcaacctgaaatcaacctgaaatgctcaagcttggtgcnnnnnnnnnnnnnnnnnnnnnnnnnnnnnnnnnnnncagttttaccctcaccgtnnnnnnnnnnnnnnnnnnnnnnnnnnnnnnnncaatcccgccgcagctcagcaaggccactgtnnnnnnnnnnnnnnnnnnnnnnnnnnnnnnnnnnnnnnnnnntctctgaaaaacaggcagcagccccagtcaggggcttgtagataaaacccccatctaactgggacagagcacccagggaaaagggcgggtgtggggggcaacttttcccaaaaattaaacgctttttgcctgaagggttggaaaaacaacagcagatctcccagcacagcactcaagtctctgctaagggcgcagacttgcttctcaacttgggtccctgaccttggggatcctgactgggagaaacccttcaataaggggacaacagacaccctctacacgggaaaactctgttgggcatctggtggggtgctctttggggaaggaaaattccaagggagggaaccgggccgattttttggttgtttggaactctcggtgggaaacctaaggaaaacgggtttggaagtggcctctcagaaatctccagaaac

SEQ ID NO: 13005 - DNA, 359 bp, Homo sapiens
  SIMILAR (17)..(70): 551254mologous to Leishmania major hypothetical protein LM26.11,accession number AL160493,Smith-Waterman Score=57.
  misc_feature (1)...(359): n = a,t,c or g
gcatagggctcggcccatattttaccaccttgattcagtgatcacaccaatggaaatggtttcagagttttgcttttgttttgtctttggcctaaaaaagcacacttttatgagttcagtttctgcgagtcagatgtccaggcacagactagctgggccccctcctcagaacctcacacagctgcaatcaagggttggctgggttgggttttgttgaaggctttgctggaaaagannnnnnnnnnnnnnnnnnnnnnnnnnnnnnnnnnnnntgttcagacctccaggtctgagggcctgggatactgtctggctcaaggctggaagctactttcagttcttagaggctacctgtggtc

SEQ ID NO: 13006 - DNA, 1338 bp, Homo sapiens
  SIMILAR (527)..(204): 741254mologous to Homo sapiens CC chemokine CCL28,accession number AF220210,Smith-Waterman Score=401.
atgactgcgcccaagattgcatacaaaggtgcacacttcggggagcaaaattatggattccggatgctcataatccggaacaaaggagccacagaagacatgcctgcttcaccttcaccttcagccatgatagtgagtttcctgaggtctctgcaaccatgcttcctgtacagcctgcagaactttataaaactagacaaatatatgaagcaactgttctcaggctttggaccactgaagagagtccttgaagagacaaggagaaaaagagcattaaaacacgaggccctaatgcaggaaacagtggccctgatcatagttgcatttggccttaacgtgtcatatgctggatgcaatcagctgtcgtttatggaaagcttacaagctgagtgcgtgaagccagggggcttaaaaactgaactcataaaagtgtgcttttttaggccacagacaaaacaaaagcaaaaatctgaaaccatttccattggtgtgatcactgaatccagtggtcaatatgggccaacagggatagggatgaggcctcctaaacagggcttccaatactttcgcaagccccgttactgggggaacctttatgccgaaaattaccacaagtttcccagggtccttcctaagcacactgctattcatggcatctttctggcagctccccagtctggaaggtttacatccctgataaatgatgtctctatggataggaatctggatagtgctgggaatgaagtagtgaataaaaacatcaagaatcgccattctcaaggcgctaacattccagtgaggaagcggccagcaagcagactcctgagaaggacacacggcacctcagagagcagcgtgctagagaggagaacaagcgggaagggcattagagatggctggaaggagggggatgtggttttaaattggttggtggtaaaacactgtctccctgagaagcagacatttgaacaaagacttgaaggaggggaccaaatctactccttggataaaggcatggtcaggtctaatgctgttgctgctgctgctgccgctgctgctgatgatgatgacgacgatgactcagcgtgtggtgatgaagcacaaggtgcccccaccatcaggctgctgagaagtctggaaggggatcaagagcaacaagcagacagctctgagagcaggtcttttaatgatctgtgctgtgggaaaccagacagcacagggtcctgtcccacagcctggagttggaggacaagtggctgtgaacagcagaagaaatacggtcgtgtgcagatcacagcacgagcagccacagatggctggggacccaaggagtcttaa

SEQ ID NO: 13007 - DNA, 759 bp, Homo sapiens
  SIMILAR (307)..(759): 921254mologous to Homo sapiens putative p150,accession number U93563,Smith-Waterman Score=706.
atggggagaaaccacaatagaaaagctgaaaattctaaaaaccagaacccctcttatcctccaaaggattgcagctcctcgccagcaacggaacaaagctggatggagaatgactttcacaagttgacagaaatatgcttcagaagatcagtaataacaaacttctccaagctaaaggaggatgttcaaacccatcgcaaggaagctgaaaaccttgaaagaagattagaagaatggctaactggagtaaacagcatacagaagaccttaaatgacctgacagagctgaaaaacatggcacgagaactactgttagaagttctagccagggtaatcaggcaggagaaagaaataaagggtattcaattaagaaaagaggaagtcaaattgtccctgtttgcagatgacgtgactgtatatttagaaaaccccatcgtctcagcccaaaatctccttaagctgataagcaacttcagcaaagtctcaggatacaaaatcaatgtgcaaaaatcacaagcattcttatacaccaacaacagacaaacagagagccaaatcatgcatgacttcccattcacaattgcttcaaagagaataaaatacctaggaatccaacttacaagagatgtgaaggacctcttcaaggagaactacaaaccactgctcaacgaaataaaagaggacacaaacaaatggaagaacattccatgcccatggataggaagaatcaatatcgtgaaaatggccatactacccaag

SEQ ID NO: 13008 - DNA, 604 bp, Homo sapiens
  SIMILAR (248)..(604): 921254mologous to Homo sapiens putative p150,accession number U93563,Smith-Waterman Score=576.
accaaatctacgtctgattggtgtacctgaaagtgacggggagaatgtaaccaagttggaaaacactcttcaggatattatccaggagaacttccccaacctagcaaggcagaccaacattcaaattcaggaaatacagagaacaccacaaagatactcctcaagaagagcaaccacaagacacataattgtcagactcaccaaggttgatatgaaggaaataatgttaagggcagccagagagaaagatgacatgattgcatatttagaaaaccccatcatctcagcccaaaatctccttaagctgataagcaacttcagcaaagtctcaggatacaaaatcaatgtgcaaaaatcacaagcattcttatacaccaataacagacaaacagagagccaaatcatgagtgaaatcccattcacaactgcttcaaagagaataaaatacctaggaatccaacttacaagggatgtgaaggacctcttcaaggagaactacaaaccactactcaacaaaataaaagaggacaaaaacaaatggaagaacattccatgctcatggataggaagaatcaatatcgtgaaaatgggtatactgcccaag

SEQ ID NO: 13009 - DNA, 558 bp, Homo sapiens
  SIMILAR (109)..(558): 961254mologous to Homo sapiens putative p150,accession number U93563,Smith-Waterman Score=715.
atgaacattgatgcaaaaatcctcaataaaacactggcaaaccgaatccagcagcacatcaaaaagcttatccaccatgatcaagtgggcttcatccctgggacgcaagtgttggaagttctggccagggcaatcaggcaggagaaggaaataaagggcactcaattaggaaaagaggaagtgaaattgtccctgtttgcagatgacatgattgtatatctagaaaaccccatcgtctcagcccaaaatctccttaagctgataggcaacttcagcaaagtctcaggatacaaaatcaatgtacagaaatcacaagcattcttatgtactaataacagacaaacagagagccaaatcatgagtgaactcccattaacaattgcttcaaagagaataaaatacctaggaatccaacttacaagggatgtgaagcacctcttcaaggagaactacaaaccactgctcaatgaaataaaagaggatacaaacaaatggaagaatattccatgctcatgggtaggaagaatcaatatcgtgaaaatggccatactgcccaag

SEQ ID NO: 13010 - DNA, 1055 bp, Homo sapiens
  SIMILAR (77)..(529): 981254mologous to Homo sapiens protocadherin alpha 5 short form protein,accession number AF152483,Smith-Waterman Score=764.
aaatacaaactaccatcagagaatactataaacacctctatgcaaataaactagaaaatctagaagaaatggataaattcctggacacatataccctcccaagactaaactgggaagaatttgaattgctgaatagaccaataacaggctctgaaattgaggcagtaatcaatagcctaccaacccaaaaaaaaagtccaggaccaggtgaattcacagctgaattctaccagagatacaaagagaagctggtaccattccttctgaaactattccagtcaatagaagaagagggaatcctccctaactcattttatgaggccagcatcatcctgataccaaagcctggcagagacacaacaaaaaacgagaattttagaccaatatccctgatgaacatcaatgcgaaaatcctcaataaaatactggcaaagcaaatccaacagtacatcaaaaagcttatccaccacaaacaagttggcttcatccctgggatgccaggctggttcaacatatgcgaatcgataaacataaatcatcatattaacagaaccaaagacaaaaaccacatgattatctcaatagatgcagaagaggccttcgacaaaattcaacagcccttcatgctaaaacctctcaataaattaggtattgatggaacgtatctcaaaataataagacctatttatgacaaacctacagccaatatcatactgaatgggcaaaaactggaagcattccctttgaaaactggcacaagacagggatgccctctctcaccactcttattcaacatagtgttggaagttctggccagggcagtcaggcaagagaaagaaataaagggtattcaattaggaaaagaggaagtcaaattgtccctgttgagaataaaatacctaggaattcaacttacaagggatgtgaaggacctcttcaaggagaactacaaaccactgctcaacgaaataaaagaggacacaaacaaatggaagaacattccatgctcatggataggaagaatcaatatcgtgaaaacggccatactgcccaag

SEQ ID NO: 13011 - DNA, 466 bp, Homo sapiens
  SIMILAR (221)..(466): 951254mologous to Homo sapiens putative p150,accession number U93563,Smith-Waterman Score=401.
atggataaatttctcgacacatacactctcccaagactaaaccaggaagaagttgaatctctgaatagaccaataacaggagctgaaattgtggcaataatcaatagcttaccaaccaaaaagagtccaggaccagatggattcacagctgaattctaccagaggctgataagcaacttcagcaaagtctcaggatacaggatcaatgtacaagaatctacaagcattcttatacaccatcaacagacaaacagagagccaaatcatgagtgcactcccactcacaattgcttcaaagagaataaaatacctaggaatccaacttacaagggatgtgaaggacctcttcaaggagaactacaaaccactgctcaacgaaataaaagaggatacaaacaaatggaagaacattccatgctcatgggtaggaagaatcaatatcgtgaaaatggccatactgcccaag

SEQ ID NO: 13012 - DNA, 850 bp, Homo sapiens
  SIMILAR (34)..(201): 511254mologous to Gallus gallus tensin,accession number X66286,Smith-Waterman Score=153.
agctcctgaaggaagcactaaacatggaaaggaacaacgggtaccagccactgcaaaaacatgccaaactgtaaagaccatcaatgctaggaagaaactgcatcaactaacagtgttggaagttctggccagggccatcagacaagagaaagaaataaagagtattccattaggaaaagaggaagttaaattgtccctgttggcagatgatatgattgtatatttagaaaaccccatcatctcagcccaaaatctccttaagcagataagcaacttcagtaatgtctcaggatacaaaatcaatgtgcaaaaatcacaggcattcctatacaccaataacagacaaacagagacccaaatcatgagcaaactcccattcacaattgctacaaagagaataaaacaccgaggaatccaacttacaagggatgtaaagaacctcttcaaggagaactacaaactactgctcaacgaaataaaagaggacacaaacaaatggaagaacattccatgctcatggataggaagaatcaatatcgtgaaaatggccatactgcccaaggtaatttatagattcaatgccatccccatcaagctaccaatgactttcttcacagaattggaaaaaactactttaaagttcatatggaaccaaaaaagagcctgcattgccaaaacaatcctaagcaagaagaacaaagctggaggcaacacactacttcaaactatactacaaggctacagtaaccaaaacagcatggtgctggtaccaaaacagagagatagaccaatggaacagaacagagccctcagaaataacaccacacatctacaaccatctgatctttga

SEQ ID NO: 13013 - DNA, 625 bp, Homo sapiens
  SIMILAR (6)..(317): 401254mologous to Chlamydomonas reinhardtii vegetative cell wall protein gp1,accession number AF309494,Smith-Waterman Score= 177.
atggataaattcctggacacatacaccctcccaagactaaaccaggaagaagttgaatccctgaatagaccaataacaggctctgaaattgaggcaataattaatagcttaccaaccaaaaaaagtccaggaccagatggattcacagccgaattctaccagaggtacaaggaggagctggtaccattccttctgaaactattccaatcaatagaaaaagaaggaatcctctctaactcattttatgaggccagcatcatcctgataccaaagcctggcagagacacaacaaaaaagaagaactttagaccaatagccctgatgaacattgatgcaaaaatcctcagtaaaatactggcaaaccgaatccagcagcacatcaaaaagcttatccaccatgatcaagtgggcttcatccctggaatgcaaggctggttcaacatacacaaatcaataaacaataaaatacctaggaatccaacttacaagggatgtgaaggacctcttcaaggagaactacaaaccactgcttcacgaaataaaagaggacacaaacaaatggaagaacattccatgctcatggagaggaagaatcaatatcgtgaaaatggccatactgcccaag

SEQ ID NO: 13014 - DNA, 745 bp, Homo sapiens
  SIMILAR (19)..(576): 911254mologous to Homo sapiens NAG13,accession number AF194537,Smith-Waterman Score=883.
accactggcaagactaataaagaaaaagagaagaatcaaatagatgcaataaaaaatgataaaggggatatcaccacagatcccacagaaatacaaactaccatcagagaatactacaaacacctctacacaaataaactagaaaatctagaagaaattgataaattccttgacacatacacactccccagactaaaccaggaagaagttgaatctctgaatagaccaataacaggatctgaaattgtggcaataatcaatagcttaccaatcaaaaagagtccaggaccagatggattcacagccaaattctatgagaggtacaaggaggaactggtacccttccttctgaaactattccaatcaatagaaaaagagggaatcctccctaactcattttatgaggctagcatcatcctgataccaaagcctggcacagacatgaccaaaaaagagaattttagaccaatattcttgatgaacattgatgcaaaaatcctcagtaaaatactggcaaaccgaatccagcagcacatcaaaaaacttatccactgtgatcaagtgggcttcatccctgagaataaaatacctaggaatccaacttacaagggatgtgaaggacctcttcaaggagaactacaaaccactgctcaaggaaataaaagaggatacaaacaaatggaagaacattccatgctcatgggtaggaagaatcaatatcgtgaaaatggtcatactgccgaag

SEQ ID NO: 13015 - DNA, 742 bp, Homo sapiens
  SIMILAR (1)..(576): 951254mologous to Homo sapiens putative p150,accession number U93574,Smith-Waterman Score=933.
atgaacatcgatgcaaaaatcctcaataaaatactggcaaaccgaatccagcagcacatcaaaaagcttatccaccatgatcaagtgggcttcatccctgggatgcaaggctggttcaacatacgcaaatcaataaacgtaatctggcatataaacagaaccaaagacaaaaaccacatgattatctcaatagatgcagaaaaggtcttcgacaaaattcaacagcccttcatgctaaaaactctcaacaaattaggtattgatgggacatatctcaaaatactaagagctatttatgacaaacccacagccaatatcatactgaatgggcaaaaactggaagcattccctttgaaaactggcacaagacagggatgccctctctcaccactcctattcaacatagtgttggaagttctggccagggcaatcaggcaggagaaagaaataaagggtattcaattaggaaaagaggaagtcaaaccgtccctgtttgcagatgacgtgattgtatatttagaaaaccccatcatctcagtccaaaatctccttaagctgataagcaacttcagcaaaaataaaatacctaggaatccaacttacaaggaatgtgaagtacctcttcaaggagaactacaaatcactgctcaacgaaataaaagaggacacaaacaaatggaagaacattccatgctcatggataggaagaatcaatatcgtgaaaatggccatactgcccaag

SEQ ID NO: 13016 - DNA, 1461 bp, Homo sapiens; identical to SEQ ID NO: 8627
  SIMILAR (1)..(1464): 961254mologous to Homo sapiens putative p150,accession number U93563,Smith-Waterman Score=2438.

SEQ ID NO: 13017 - DNA, 1641 bp, Homo sapiens; identical to SEQ ID NO: 7833
  SIMILAR (2)..(1603): 981254mologous to Homo sapiens putative p150,accession number U93564,Smith-Waterman Score=2788.

SEQ ID NO: 13018 - DNA, 1098 bp, Homo sapiens; identical to SEQ ID NO: 3491
  SIMILAR (676)..(1962): 901254mologous to Homo sapiens putative p150,accession number U93563,Smith-Waterman Score=2117.

SEQ ID NO: 13019 - DNA, 2916 bp, Homo sapiens; identical to SEQ ID NO: 6837
  SIMILAR (1)..(1602): 951254mologous to Homo sapiens putative p150,accession number U93563,Smith-Waterman Score=2644.

SEQ ID NO: 13020 - DNA, 1887 bp, Homo sapiens
  SIMILAR (307)..(1581): 911254mologous to Homo sapiens putative p150,accession number U93574,Smith-Waterman Score=2157.
agcctttgacaaaattcaacaacccttcatgctaaaaactctcaataaattaggtattgatgggatgtatttcaaaataataagagctatctatgacaaacccacagccaatatcatactgaatgggcaaaaactggaagcattccctttgaaaactggcacaagacagggatgccctctctcaccactcctattcaacatagtgttggaagttctggccagggcaattaggcaggaggaggaaataaagggtattcaattaggaaaagaggaagtcaaattgtccctgtttgcagacgacatgattgtatatctagaaaaccccattgtctcagccccaaatctccttaagctgataagcaacttcagcaaagtctcaggatacaaaatcaatgtacaaaaatcacaagcattcttatacaccaacaacagacaaacagagagccaaatcatgagtgaactcccattcacaattgcttcaaagagaataaaatacctaggaatccaacttacaagggatgtgaaggacctcttcaaggagaactacaaaccactgctcaaggaaataaaagaggatacaaacaaatggaagaacattccatgctcatgggtaggaagaatcaatatcgtgaaaatggccatactgcccaaggtaatttacagattcaatgccatccccatcaagctaccaatgactttcttcacagaattggaaaaaactactttaaagttcatatggaaccaaaaaagagcccgcatcaccaagtcaatcctaagccaaaagaacaaagctggaggcatcacactacctgacttcaaactatactacagggctacagtaaccaaaacagcatggtacttgtaccaaaacagagatatagatcaatggaacagaacagagccctcagaaataacactgcatatctacaactatctgatctttgacaaacctgagaaaaacaagcaatggggaaaggattccctgtttaataaatggtgctgggaaaactggctagccatatgtagaaagctgaaactggatcccttccttacatcttatacaaaaatcaattcaagatggattaaagacttaaacgttagacctaaaaccataaaaaccctagaagaaaacctaggcattaccattcaggacataggcatgggcgaggacttcatatctaaaacaccaaaagcaatggcaacaaaagacaaaattgacaaatgggatctaattaaactaaagagcttctgcacagcaaaagaaactaccatcagagtgaacaggcaacctacaaaatgggagaaaattttcacaacctactcatctgacaaagggctaatatccagaatctacaatgaactcaaacgaatttacaagaaaaaaacaaacaccaccatcaaaaagttggcgaaggacatgaacagacacttctcaaaagaagacgtttatgcagccaaaaaccacatgaaaaaatgctcatcatcactgggcatcagagaaatgcaaatcaaaaccacaatgagataccatctcacaccagttagaatggcaatcattaaaaagtcaggaaacaacaggtgctggagaggatgtggagaaatagattttcagcaaactaacacaggaacagaaaaccaaacgctgcatattctcactcataagtgggagttgaacaatgagaccacacggacacagggaggggaacatcatacactggggcttgtcgaagggtggggggctaggggagggatagcatggaatggagaaggccaaagaggagaggccagggaagatgctaaatatgtggtccatgtagatattgaaattaccaagatgtcaaggatagaggtacaacaaaagcctatgagcttttggccatcttctgt

SEQ ID NO: 13021 - DNA, 975 bp, Homo sapiens
  SIMILAR (121)..(528): 851254mologous to Homo sapiens gag,accession number AF156961,Smith-Waterman Score=625.
atggtactattccttctgaaactttcccaatcaatagaaaaagagggaatcctccctaattcattttatgaggccaacatcatcctgataccaaagcctggcagagacacaacaaaaaaagagaattttagaccaatatccctgatgaacatcgatgcaaaaatcctcaataaaatactggcaaacccaatccagcagcacatcaaaaagcttatccaccatgatcaagtgggcttcatccctgggatgcaaggctggttcaacataagcaaatcaataaatgtaatccatcatattaacagaaccaaagacaacaaccacatgattatctcaatagatgcagaaaaggcctttgacaaaattcaacagcccttcatgctaaaaactctcaataaactagcgataagcaacttcagcaaattctcgggttacaaattcaatgtgcaaaaatcacaaggattcctatacaccaataatagacaaacagagaggcaagtcatgagtgaactcccattcacaattgcttcaaagacaataaaataccaaggaatccaacttacaagggatgtgaaggacctcttcaaggagaactacaaaccactgttcaacgaaataaaagaggacacaaacaaatggaagaaaattccatgctcatggataggaagaatcaatattttgaaaatggccatactgcccaaggtaatttatagattcaatgccatccccatcaagctaccaatgactttcttcacagaattggaaaaacctactttaaagttcatgtggaaccaaaaaagagcccacattgccaagtcagtcctaagccaaaagaacaaagctggaggcatcatactacctgacttcaaactatactacaaggctacagtaaccaaaacagcatggtactggtaccaaaacagagatatagaccaatggaacagaatagagcccccggaaataataccacacatctag

SEQ ID NO: 13022 - DNA, 876 bp, Homo sapiens
  SIMILAR (1)..(846): 871254mologous to Homo sapiens putative p150,accession number U93567,Smith-Waterman Score=1362.
atggaagatcaaatgaatgaaatgaagcaagtagagaagcttagagaaaaaagagtaaaaagaaatgaacaaaacctccaagaaatatgggactatgtgaaaagaccaaatctacgtctgattggtgcacctgaaagtgacggggagaatggaaccaagttggaaaacactctgcaggatattatccaggagaacttccccaatctagcaaggcaggcagacattcaaatttgggaaatacagagaatgccacaaagattatcctcgagaagagcaactccaagacacataattatcagattcaccgaagttgaaatgaaggaaaaaatgttaagggcagccagagagaaagtgttggaagttctggccagggcaatcaagcaggataaagaaataaagggcattcaattaggaaaagaggaagtcaaattgtccctgtttgtagatgacaggattgtatatttagaaaaccccatcatctcagcccaaaatctccttaaactgataagcaacttcagcaaagtctcaggatacaaaatcaatctgcaaaaatcacaagcatccttatacaccaataacagacaaacagagagccaaatcatgagtgaactcccattcaaaattgcttcaaagagaataaaatacctaggaatccaacttacaagggatgtgaaagacctcttcaaggagaactacaaaccagtgctcaacgaaataaaagaggacacaaacaaatggaagaatattccatgctcatggataggaagaatcaatatcatgaaaacggccgtactgcccaaggtaatttatagattcaatgccatccccatcaagctaccaatgactttctacacagaattggaaaaaactatttaa

SEQ ID NO: 13023 - DNA, 1368 bp, Homo sapiens; identical to SEQ ID NO: 5410
  SIMILAR (52)..(1365): 971254mologous to Homo sapiens unknown,accession number AF148856,Smith-Waterman Score=2318.

SEQ ID NO: 13024 - DNA, 870 bp, Homo sapiens
  SIMILAR (358)..(867): 911254mologous to Homo sapiens putative p150,accession number U93574,Smith-Waterman Score=812.
atgggagactttaacaccccactgtcaacattagagagatcaacaagacagaaagttaacaaggatatccaggaattgaactcagctctgcaccaagcaaacctaatagacatctacataactctccacgccaaatcaacagaatatacattcttctcagaaccagctcacacttattccaaaattggccgcatagttggaagtaaagcactcctcagcaaatgtaaaagaacagaaattacaaaaaactgtctctcagaccacagtgcaatcaaactagaactcaggattaaaaaactcattcaaaactgctcaactacatggaaactgaacaacctcctcctgaatgactactggctgataagcaacttcagcaaagtctcagcatacaaaatcaatgtgccaaaatcacaagcattcttatacaccaataacagacaaacagagagccaaatcaagagtgaactcccactcacaattgcttcaaagagaataaaatacctaggaattcaacttacaagggatgtgaaggacctcttcaaggagaactacaaaccactgctcaacgaaataaaagaggacagaaacaaatggaagaacattccgtgctcatggataggaagaatctgtatcatgaaaatggccatactgcccaagataatttatagtttcaatgccatccccatcaagctaccaatgactttcttcacagaatttgaaaaaactactttaaagttcatatggaaccaaaaaagagcccgcattgccaagacaatcctaaaccaaaagaacaaagctggaggcatcatgctacctgacttcaaactatactacaaggctacagtaaccaaaacagcatggtactggtag

SEQ ID NO: 13025 - DNA, 594 bp, Homo sapiens
  SIMILAR (976)..(2136): 841254mologous to Homo sapiens putative p150,accession number U93567,Smith-Waterman Score=1763.
atggtgttggaagttctggccagggcaatcaggcaggagaaagaaataaagggtattcaattaggaaaagaggaagtcaaattgtccctgtttgcagatgacatgattgtatatctagaaaaccccatcgtctcagcccaaaatctccttaagctgataagcaacttcagcaaagtctcaggatacaaaatcaatgtgcaaacatcacaagcattcttatacggcaataacagaaaaacagagagccaaatcatgagaaaactcccattcacaattgcttcaaagagaataaaatacccaggaatccaacttacaagggatgtgaaggacctcttcaaggggaactacaaaccactgctcaacgaaataaaagagaacacaaacaaatggaagaactttccatgttcatggataggaagaatcaatattgtgaaaatggccatactgcccaaggtaatttatagattcaatgccatccccatcaagctaccaatgactttcttcatagaattggaaaaaactactttaaagttcatatggaaccaagtcaatcctaagccaaaagaacaaagctggagacatcacgctacctga

SEQ ID NO: 13026 - DNA, 993 bp, Homo sapiens
  SIMILAR (70)..(936): 861254mologous to Homo sapiens putative p150,accession number U93574,Smith-Waterman Score=1235.
atggagctgaaaaccacagcacaagaacttcgtgttgcatgcacaagcttcaatagcagattcgatcaagtggaagaaaggatatcagtgattgaagatcaaattaatgaaataaaaaccaacgacaaaaaccacatgattgtctcaaaagatgcagaaaaggccttcgataaaattcaacacccattcatgttaaaaactctcaatcaactaggtattgatggaatatatctcaaaataataagagctatttatgacaaacccacagccaatatcatactgaatgggcaaaaactggaagcattccctttgaaaactggcacaagacaaagatgccctatctcagcactcctattcaacatagtgttggaagttctggccagggcaatcaggcaagagaaaaaaataaagggtattcaattaggaaaagaggaagtcaaattgactctgtttgcagatgacatgattgtatatttagaaaaccccatcagctcagcccaaaatctccttaagctgataagcaaagtctcaggatacaaaatcaatgtgcaaaaatcgcaagcattcctatacaccaataatagacaaacagagagtcaaatcatgagtgaactcccattcacaattactacaaagagaataaaatacctaggaatccaacttacaagggatgtgaaggatctcttcaaggagaactacaaaccactgctcaatgaaataaaagagtacacaaacaaatggaagaacattccatgctcatggataggaagaatcaatatcttgaaaatggccatactgctcaaggtaatttatagattcaatgccatccccatcaagctaccactgactttcttcacagaattggaaaaaactactttaacgttcctatggaaccaaaaaagagcctgcaaagccaagacaatcctagcaaaaagaataaacctggaggcatcacactaccggacttcaaactatactacaaggctacagtaa

SEQ ID NO: 13027 - DNA, 2112 bp, Homo sapiens
  SIMILAR (1429)..(2109): 981254mologous to Homo sapiens unknown,accession number AF149422,Smith-Waterman Score=1149.
atgggagactttaacaccgcactgtcaacattagacagatcaatgagacagaaagttaataaggatatccaagaattgaactcagctctgcaccaagcagacctaacagacatctacggaactctccaccccaaatcaacagaatgtacattcttctcagcaccacaccacacctattccaaaattgtccacatagttggaagtaaagcactcctcagcaaatggaaaagaagagaaattataacaaactgtctctcagaccacagtgcaatcaaactagaactcaggattaagaaactcaatcaaaactgctcaactacatggaaactgaacaacctgctcctgaataattactggactaataaagaagaaaagagagaagaatcaaatagatgcaataaaaatgataaaggggatatcaccaccaatcccacagaaatacaaactaccatcagagaatactataaacacctctatgcaaataaactagaaaatctagaagaaatggataaattcctcgacacatacaccctcccaagactaaaccaggaagaagttgaatctctgaatagaccaataacaggctctgaaattgaggcaataattaatagcttaccaaccaaaaaaagtccaggaccagatggattcacagccgaattctaccagaggatgaactacatttctttcaaaagcacctggaaaattataaagaatgcatacagtttagcccatagccgagaactgagagatggaggtcaaagtcagaaaatctgcgaacagttttatattttgttcctgacacacttctccagatatgagcgacatgttaaagaacatacagtggagaaatccaactcatacagtcctgaaaagattagaaaagaagaatctaaacaggatacaaagctcaatgatgaaaatgactctgaaaggaaagcctcagttcatctgctggaaacagacaactgtgcttctgcaatgcatcactgttttgttttgtttgtggcaaagccagtagctcattatgaagtgggtattgactttatgattgccaaacaaatgcacagggatattttatcaagagctgtggattcttatttactgaacagaattcgttccaatgtccagaataatatgctgaagcagccatttacaaaagcaagccacaaccctttaccattgtccttcagcaggcagccagcctcagggggtctgcagatagcaacttgtggcaccaatgtcttcctttatataatgcacgtatcaccatcacgatacgagagcaactcgaagaatcttaacgtataccacggtaaacacctacggcacccaactcagtctacagcaggacacccaaaagttaaattcactttggctgtggctgtgctccaggggtctgggactgtctgcatctctgaaacaactcctgtgttggaagttctggccagcgcaatcaggcaggagaaggaaataaagggtattcaattaggaaaagaggaagtcaaattgtccctgtttgcagacgacatgattgtttatctagaaaaccccatcgtctcagcccaaaatctccttaagctgataagcaacttcagcaaagtctcaggatacaaaatcaatgtacaaaaatcacaagcattcttatacaccaacaacagacaaacagagagccaaagcatgggtgaactcccattcacaattgcttcaaagagaataaaatacctaggaatccaacttacaagggatgtgaaggacctcttcaaggagaactacaaaccactgctcaaggaaataaaagaggacacaaacaaatggaagaacattccatgctcatgggtaggaagaatcaacatcgtgaaaatggccatactgcccaaggtaatttacagattcaatgccatccccatcaagctaccaatgactttcttcacagaattggaaaaaactactttaaagttcatatggaaccaaaaaagagcccgcatcgccaagtcaatcctaagccaaaagaacaaagctggaggcatcacactacctgacttcaaactatactacaaggctacagtaaccaaaacagcatggtactggtaccaaaacagagatatagattaa

SEQ ID NO: 13028 - DNA, 846 bp, Homo sapiens
  SIMILAR (286)..(831): 901254mologous to Homo sapiens putative p150,accession number U93564,Smith-Waterman Score=882.
atggcacgagaactatgtgacgaatgcacaagcttcagtagccaattcaatcaacgggaaaaaaggatatcagtgattgaagatcaaatgaatgaaatgaagcgagaagagaagtttagagaaaaaagagtaaaaagaaacaaacaaagcctccaagaaatatgggactatgttaaaagacaaaatctatatctgattggtatacctgaaagtgatggggagaatggaaccaagttggaaaacattctgcaggatattatccaggagaatttccccaacctagcaagacaaacagagagccaaatcatgagtgaactcccattcacaattgcttcaaagagaataaaatacctaggaatccaacttacaaggaacgtgaaggacctcttcgaggagaactacaaaccactgctcaatgaaataaaagaggatacaaacaaatggaagaacattccatgctcatggataggaagaatcaatatcatgaaaacggccatactgcccaaggtaatttatagattcaatgccatccccatcaagctaccaatgactttcttcacagaattggaaaaaactactttaaagttcacatggaaccaaaaaagagcccgcattgccaagacaatcctaagccaaaagaacatagctggaggcatcatgctacctgacttcaaactatactacaaggctacagtaaccaaaacagcacagtactggtaccaaaacagagatatagaccaatggaacagaagagagccctcagacatagtaccacacatctacaactatctgatatttgacaaacctgacaaaaacaagaaattggggaaaggattccctatttaa

SEQ ID NO: 13029 - DNA, 1206 bp, Homo sapiens; identical to SEQ ID NO: 3886
  SIMILAR (538)..(1203): 901254mologous to Homo sapiens putative p150,accession number U93563,Smith-Waterman Score=1042.

SEQ ID NO: 13030 - DNA, 1221 bp, Homo sapiens
  SIMILAR (409)..(1164): 961254mologous to Homo sapiens putative p150,accession number U93563,Smith-Waterman Score=1233.
atggaaagtgaggtgctaaatgtgctgttcatgggcgtcattgcccttagctcaggcaacaatatcttgggctttaacactgacaactttgtcatagacatcagtagactcaccagcatcaacaaaacagttactttgacagttatgcagaatgatgcagattgtcctcagtggtcaatagtgaaagagtctccatgttttgaaaggagcaaaagatttgaagatgagttactaaagaatctagttcaggctagcagaactgctggtcctccttatttacttgttcatgagagcacttctggaactgacaagattctaaatcaagtgagtttccctggtaccagcgctaagactattggtttcatagcctgtctcatccaggttgaactgtctagcagtagagctacagtgttggaagttctggccagggcaattaggcacgagaaggaaataaagggtattcaattaggaaaagaggaagtcaaattgtctctgtttgcagatgacatgattgtatatctagaaaactccattgtctcagcccaaaatctccttaagctgataagcaacttcagcaaagtctcaggatacaaaatcaatgtacaaaaatcacaagcattcttatacactaataacagacaaacagagagccaaatcatgagtgaactcccattcacaattgcttcaaagagaataaaatacctaggaatccaacttacaagggatgtgaaggacctcttcaaggagaactacaaaccactgctcaacgaaataaaagaggatacaaacaaatggaagaacattccatgctggtgggtaggaagaatcaatatcgtgaaaatggccatactgcctaaggtaatttacagattcaatgccatccccatcaagctaccaatgtctttcttcacagaattggaaaaaaccactttaaagttcatatggaaccaaaaaagagcccgcattgccaagtcaatcctaagccaaaagaacaaagctggaggcatcacactacctgacttcatactatactacaaggctacagtaaccaaaacagcatggtactggtaccaaaacagagatatagatcaatggaacagaacagagccctcagaaataacactgcatatctacaactatctgatctttgacaaactgagaaaaacaagcaatggggaaaggattccctatttaataaatggtgctgggaaaactggctag

SEQ ID NO: 13031 - DNA, 1095 bp, Homo sapiens
  SIMILAR (508)..(1092): 881254mologous to Homo sapiens putative p150,accession number U93574,Smith-Waterman Score=908.
atggctcacacctgtaatcccagcactttgggaggccgaggtgcccccatcgaccccatcttcttgctgagccgcaccgtttccaacgtcatcagttccgttgtcttcagaagtcgcttcgactatgaggacaagcagttcctgaatctgctgcggttgatcaatgagagtttcattgagatgagcactccctgggcacagctatatgacatgtactctggaatcatgcagtatttgccaggaagacacaatctcatctactacttggtagaagagctcaaggacttcattgcctccagggtcaagatcaacgaagcatcctttgacccccaaaaccctcgggacttcattgactgctttctcatcaagatgcaccagggcaccgatgtcatcaccctccttaacaccgtccactacgaccccagccagttcctgacgccccaggagttcaaccccgagcattttttggatgccaatcagtccttcaagaagagtccagccttcatgcccttctcagctgcccaaaatctctttaagctgataagcaacttcagcaaagtctcaggatgcaaaatcaatgtgcaaaaatcacaagcattcttatacaccaataacagacaaacagaaagccaaatcatgagtgaacgcccattcacaactgcttcaaagagaataaaatacctagaaatccaacttacacgggatgtgaaggaccttttcaaggagaactacaaaccactgctcaacgaaataaaagaggatacaaacaaatggaagaactttccatgctcatggataggaagaatcagtatcgtgaaaatggccatactgcccaaggtaatttatagattcagtgccatccccatcaagctaccaatgactttcttcacagaattggaaaaaactactttaaagttcatatggaaccaaaagagagcccacattgacaggacaatcctaagcaaaaagaacaaagctggaggcatgatgctacctgacttcaaactatactacaaggctacaataaccaaaacagcatggtactggtaccaaaacagagatacagaccaatggaacagaacagaggcctcataa

SEQ ID NO: 13032 - DNA, 931 bp, Homo sapiens
  SIMILAR (1)..(681): 881254mologous to Homo sapiens putative p150,accession number U93563,Smith-Waterman Score=1014.
atgttggaagttatggccagggcaatcaggcaagagaaagaaataaagggcattcaattaggaaaagaggaagtcaaattgttcctgtttgcggataacatgattgtgtatttagaaaaccccatcgtctcagcccaaaatctccttaagctgataagcaacatcagcaaagtctcaggatacaaaatcaatgtgcaaaaatcacaagcattcctatacaccaataacaggcaaccacagagccaaatcatgactgaactcccattcacaattgctacaaagagaataaaatacctaggaatccaacttacaagggatgtgaaggacctcttcaaggagaactacaaaccactgctcaacgaaacaaaagaggacacaaacaaatggaagaacattccatgctcatggataggaagaatcaatatcgtgaaaatagccatactgcccaaggtaatttatagattcaatgccatccccatcaagctaccaatgactttcttcacaaaactggaaaaaactactttaaagttcatatggaaccaaaaaagagcttgcattgccaagacaatcctaagccaaaggaacaaagctggaggcatcacactacgtgacttcaaaccatactacaaggctacagaaaccaaaacagcaagtgaaatgaagtactatttggagaataagatacctttcaaggttttgcatatggtttataatgttcccacacatcctccttttattggtgatcttcatcccaataccaaggtagtgtctctccctccaaacattacctctttgattgaaccaatgaatcaaggtgttatatcagcttttaaggactgctacctgaggaagacctttgtccaggctgttgctacacctgagggagagactgagatgacagtgatgcaattctggaaggattacaacacag

SEQ ID NO: 13033 - DNA, 1296 bp, Homo sapiens; identical to SEQ ID NO: 5429
  SIMILAR (325)..(1266): 981254mologous to Homo sapiens putative p150,accession number U93565,Smith-Waterman Score=1639.

SEQ ID NO: 13034 - DNA, 544 bp, Homo sapiens
  SIMILAR (1)..(399): 891254mologous to Homo sapiens putative p150,accession number U93574,Smith-Waterman Score=600.
atgagtgaaatctcattcacaattgcttcaaagggaataaaatacctaggaatccaacttacaagggatgtgaaggacctcttcaaggaaaactacaaaccactgctcaacgaaataaaagaggacacaaacaaatggaagaacattccaggctcatggataggaataatcagtatcgtgaaaatggccatactgcccaaagtaatttatagattcaatgccatactcatcaagctacaaatgactttctgcacagaattggaaaaaactactttaaagttcatatggaaccaaaatagagcccacattgccaagacaatcctaagccaaaagaacaaagctgggggcatcacgctacctgacttcaaactatactacaaggctacagtaaccaaaacaacatgccccgccaccctcaagccacaccccattgatcatttgctaaagattttagtacctggctctggcctgctttccaccgtcaacactcacatcaaggcacctggatctcttctccgccggcaatcctgccttccgccttcag

SEQ ID NO: 13035 - DNA, 718 bp, Homo sapiens
  SIMILAR (3)..(536): 921254mologous to Homo sapiens putative p150,accession number U93563,Smith-Waterman Score=827.
atgacatgattttatatctagaaaaccccatcgtctcagcccaaaatctccttaagctgataggcaacttcagcaaattctcaggatacaaaatcaatgtgcaaaaatcacaagcattcttatacatcaataacatacaaacagagagccaaatcatgagtgaactcccattcacaattgcttcaaagagaataaaatgcctaggaatccaacttacaagggatgtgaaggacctcttcaaggagaactacaaaccactgctcaaggaaataaaagaggatacaaacaaatggaagaacattccatgctcatgggtaggaagaatcaatatcatgaaaatggccatactgcccaaggtaatttacagattcaatgccattgccatcaagctaccaatgactttcttcacagaattgggaaaaactactttaaagttcatacagaaccaaaaaggagcctgtattgccaagtcaatcctaagccaaaagaccaaagctggaggcatcacactacctgacttcaaactatactgtaaaggctacagtaaccaaaacagcatggttcacagaaaggcagcaaagtgttgtgtgaaccctggtgctgtggacctcagagactttggccccaccttgctctctggccacctctcctggctgtctcactccctgcacgctctcaccctccgcttggcagctctgatgctcttcgatttatccag

SEQ ID NO: 13036 - DNA, 1464 bp, Homo sapiens; identical to SEQ ID NO: 3891
  SIMILAR (696)..(1148): 941254mologous to Homo sapiens putative p150,accession number U93574,Smith-Waterman Score=729.

SEQ ID NO: 13037 - DNA, 2817 bp, Homo sapiens
  SIMILAR (865)..(2298): 941254mologous to Homo sapiens putative p150,accession number U93563,Smith-Waterman Score=2346.
ataacttatttggacctgctctggaagcacactcgtgtgaacaaagtacctggctgtcctggagcagatctggatggacgtgttccacagtcacttgtgctgaatccacagtcacttgtgctgaatccacctggacctgaagcaatgcaagggcagagggtcattgtgaccgccttcatccacacctgtggcacccgagctcttgtctggcatccaggaaaaatcaggtcagatgagcaaattgaaggaaggcgaatgcagaggattttattgctgatgaaagtggctctcagagggaagcctctcattccatgctttcccttctcatggcataatgtaccccatacccttccctacccctccatttccccacaagagccagggttctccctcttctcaggacttgctggtgcagggctgctgaggtttgctgggcatctgctccagtccctagttgcctcagattttctggtacctgaagatatcaccagtgaagcctgcaaaacagcaaagtggcagcctgcccctttctctgggagctccattccagtggggtacagacatgttgccagcccaaatgcacctgcaggaggtcgctggagaccctggtacttcatcccaaagagaaatcgaaactctgtctacaggagaacacaggcagaggtggctgtaggccccagtttggaggtcctgcccagagatgatgaatggattgggatcctgtttaaagaaatggtctggccaaatttttgtggagcagctgtgctgtgctgggggatcccttctctccccagtcagtctggactctctgaagcctgcaggctggaaaagctgggtcattcaaacagcaaagatagtggcccacccctcccgtcaggaacaccaacctgtcctgggaaggcacaacactattgccagggactggctggaattccaagccaggcaatcaggcaggagaaggaaataaagggtattcaattaggaaaagaggaagtcaaattgtccctgtttgcagacgacatgattgtttatctagaaaaccccatcgtctcagcccaaaatctccttaagctgataagcaacttcagcaaagtctcaggatacaaaatcaatgtacaaaaatcacaagcattcttatacaccaacaacagacaaacagagagacaaatcatgagtgaactcccattcacaattgcttcaaagagaataaaatacctaggaatccaacttacaagggatgtgaaggacctcttcaaggagaactacaaaccactgctcaaggaaataaaagaggacacaaacaaatggaagaacattccatgctcatgggtaggaagaatcaatatcgtgaaaatggtcatactgcccaaggtaatttacaggttcaatgccatccccatcaagctaccaatgactttcttcacagaattggaaaaaactactttaaagttcatatggaaccaaaaaagagcccgcatcgccaagtcaatcctaagccaaaagaacaaagctggaggcatcacactacctgacttcaaactatactacaaggctacagtaaccaaaacagcatggtactggtaccaaaacagagatatagatcaatggaacagaacagagccctcagaaataacgccgcatatctacaactatctgatctttgacaaacctgagaaaaacaagcaatggggaaaggattccctatttaataaatggtgctgggaaaactggctagccatatgtagaaagctgaaactggatcccttccttaccccttatacaaaaatcaattcaagatggattaaagacttaaacgttagacctaaaaccataaaaaccctagaagaaaacctaggcattaccattcaggacataggcgtgggcaaggacttcatgtccaaaacaccaaaagcaatggcaacaaaagccaaaattgacaaatgggatctaattaaactaaagagcttctgcatagcaaaagaaactaccatcagagtgaacaggcaacctacaacatgggagaaaattttcacaacctactcatctgacaaagggctaatatccagaatctacaatgaactcaaacaaatttacaagaaaaaaacaagcaaccccatcaaaaagtgggcaaaggacatgaacagacacttctcaaaagaagacatttatgcagccaaaaaacacatgaaaaaatgctcatcatcactggccatcagagaaatgcaaatcaaaaccactatgagatatcatctcacaccagttagaatggcaatcattaaaaagtcaggaaacaacaggaattccactcctggcatttttgctcaaagaaataatcctaaggacaacagacgccttagacatgacagtgttcattatttcatgattcataaaagtaaaaacaaaaataaaacacctaaaagtctaaaagcacaggaaaggcaagactggcccactcttcagttcctgattttgttaaacaagtgcactgctgtcgacatgacaaaaggtcttccaggtggggcctggggagtgtggactgacagaggccacttcctgggcttctccattggctctacccccaccaaaggtgagcatgagctgagggagggtgcttttcatgcttctccattgtttctgcccatgctaagggtaaacacatgcaaagagcctcttgctggctcttacttctcagcatcatctactggctggaagcctgaattacacctccaaataaaagtaaatcactacaacaataaacttgaggaagacactgcatatctgcaaccaaggagcccttacagagccttggtcctctga

SEQ ID NO: 13038 - DNA, 1305 bp, Homo sapiens
  SIMILAR (637)..(1302): 911254mologous to Homo sapiens putative p150,accession number U93563,Smith-Waterman Score=1098.
atgatgctgaaacagaaacttcatggggtctttcttccagtctggcctcatgactgttgtaaagggaagggccttggagctggctctctcccaagagaatttcaacaaagaattgttttgaactcaagtcaaaaagatgcccttcaagcattgtttaagcagaactcctaccctggcataccaaccagagagcaactggccaaagaaatcggcagtctggagtctagcatacagaaggtctgtatctgcatcacagatgtgaatccacaacaaatccttcccatggctttgacccatttctctataccaggctctctcccaagagaatttcaacaaagaattgttttgaactcaagtcaaaaagatgcccttcaagcattgtttaagcagaactcctaccctggcataccaaccagagagcaactggccaaagaaatcggcagtctggagtctaggatacagagaataaaatacctaggaatccaacttacaagggatgtgaaggacctcttcaaggagaactacaaaccactgctcaatgaaataaaagaggatacaaacaaatggaagaacattccatgctcatgggtaggaagaatcagtatcgtgaaaatggtcatactgcccaagaattggaaaaaaactactttaaagttcatatggaaccaaaaaacagcctgcatcaccaagtcaatcataagccaaaagaacaaagctggaggcatcacgctacctgacttcaaattacactacaaggctacagtaaccaaaacagcatggtattggtaccaaaacagagatatagatcaatggaacggaacagagccctcagaaataacaccgcatatctacaactatctgatctttgacaaacctgagaaaaacaagcaatggggaaaggattccctatttaataaatggtgctgggaaaactggctagccatatgtagaaagctgaaactggatcccttccttacaacttatacaaaaattaattcaacttggatcaaagacttacatgttagacctaaaatcataaaaaccccagaagaaaacctaggcaataccattcaggacataggcatgggcaaggacttcatgtctaaaacaccaaaagcaatgggaacaaaagccaaaattgacgaagcggatctaattaaattaaagagcttctgcacagcaaaaggaactaccatcagagtgaacaggcaacctacaaaatgggagaaaatttttacaacctactcatctgacaaagggctaatatccagaatctacaatgaactcaaacaaatttacaagtaa

SEQ ID NO: 13039 - DNA, 1545 bp, Homo sapiens; identical to SEQ ID NO: 10092
  SIMILAR (355)..(1005): 971254mologous to Homo sapiens putative p150,accession number U93568,Smith-Waterman Score=1072.

SEQ ID NO: 13040 - DNA, 1328 bp, Homo sapiens
  SIMILAR (333)..(836): 591254mologous to Homo sapiens putative p150,accession number U93563,Smith-Waterman Score=425.
acaagttgctgtgctcggttatcacagccatgctgaagttttggtggcccctcctcaatcccagtaacccaaattccatcacgaaagggagaatacaaagtgctcatttcacttcccatctggggcatgttgaaacagtccaaacatctgaaaggaggactagagagaaagaaggctcacctcggaaaaaaccacacaaaaacaaaaagcggccgccaacaaaaacagggagcccaaaccaaacgtcacgtgacgcggaagggggaacagggcataaacccaccgctccacaaaaagcccaaaaaaaggcagaaaacactcagctaaagctaaggccacggcacaaacacaccagcgatagctcaaaccacagcaagagccaacgcagaaacccccttttatttactcttgaaatacaaactaccatcagagaatactacaaacacctctatgcaaataaactagaaaatctagaagaaatggataaattcctcgacacatacaccctcccaagactaaaccaggaagaagttgaatctctgaatagaccaataacaggctctgaaactgtggcaataatcaatagcttaccaaccaaaaagagtccaggaccagatggattcacagctgaattctaccagaggtacaaggaggaactgagaataaagtacctagaaatccaacttacaagggatgtgaaggacctcttcaaggagaactacaaaccactgctcaaggaaataaaagaggacacaaacaaatggaagaacattccatgctcatgggtaagaagaatcaatatcgtgaaaatggccatactgcccaagagaataaaatacctaggaatccaacttacaagggatgtgaaggacctcttcaaggagaactacaaaccactgctcaacgaaataaaagaggacacaaacaaatggaagaacattccatgctcatggataggaagaatcaatatcatgaaaatggccatactgcccaagcacaagcaggacgatatggaagtaaagacagagaaccgtagagggcaacagaaaaaaatggccaaacccatccccgaaaaaggagatataaggaggagacgcctctatcctccaatcggagagctgagcacctccggaggtgagggtttctttttctccagcaggtggttttcgcagagatctgttatatctgaagttccgccagagaaggccactgtcatcactcaccttgacgactgcagacgactcctaacgattcgactgtcagtctttcccacttctaatctagcaatggctcattcaacaaatacctgctgtgtgcctactatgtaa

SEQ ID NO: 13041 - DNA, 1026 bp, Homo sapiens; identical to SEQ ID NO: 10095
  SIMILAR (262)..(783): 971254mologous to Homo sapiens putative p150,accession number U93574,Smith-Waterman Score=877.

SEQ ID NO: 13042 - DNA, 1724 bp, Homo sapiens
  SIMILAR (475)..(1404): 971254mologous to Homo sapiens putative p150,accession number U93563,Smith-Waterman Score=1618.
atggcgtccccaggacctgcacccacagccagtcccaaaatccactctgagctgttaacagcaaccagagaagctcagagacatcatcctgtgccccgtggtcaagacctagtgacctcagaatcattctcgctctccttctgcttctcagctgccatcttcatttttgaacttttgggttcaaactcagaaggagtcacagatcttagactgtggctatgccagccagcgcccaggtgcggggagtggacctacaaccccttggagcagtgctgtgatgacggtgtcatcctagacttgaaccagacccggctctgcggctccagctgcaccttctggccctgcttccagcactgctgcctggagtctttgggctctcagaaccagacagttgtgaggttcaaggtcccaggcatgaagccagattgcaagtcctcccctatcaccaggatctgtgcccaggctggagtgcaaataagcaacttcagcaaagtctcaggatacaaaatcaatgtacaaaaatcacaagcattcttatacaccaacaacagacaaacagagagccaaatcatgagtgaactcccattcacaattgcttcacagagaataaaatacctaggaatccaacttacaagggatgtgaaggacctcttcaaggagaactacaaaccactgctcaaggaaataaaagaggatacaaacaaatggaagaacattccatgctcatgggtaggaagaatcaatatcgtgaaaatggccatactgcccaaggtaatttacagattcaatgccatccccatcaagctaccaatgactttcttcacagaattggaaaaaactactttaaagttcatatggaaccaaaaaagagccctcatcgccaagtcaatcctaagccaaaagaacaaagctggaggcatcacactacctgacttcaaactatactataaggctacagtaaccaaaacagcatggtactggtaccaaaacagagatatagatcaatggaacagaacagagccctcagaaataacgccgcatatctacaactatctgatctttgacaaacctgagaaaaacaagcaatggggaaaggattccctatttaataaatggtgctgggaaaactggctagccatatgtagaaagctgaaactggatcccttccttacaccttatacaaaaatcaattcaagatggattaaagacttaaacgttagacctaaaaccataaaaaccctagaagaaaacctaggcattaccattcaggacataggcatgagcaaggacttcatgtctaaaacaccaaaagcaatggcaacaaaagacaaaattgacaaatgggatctaattaaactaaagagcttctgcacagcaaaagaaactaccatcagagttgaacaggcaacctacaaaatgggagaaaatttttgcaacctactcatctgacaaagggctaatatccagaatctacaatgaactcaaacaaatttacaagaaaaatacaaacaacctcatcaaaaagtggagaggagtacagggcacccgtggaaccttggatcttgttgcttggccaccttatgtctctgctccctgcattccagtgcaatgctctgtggctgccccagctgtggctcaggcacaccaagacgcagctcaagctgccacttcagagggcacaagcaatgagccttggtggtgtccctatggtgctaattctgcag

SEQ ID NO: 13043 - DNA, 1041 bp, Homo sapiens
  SIMILAR (274)..(1038): 881254mologous to Homo sapiens putative p150,accession number U93563,Smith-Waterman Score=1171.
atggacgtgaagccagtagtgtgggaggttatggatgtgaagccaaagaagctcagtaattgtgctaatggtagtgatgagtccatccctctaaattcagaagttgaagactatgttgcaagaaatgctaaaaggatcaacaccatgtggaagctgccaaggcttggggctgaagcaatggcccgagctataccttggccccctttagccatggctggagctgaagcatctgggatgcacagcaccatgtccctaggctacgcaaagcaggaggtgttggaagttctggccagggcaatcaggcaagaaaaagaaataaaggatattgaattaggaaaagaggaagtcaaattgtccctgtttgcagatgacatgattgtatatttagaaaaccccatcatctcagctcacaatctccttaggctgataagcaaattcagcaaactctcaggacacaaaatcaatgtgcaaaaatcacaagcattcttatgcagcaataacagacaaatggagagccaaatcatgagtgaactcccatttgcaattgcttcaaagaaaataaaatacctaggaatccaacttacaagggatgtgaaggacctcttcaaggagaactacaaaacactgctcaacgaaataaaagaggacacaaacaaatggaagaacattccatgctcatggataggaagaatcattatcatgaaaatggccatactgcccaaggtaatttatagattcaatgccatccccatcaagctaccaatgactttcttcacagaattggaaaaaactactttaaagttcatatggaaccaaaaaagagcctgcattgtcaagacaatcctaagccaaaagaacaaagctggaggcatcacgctacctgacttcaaactatactacaaggctacagtcaccaaaacagcatggtactggtaccaaaacagagatatagacaaagggaacagaaaagagccctcagaaataatgctgcatatctacaaatatctgatctttgacaaatctgacagaaacaagcaatga

SEQ ID NO: 13044 - DNA, 1712 bp, Homo sapiens
  SIMILAR (3)..(1082): 941254mologous to Homo sapiens putative p150,accession number U93572,Smith-Waterman Score=1722.
gagacacaaccaaaaaagggaattttagaccaatatccttgatgaacattgatgcaaaaatcctcaataaaatactggcaaaacaaatccagcagcacatcaaaaagcttatccaccatgatcaagtgggcttcatccctgggatgcaaggctggttcaatatacgcaaatcaataaatgtaatccagcatataaacagaaccgaagacaaaaaccacatgattatctcaatagatgcagaaaaggcctttgataaaattcaacaacccttcatgctaaaacctctcaataaattaggtatcgatgggacgtatttcaaaataattagagctatctatgacaaatccacacccaatatcatactgaatgggcaaaaactggaagcattccctttgaaaactggcacaagacagggatgccctctctcaccactcctattcaacatagtgttggaagttctggccagggcaattaggcaggagaaggaaataaagggtattcaattaggaaaagaggaagtcaaattgtccctgtttgcagacgacatgattgtatatctagaaaaccccactgcctcagcccaaaatctccttaagctgataagcaacttcagcaaagtctcaggatacaaaaaaaaaatcaatgtacaaaaatcacaagcattcttatacaccaataacagacaaacagagagccaaatcatgagtaaactcccattcacaattgcttcaaagagaataaaatacctaggaatccaacttacaagggacgtgaaggacctcttcaaggagaactacaaaccactgctcaaggaaataaaagaggatacaaacaaatggaagaacattccatgctcatgggtaggaagaatcaatatcgtgaaaatggccatactgcccaaggtaatttatagattcaatgccatccccatcaagctaccagtgactttcttcacagaattggaaaaaactactttaaagttcatatggaaccaaaaaagagcccgcatagccaagtcaatcctaagccaaaagaacaaagctggaggcatcacactacctgaccagactgaatcccataaactcaggctccaattctgccccagttcccagtcagctcccatggaattaggcttcaggccaatccctgtggactcagggactaggaccatccctgaaccaggcctgaccccatggacccaggcttcaggatggacaccaaagacatgtgcttcaggcttcttcctacagatccagttgacaagtccactctggtggactccagtactaggcttgcaccacaaacccaggattcaggtctacacagaaggcccaagccccaggccagcgcctttagactcagatgccagctctacccacctgctgactcaggcatcagaaagaagaatcaaaactatgaataatcacaccgtgaatagaaaatctaagagagaacattgctgtacaaaagagaaaccaccggaaatacctgatgaacagagggagaagaaaattcagagaagcaagcagatggtgcaaggcgatgaagtttggagtataaatgaatgtcccagtcacgacgttgtaaagcgacggccagtgccaagcttgcatgcctgcaggtcgactctagaggatcccccaaaaactttagctagaatgaccaagaaagaacaaagacacaaactattaaaattaagaataaaaagatga

SEQ ID NO: 13045 - DNA, 1989 bp, Homo sapiens
  SIMILAR (892)..(1320): 931254mologous to Homo sapiens putative p150,accession number U93574,Smith-Waterman Score=694.
atgaaaaacaagcccagtaaaagatgtattcacagctgtattctaccagataccccaagaggaactggtaccattcctactgaaactactccaaaaattgaggagaaaggactcctctccaactcattctatgaggccagcctcaccctgaaactaaaacctgggagagacacaacaagaagaaatgttcaggccaacatttttaggaacattgatgcaaaaagactcaacaaaatgctggcaatcggaatcgagaagcatacccataagctattccacaacaatcaggcaggcttaatcccgtggttagaagtaagtcctggccagaacaatcaggcaagagagaaacataaagggccttcccaaatagaaagagagaaactcaaactatccctgtttgcagatgacatgattctatatttagaaaatcttcatagtgttcacccaaaatctccttcagctgataaacaactgcggcaaagtttcaggatacaagatcaacatcttcaaatcagtagcatccttatacaccaccaacagccaaaccaagagcctaatcaggaacacaatcctattcagaattgccacaaaaagaataaaatttctagaaatatggttaatcagggaaggacaaatgggtatttccagtatacccggtgtaaccacccagagacactccgggcaccaccctcaattgccaggggttgtggtagagtggtgtcagcgattcaagggtgttttttctacctctttagtgcctttttcagtgataaaaagttaaaagcagatattgctttcaatttgatgtttgattcttatgaagctgataagcaacttcagcgaagtctcaggatacaaaagcaatgtacaaaaatcacaagcattcttatacaccaacaacagacagagagccaaatcatgagtgaactcccattcacaattgcttcaaagacaataaaatacctaggaatccaccttacaagggacgtgaaggacctcttcaaggagaactacaaaccactgctcaatgaaataaaagaggatacaaacaaatggaagaacattccatgctcatgggtaggaagaatcaatatcgtgaaaatggtcatactgcccaaggtaatttatagattcaatgccatccccatcaagctaccaatgactttcttcacagaattggaaaaaactactttaaagttcatatggaaccaaaaaagagcccgcattgccaagtcaatcctaagccaaaagaacaaagctggaggcatcacactacctgacttcaaactacactacaaggctacagtaaccaaaacagcatgtttgttaaacagaagggctctccccctggcaaaccggggaagaaaaaaccctgtttttggggggcccccaaaaacggtgccgatatccccagccaaagttggcggccatccggaaacccgggaacaaccccccctctcccgaaaccccccagttttttccctggggcccccagaatggggcaatcccaagcttggggccacaaaggcttttggttcaaaaagggcaagccaaccgaaccccccggaaaaaaggcccgggttaaaaagccccccgggggccaatcccccaaggccattggacccacccgtggcccgggaaaaccaccaaaacccgatatgcgggcccccaagccccccacagattccggtcaccaaacccagaagccctcatgaccggcagacagcgctttcacaccgcacatcaacgtttcacggtccgaccccagaaccaccgctcgctcatccagcgccgaccgtgtcaacgccagcgagtacccaacatccagcgaggagacatcaggtcgctcgtccagataggtcatcaacgccgttgcctgcgcggatagcgcttcgggtgttttgcccgacaccatccacggcaccaccggaacatccacgacagaacccgaacccggccccgcagactgactcggcactcccgggggct

SEQ ID NO: 13046 - DNA, 1736 bp, Homo sapiens
  SIMILAR (1035)..(1733): 941254mologous to Homo sapiens putative p150,accession number U93563,Smith-Waterman Score=1171.
atgatttcacaattcattccagaaaattatttttcaggaaagtccagcgcgacttccgggtgggcgcgggctcagcgcgacttccgggtgggcgcgggctcggcgcgccccgcactcttgagcggtcggctggcgccgccggccctgggcagtgagaggcttagcacccgggccagcagctgcggagggctcccgcgcgccaccccgaggggacgggcgccacctcctgctacgcggcacccggtcccgtcaaccgcccaacggctgaggagtgcggcagcgcgccagagactggcgggcagctccgcccgcggccgggatgcactaggcaaagccagctgggctcctgagtccgtgttggaagttctggccagggcagtcaggcaagagaaagaaataaagggcattctattaggaaaagaggaagtcaaattgtccctgtttgcaggtgatatgattgtatatttagaaaaccccatcatctcagcccaaaatctccttaagctgatgagcaacttcagcaaagtctcaggttacaaaatcagtgtgcaaaaatcacatgcatttgtatacaccaataacagacaatcagagagccaaatcatgagtgaactcccattcacagttgctacaaagagaataaaatacctaggaatccaacttacaagggatgtgaaggacctctttaaggaaaactacaaaccactgctcaacgaaatacaagaggacacaaacaaatggaagaacattccatgctcatgggtaggaagaatcaatatcgtgaaaatggccatactgcccaaggtaatttatagattcaatgccatccccatcaagctaccaatgactttcttcacagaattggaaaaaactaaagttcatatggaatcaaaaaaagagcccatattgccaagacaatcctaagcaaaaagaacaaagctggaggcatcacgctacctgacttcaaactatactacaaggctacagtaaccaaaacagcatggctgcccttcatcctccagagctccaccagggtgatcgtagaccagaagggtccagtccaaaatctccttaagctgataagcaacttcagcaaagtctcaggatacaaaatcaatgtacaaaaatcacaagcattcttatacaccaataacagacaaacagagagccaaatcatgagtaaactcccattcacaattgcttcaaagagaataaaatacctaggaatccaacttacaagggacgtgaaggacctcttcaaggagaactacaaaccactgctcagtgaaataaaagaggatacaaacaaatggaagaacattccatgctcatgggtaggaagaatcaatattgtgaaaatggccatactgcccaaggtaatttatagattcaatgccatccccatcaagctaccaatgactttcttcacagaattggaaaaaactactttaaagttcatatggaaccaaaaaagagcccgcatcgccaagtcaatcctaagccaaaagaacaaagctggaggcatcatgctacgtgacttcaaactatactacaaggctacagtaaccaaaacagcatggtactggtaccaaaacagagatatagatcaatggaatagaacagagccctcagaaataacgccacatatctacaactatctgatctttgacaaacctgagaaaaacaagcaatggggaaaggattccctatttaataaatggtgctgggaaaactga

SEQ ID NO: 13047 - DNA, 1644 bp, Homo sapiens
  SIMILAR (1)..(786): 761254mologous to Homo sapiens putative p150,accession number U93565,Smith-Waterman Score=989.
atggataaattcctcgacacatacactctcccaagactaaaccaggaagaagttgaatctctgaatagaccaataacaggatctgaaattgtggcaataatcaatagcttaccaaccaaaaagagtccaggaccagatggattcacagctgaattctaccagaggtacaaggaggaactggtaccattccttctgaaactattccaatcaatagaaaaagagggaatcctccctaactcattttatgaggccagcatcattctgataccaaagccaggcagagacacaacaaagaaagagaattttagaccaatatccttgatgaacattgatgcaaaaatcctctataaaatactggcaaaacgaatccagcagcacatcaaaaagcttatccaccatgatcaagtgggcttcatccctgggatgcaaggctggttcaatatacgcaaatcaataaatgtaatccagcatataaacagagccaaagacaaaaaccacatgattatctcaatagatgcagaaaaagcctttgacaaaattcaacaacccttcatgctaaaaactctcaataaattagcccaaaatctccttaagctgataagcaacttcaacaaagtctcaggatacaaaatcaatgtacaaaaatcacaagcattcttatacaccagcaacagacaaacagagagccaaatcatgagtgaactcccattcacaattgcttcaaagagaataaaatacctaggaatccaacttacaagggatgtgaaggacctcttcaaggagaactacaaaccactgctcaaggaaataaaagaggatacaaacaaatggaagaacattccatgctcatgggtaggaagaatcaatatcgtgaaaatggccatactgcccaaggtaatttacagattcaatgccatccccatcaagctaccaatgactttcttcacagaattggaaaaaactactttaaagttcatatggaaccaaaaaagagcccacatcgccaagtcaatcctaagccaaaagaacaaagctggaggcatcacactacctgacttcaaactatactacaaggctacagtaaccaaaacagcatgtcttgctagcggtctatcaattttgtccagggcaatcaggcaggagaaagaaacaaaaggtactcaattaggaaaagaggaagtcaaattgtccctgtttgcagacgacatgattgtgtatctaaaaaacccaatcgtctcagcgcaaaatctcctcaagctgataagcaacttcagcaaagtctcaggatacaaaatcaatgtagaaaaatcacaagcattcttatacaccaataacagacaaacagagagccaaatcatgagtgaactcccattcacacttgcttcaaagagaataaaatacctaggaatccaacttacgagtgacgtgaaggacctcttcaaggagaactacaaaccactgctcaaggaaataaaagaggatacaaacaaatggaagaacattccatgctcatgggtaggaagaatcaatatcgtgaaaatggccatactgcccaagcccccagacaaccacttgcatcagtatcacccaaaagaagcagattcctgggccccaacttctaccactgaatcagaacctctatgg

SEQ ID NO: 13048 - DNA, 1560 bp, Homo sapiens
  SIMILAR (1)..(765): 931254mologous to Homo sapiens putative p150,accession number U93563,Smith-Waterman Score=1223.
atgaaggcagaaataaagatgttctttgaaaccagtgagaacaaagacacaatataccagaatctctgggacacattcaaagcagtgtgtagagggaaatttatagcactaaatgcccacaagagaaagcaggaaagatctaaaattgacaccctaacatcacaattagaagaactagagaagcaagagcaaacacattcaaaagctagcagaaggcaagaaataactaaaatcagagcagaactgaaggaaatagagacacaaaaaacccttcaaaaaattaatgaatccaggagctggttttttgaaaagatcaacacaattgatagaccgctaacaagactaataaagaagaaaagagagaagaatcaaatagacgcaataaaaaatgacaaaggggatattaccactgatcccacagaaatacaaactaccatcagagaatactataaacacctatacacaaataaactagaaaatctagaagaaatggataaattccttgacacaaacactctcccaagactaaaccaggaagaagctgaatctctgaatagaccaataacaggagctgaaattgaggcaataattaatagcttaccaaccaaaaaaagtccaggaccagatggattcacagccgaattctaccagaggtacaaggaggagctggtaccattccttctgaaaccattccaatcaatagaaaaagagggaatcctccctaactcattttatgaggccagcatcatcctgataccaaagccagtgttggaagttctggccagggcaatcaggcaggagaaagaaataaagggcattcaattaggaaaagaggaagtcaaattgtccctgtttgcagatgacatgattgtatatctagaaaaccccactgtctcagcccaaaatcttcttaagctgataagcaacttcagcaaagtctcaggatacaaaatcaatgtacaaaaatcacaagcattcttatacaccaataacagacaaacagagagccaaatcatgagtaaactcccattcacaattgcttcaaagagaataaaatacctaggaatccaacttacaagggatgtgaaggacctcttcaaggagaactacaaaccactgctcaatgaaataaaagaggacacaaacaaatgggagaacattccatgctcatgggtaggaagaatcaatatcgtgaaaatgggcatactgcccaaggtaatttatagattcaatgctgtccccatcaagctaccaatgactttctccacagaattggaaaaaactactttcaagttcatatggaaccaaaaaagagcctgcattgccaagtcaatcctaagccaaaagaacaaagctggaggcatcacgctacctgacttcaaactatactataaggctacagtaaccaaaacagcacgaatccaacctgcacctgcagacagagaggatttggacaggactctcatgtctgcttccttaacccaggaagttcaccagtctctgcatgggtttgcactccatgtaccacctcctggaaaccttcttcaagtagtaatatga

SEQ ID NO: 13049 - DNA, 4035 bp, Homo sapiens
  SIMILAR (1)..(2100): 961254mologous to Homo sapiens putative p150,accession number U93565,Smith-Waterman Score=3508.
atggataaattcctcgacacatacactctcccaagactaaaccaggaagaagttgaatctctgaacagatcaataacaggatcagaaattgtggcaatactcaatagtttaccaaccaaaaagagtccaggaccagatggattcacagctgaattctaccagaggtacaaggaggaactggtaccattccttctgaaactattccaatcaatagaaaaagagggaatcctccctaactctttttatgaggccagcatcatcctgataccaaagccgggcagagacacaagcaaaaaagagaattttagaccaatacccttgatgaatattgatgcaaaaatcctcaataaaatactggcaaaacgaatccagcagcacatcaaaaagcttatccaccatgatcaagtgggcttcatccctgggatgcaaggctggttcaatatacgcaaatcaataaatgtaatccagcatacaaacagagccaaagacaaaaaccacatgattatctcaatagatgcagaaaaagcctttgacaaaattcaacaactcttcatgctaaaaactcttaataaattaggtattgatgggatgtatctcaaaataagaagagctatctatgacaaacccacagccaatatcatactgaatgggcaaaaactggaagcattccctttgaaaactggcacaagacagggatgccctctctcaccactcctattcaacatagtgttggaagttctggccagggcaattaggcaggagaaggaaataaagggtattcaattaggaaaagaggaagtcaaattgtccctgtttgcagatgacatgattgtatatctagaaaaccccattgtctcagcccaaaatctccttaagctgataagcaacttcagcaaagtctcaggatacaaaatcaatgtacaaaaatcacaagcattcttatacaccaacaacagacaaacagagagccaaatcatgagtgaactcccattcacacttgcttcaaagagaataaaatacctaggaatccaacttacaagggatgtgaaggacctcttcaaggagaactacaaaccactgctcaacgaaataaaagaggatacaaacaaatggaagaacattccatgctcatgggtaggaagaatcaatatcgtgaaaatggccatactgcccaaggtaatttacagattgaatgccatccccatcaagctaccaatgcctttcttcacagaattggaaaaaactactttaaagttcatatggaaccaaaaaagagcccgcgttgccaagtcaatcctaagccaaaagaacaaagctggaggcatcacactacctgacttcaaactatactacaaggctatagtaaccaaaacagcatggtactggtaccaaaacagagatatagatcaatggaacagaacagagccctcagaaataacgccgcatatcaacaactatctgatctttgacaaacctgacaaaaacaagcaatggggaaaggattctctatttaataaatggtgctgggaaaacgggctagccatatgtagaaagctgaaactggatcccttccttacaccttatacaaaaattaattcaagatggattaaagacttaaacgttagacctaaaaccagaaaaaccctagaagaaaacctaggcattaccattcaggacataggcatgggcaaggacttcatgtctaaaacaccaaaagcaatggcaacaaaagacaaaatagacaaatgggatctaattaaactaaagagcttctgcacagcaaaagaaactaccatcagagtgaacaggcaacctacaaaatgggagaaaattttcgcaacctactcatctgacaaagggctaatatccagaatctacaatgaactcaaacagatttacaagaaaaaaacaaacaaccccatcaaaaagtgggcgaaggacatgaacagacacttctcaaaagaagacatttatgcagccaaaaaacacatgaaaaaatgctcatcatcactggccatcagagaaatgcaaatcaaaaccacaatgagataccatctcacaccagttagaatggcaatcattaaaaagtcaggaaacaacagcactattcacagtagcaaagacatggattcaacccaaatgtgcatcaatgatacactgtatgaagaaagtgtagaacatatacaccatgaaatacaatccagccataaaaaaggagttcacatcctttgcagcaatatggatggagctgaaagccactttcctaagcaaactaatgcaagaacagaaagccaaatactgcatgttctcacttataagtgggagctgaatgatgagaacacatggacacatggttggggcaggcatataaacggaaccaaagacaaaaaccacatgattatctcaatcgatgcagaaaaggcctttgacaaaattcaacaacgcttcatgctaaaaactctcaataaatttggtattgatgggacgtatctcaaaataataagagatgacatgattgtatatctagaaaaccccatcgtctcagcccaaaatctccttaagctgataagcaacttcagcaaagtctcaggatacaaaatcaatgtacaaaaatcacaagcattcttatacacaaataacagacaaacagagagccaaatcatgagtgaactcccattcacaattgcttcaaagaggataaaatacctaggaatccaacttacaagggatgtgaaggacctcttcaaggagaactacaaaccacttctcaatgaaataaaagaggatacaaacaaatggaagaacattccatgctcatgggtaggaagaatcaatatcgtgaaaattgccatactgcccaaggtaatttatagattcaatgccatccccatcaagctaccaatgactttcttcacagaattggaaaaaacttctttaaagttcatatggaaccaaaaaagagccctcatcaccaagtcaatcctaagcctaaagaacaaagctggaggcatcatgctacctgacttcaaactatactacaaggctacagtaaccaaaacagcatggtactggtaccaaaacagagatatagatcaatgcaacagaacagagccctcagaaataacacctcatatctacaactatctgatctgtgacaaacctgagaaaaacaagcaatggggaaaggtttccctatttaataaatggtgctgggaaaactggctagccatatgtagaaagctgaaactggatcccttccttacaccttatacaaaaattaattcaagatggattaaagacttaaatgttagacctaaagccataaaaaccctagaagaaaacctgggcaataccattcaggacataggcatggacaaggacttcatgtctaaaacaccaaaagcaatggcaacaaaagccaaaattgacaaatgggatctaattaaactaaagagcttctgcacagcaaaagaaactaccatcagagtgaacaggcaacctacacaatgggagaaaatttttgcaacctactcatctgacaaagggctaatatccagaatctacaatgcactcagacaaatttacaagaaaaaaacaaacaaccccatcaaaaaggacatggatgaaaccggaaaccaccattctcagcatactatcgcaaggacaaaaaaccaaacaccgcatgttctcactcatggatgggaactgaacaatgagaacacatggacacaggaaggggaacatcacactctggggactgttgtgtggaatcaaaagagccctagtccatcactaatgcagaaacacaagcacaatgctgagggtggaatactcacagagaaacgaccagatagaggttggaaaacaaaagcagccaatgtgactagcatcccttcaaaaactgagagggcatgggggataagacgcaggtggatttcagataatcaaagtcaccctgcatctcctattaagcagcttgaactttatcctgaaggctatgggacccccattaaagctgttaacacaggacagtga

SEQ ID NO: 13050 - DNA, 2686 bp, Homo sapiens
  SIMILAR (996)..(1100): 581254mologous to Homo sapiens ribosomal protein L37,accession number L11567,Smith-Waterman Score=100.
atggtgaagggatcaattcaacaagaggagctaactatcctaaatatttatgcacccaatacaggagcacccagattcataaagcaagtcctgagtgacctacaaagagacttagactcccacacattaataatgggagactttaacaccccactgtcaacattagacagatcaacgagacagaaagtcaacaaggatacccaggaattgaactcagctctgcaccaagcagacctaatagacatcaacagaactctccaccccaaatcaacagagtatacatttttttcagcaccacaccacacctattccaaaattgaccacatagttggaagtaaagctctcctcagcaaatgtaaaagaacagaaattataacaaactatctctcagaccacagtgcaatcaaactagaactcaggattaagaatctcactcaaagccgctcaactccatggaaactgaacaacctgctcctgaatgactactgggtacataacgaaatgaaggcagaaataaagatgttctttgaaaccaacaagaacaaagacaccacataccagaatctctgggacgcattcaaagcagtgtgtagagggaaatttatagcactaaatgcctacaagagaaagcaggaaagatccaaaattgacaccctaacatcacaattaaaagaactagaaaagcaagagcaaacacattcaaaagctagcagaaggcaagaaataacgaaaatcagagcagaactgaaggaaatagagacacaaaaaacccttcaaaaaatcaatgaatccaggagctggttttttgaaaggatcaacaaaattgatagaccgctagcaagactaataaagaaaaaaagagagaagaatcaaatagacacaataaaaaatgataaaggggatatcaccaccgatcccacagaaatacaaactaccatcagagaatactacaaacacctctacgcaaataaactagaaaatctagaagaaatggatacattcctcgacacatacactctcccaagactaaaccaggaagaagttgaatctctgaatagaccaataacaggctctgaaattgtggcaataatcaatagtttaccaaccaaaaagagtccaggaccagatggattcacagccgaattctaccagagagctatctatgacaaacccacagccaatatcatactgaatgggcaaaaactggaagcattccctttgaaaactggcacaagacagggatgccctctctcaccgctcctattcaacatagtgttggaagttctggccagggcaatcaggcaggagaaggaaataaagggtattcaattaggaaaagaggaagtcaaattgtccctgtttgcagatgacatgattgtttatctagaaaaccccatcgtctcagcccaaaatctccttaagctgataagcaacttcagcaaagtctcaggatacaaaatcaatgtacaaaaatcacaagcattcttatacaccaaaaacagacaaacagagagccaactcatgagtgaactcccattcacaattgcttcaaagagaataaaatacctaggaatccaacttacaagggatgtgaaggacctcttcaaggagaactacaaaccactgctcaacgaaataaaagaggacacaaacaaatggaagaacattccatgctcatgggtaggaagaatcaatatcgtgaaaatggccatacttgcccaaggtaatttacagattcaatgccatccccatcaagctaccaatgactttcttcacagaattggaaaaaactactttaaagttcatatggaaccaaaaaagagcccgcatcgccaagtcaatcctaagccaaaagaacaaagctggaggcatcacactacctgacttcaaactatactacaaggctacagtaaccaaaacagcatggtactggtaccaaaacagagatatagaccaatggaacagaactgagccctcagaaataataccacacatctacaaccatctgatctttgacaaacctgagaaaaacaagcaatggggaaaggattccctatttaataaatggtgctgggaaaactggctagccatatgtagaaggctgaaactggatcccttccttacaccttatacaaaaatcaattcaagatggattaaagatttaaacgttagacctaaaaccataaaaaccctagaagaaaacctaggcattaccattcaggacataggcgtgggcaaggacttcatgtccaaaacaccaaaagcaatggcaacaaaagccaaaattgacaaatgggatctaattaaactcaagagcttctgcacagcaaaagaaactaccatcagagtgaacaggcaacctacaacatgggagaaaattttcgcaacctactcatctgacaaaggtctaatatccagaatctacaatgaactcaaacaaatttacaagaaaaaaacaaacaaccccatcaaaaagtgggcgaaggacatgaacagacacttctcaaaagaagacatttatgcagccaaaaaacacatgaagaaatgctcatcatcactggccatcagagaaatgcaaatcaaaaccactatgagatatcatctcacaccagttagaatggcaatcattaaaaagtcaggaaacaacagggacatggatgaaattggaaaccatcattctcagtaa

SEQ ID NO: 13051 - DNA, 1152 bp, Homo sapiens
  SIMILAR (139)..(546): 531254mologous to Feline leukemia virus gag-pol precursor polyprotein gPr80,accession number AF052723,Smith-Waterman Score= 356.
atgactaaagaaagatactcgatactccaagctattatggaaaaagcaggacaaaatggttggcatgtcagcgctatatgtgtggaaaattttaatgatgtcagctataggcaacttctagaagaacttgacagaagacaagagaagaagtttgtaatagactgtgagatagagagacttcaaaacatattagaacagatgcagaaaaggcctttgaccaaaattcaacagcccttcatgctaaaacctctcaataaactaggtattgatgggacgtatctcaaaataataagagctatttatgacaaactcacagccaatatcatactgaatgggcaaaaactggaagcattccctttgaaaactggcacaagacaggggtgccctctctcaccactcctattcaacatagtgttggaagttctggccagggtaatcaggcaggagaagaaaataaagggtattcaattaagaaaagaggaagtcaaattgtccctgtttgcagatgacatgattgtatatttagaaaaccccatcatctcaggccaaaatctccttaagctgataagcaacttcagcaaagtctcaggatacaaaatcaacgtccaaaaatcacaagcattcctatacaccaataacagacaaacagagagccaaatcatgagtgaactcccattcacaattgcttcaaagagaataaaatacctaggaatccaacttacaagggatgtgaaggacttcttcacggagaactacaaaccactgctcaacgaaataaaagaggacacaaacaaatggaagaacattccatgctcatggataggaagaattaacatcatgaaaatggccatactgcccaaggtgatttatagattcaatgccatccccatcaagctaccaatgacttccttcacagaattggaaaaaactactttaaagttcatgtggagccaaaaaagagcccgtattgccaagacaatcctaagtcaaaagaacaaagctggaggcatcatgctacctgacttcaaactatcctacaaggccacagtaaccaaaacagcatggtactgttaccaaaacagatatagatcaatggaacagaacagagccctcagaaataataccacacatctacaaccatctgatctttga

SEQ ID NO: 13052 - DNA, 845 bp, Homo sapiens; identical to SEQ ID NO: 3286
  SIMILAR (127)..(309): 761254mologous to Homo sapiens Human secreted protein, SEQ ID NO: 7284,accession number G03203,Smith-Waterman Score=252.

SEQ ID NO: 13053 - DNA, 2113 bp, Homo sapiens
  SIMILAR (130)..(1662): 761254mologous to Homo sapiens cofactor E,accession number U61232,Smith-Waterman Score=1863.
atggaggaaaagattcatgacactggtctgagcaatgatttcttggatgcagcaccaaaacacagcataaatggttgtatcctggaaaatctagagtataagcttccctctgggggcattcgtgtacttgaagcaataactagcccaatgccagacgtcctttctgtttggccaatcgacagcactggaaggagatcaaagggtagaaggagagattcaggtatctgttcccctggtcacttccctgctgggctatggcttggcactggctgggatcctttacctaaggcacagccatcacctggtcctgctaactgcttcccccaatccctgacccttcctgctgtcattgtctttcggcctccgctgctgatacccaggcaaacagggtctggagtggacctctggcaaactccaacggacctgcagctgagggtcctgactgttagaaggaaacctaacaaacagaaaggacatccacaccaaaaccccatctgtacgtcaccatcaccaaagaccaaagcgttggaagttctggtcagggcaatcaggcaggagaaggaaatacagggtattcaattaggaaaagaggaagtcaaattgtctctgtttgcagatgacatgattgtatatctagaaaaccccatggtctcagcccaaaatctccttaagctgataagcaacttcagcaaagtctcaggatacaaaatcaatgtgcaaaaatcacaagcactcctatacaccaataacagacaaacagagagccaaatcatgagtgaactaccattcacaattgtttcaaagagaataaaatacctaggaatccaacttaaaaggaacgtgaaggacctcttcaaggagaactacaaaccactgctcaatgaaataaaagaggacacaaacaaatggaagaacattccatgctcatgggtaggaagaatcaatattgtgaaaatggtcatactgcccaaggtaagttatagattcaatgccacccccatcaagctaccaatgactttcttcacagaattggaaaaacactactttaaaattcatatggaaccaaaaaagagcccgcatcgccaagtcaatcctaagccaaaagaacaaagctggaggcatcacgctacctgacttcaaactatactacaaggctacagtaaccaaaacagcatggtactggtaccaaaacacagatatagaccaatggaacagaacagagccctcagaaataatgctgcatatctacaactatctgatctttgacaaacctgagaaaaacaagcaatggggaaaggattccctatttaatatatggtgctgggaaaactggctagccatatgtagaaagctgaaactggatcccttccttacaccttatacaaaaattaattcaagatggattaaagacttaaatgttagatctaaaaccataaaaaccctagaagaaaacctaggcaataccattcaggacataggcatgggcaaggacttcatgtctaaaacaccaaaagcaatggcaacaaaagccaaaattgacaaatgggatctaattaaactaaagagcttctgcacagcaaaagagactaccatcagcgtgaacaggcaacctacagaatgggagaaaatttttgcaatctactcatctgacaaagggctaatatccagaatctacaatgaactcaaacaaatttacaagaaaaaaacaaacaaccccatcaaaaagtgggtgaaggatacgaacagacacttctcaaaagaagacatttatgcagccaaaagacacatgacaaaatgctcatcatcactggctgttagagaaatgcaaatcaaaaccacaatgagataccatctcacaccagttgaagaggtgagggcgggtgagatggccaagacaagaagatgccaaaatgtcaaaggtgccagtgaggaaggcatcagagctcttgctttgtttctcattaacctcactgtccatatggagggcaaccacattgatggagacattgaaattcaaaccaatagaagtcccttgcaagcccctggagaaatctgtgagtcttttactgctttgatggcaatgcaactgctcagtaaattgttttggagttga

SEQ ID NO: 13054 - DNA, 1023 bp, Homo sapiens
  SIMILAR (520)..(1119): 301254mologous to Arabidopsis thaliana T7N9.18,accession number AC000348,Smith-Waterman Score=242.
atgcttattatggacgaggaacagaacagaggtcagtatagttggaatagagtgactgaaaggaaagggtggttggaagccagggctccaccgggtgaatcatctctaatcatgaacaagttaaaatgccctcattgtagctatgtagccaaatacagacgaacactaaaaaggcacttgctcattcacacaggagtgagatcatttagctgtgatatttgtggaaaactgtttactcgaagagaacatgtaaaaagacattccctggtgcataaaaaggataaaaaatacaaatgtatggtgtgtaagaagatcttcatgttagcagccagtgttggaataagacatggatctcgacgttatggtgtttgtgtagactgtgcagataaatcacagccaggagggcaagaaggtgtagatcagggacaggatacagaattccctcgggatgaagaatacgaggagaatgaagtaggagaagctgatgaagagctagttgatgatggagaagatcagaatgatccctctcgatgggatgaatcaggagaagtttacagccaaatcatgagtgaactcccattcacaattgctttaaagagaataaaatacctaggaatccaacttacaagggatgtgaaggacctcttcaaggagaactacaaaccactgctcaacgaaataaaagaagacacaaacaaatgggagaacattccatgctcatggataggaagaatcaatatcgtgaaaatggccatactgcccaagaattggaaaaaactaaagttcatatggaaccaaaaaagagcccgcgttgccaagacaatcctcagccaaaagaacaaagctggaggcaccacgctacctgacttcaaactatactacaaggctacagtaaccaaaacagcatggtactggtaccaaaacagagatatagaccaatggaacagaacagagccctcagaaataataccacacatctacaaccatctgatctttgacaaacctgacaaaaacaagaaatga

SEQ ID NO: 13055 - DNA, 2011 bp, Homo sapiens
  SIMILAR (1166)..(1906): 891254mologous to Homo sapiens putative p150,accession number U93563,Smith-Waterman Score=1149.
ttatgagtcctttgtcagatggttagttcgcaaatattttctcccattctgtgagctgtgtcttcgctttgttgtttctttcgtgcgcagaagtgtttggacttgatgtgatcctgttttacgtttctgctttgtttgccttgaattgtagtgcccataatgcccacatgtcatggaagagacgctgtgagaggtaattgaatcatggggtgaatcccccatgctattcttgtaatagtaaggtctcaggagatccgatggttttattaaggacctttccactcccagctgttcccaatcttctccttccttgccagccagtgagacgggcaacagctgagtgcccttcaccgcgctgccctgagagagttgcagcaagcggtccacgctgtttgcaccagcaggcgaaaatcctgtttgatggtggtccgaaatcggcaagtccttatagatcaaaggatagcccgagatagggttgagtgttgttccagttggacgagagtcacagtaacatgctgttttggttactgtagccttgtagtatagtttgaagtcgggtagtgtgatgcttccacctttgttcttttgcttaggattgacttggcaatgcgggctctcttttggttccatatgaactttaaagtagtttttttccaattcttgggcagtatggccattttcacgatattgattcttcctatccacgagcatggaaagttcttccatttgtttgtgtcctcttttatttcgttgagcagttgtttgtagttctccttgaagaggtccttcacatcccttgtaagttggattcctaggtattctattctctttgaagcatttggaaaacactctacaggatattatccaggagaacttccccaacctagcaaagcaagccaacattcaaattcaggaaacacagagaacaccacaaagttactcctcaagaagagcaactccaagacacataattgtcagattcaccaaagttgaaatgaaggaaaaaatgttaagactaaaccacgaagaacttgaatccctgaatagaccaataacaggttctgaaattcaggcaattattaatagcctaccaaccaaaaaaagtccagaatcagatggattcacagccaaattctaccagagccaatatcatactgaatgggcaaaaactggaagcattccctttgaaaaccggcacaaaacaggatgccctctctcaccactactattcaacatagtggtggatgttccggctagggcaatcaggcaggagaaagaaataaagggtattcaattaggaaaagaggaagccaaattgtccctgtttgcagatgacatgaatgtatatttaaaaatccccatcgtctcagtccaaaatctccttaagctgataagcaacttcagcaaagtctcaggatacaaaatcaatgtgcaaaaatcacaagcattcctatacactaataacagacaaacagagagccaaatcatgagtgaactcccattcacaattgcttcaaagagaataaaatacctaggaatccaacttacaagggatgtgaaggacctcttcaaggagaactacaaaccactgctcaacgaaataaaagaggacacaaacaaatggaagaacattccatgctcatggataggaagaatcaatatcatgaaaatggccatactgcccaaggtaatttatagattcaatgccatccccatcaagctaccaatgactttcttcacagaattggagaaaactgctttaaagttcatatggaaccaaaaaagagcctgcattgccaagacaatcctaagccaaaagaacaaagctggaggtatcacactacctgacttcaaactgtactacaaggctacagtagccaaaacagcatggtactggtaccaaaacagcatggtactggtaccaaaacagagatatagaccagtggaacagaatagagcccttggaaataataccatacacctacaaccatctgatcttcgaaaaacctga

SEQ ID NO: 13056 - DNA, 1944 bp, Homo sapiens
  SIMILAR (1008)..(187): 751254mologous to Escherichia coli RhsD protein,accession number X60999,Smith-Waterman Score=1033.
atgaaggcagaaataaaaatgttctttgaaaccaacgagaacaaagacacaacataccagaatctctgggacgcattcaaagcagtgtgtagagggaaatttatagcactaaatgcccacaagagaaagcaggaaagatccaaaattgacaacctaacatcacaattaaaagaactagaaaagcaagagcaaacacattcaaaagctagcagaaggcaagaaataactaaaatcagagcagaactgaaggaaatagagacacaaaaaacccttcaaaaaatcaatgaatccaggagctggttttttgaaaggatcaacaaaattgatagaccgctagcaagactaataaagaaaaaaagagagaagaatcaaatagacacaataaaaaatgataaatgggatatcaccaccgatcccacagaaatacaaactaccatcagagaatactacaaacacctctacgcaaataaactagaaaatctagaagaaatggataaattcctcgacacatacactctcccaagactaaaccaggaagaagttgaatctctgaatagaccaataacaggatctgaaattgtggcaataatcaatagcttaccaaccaaaaagagtccaggaccagatggattcacagccgaattctaccagaggtacaaggaggaactggtaccattccttctgaaactattccaatcaataggaaaagagggaatcctccctaactcattttatgaggccagcatcattctgataccaaagccaggcagagacacaaccaaaaaagcaaattttagaccaatatccttgatgaacattgatgcaaaaatcctcaataaaatactggcaaaacgaatccagcagcacatcaaaaagcttatccaccatgatcaacatataaacaaagccaaagacaaaaaccacatgattatctcaatagatgcagaaaaagcctttgacaaaattcaacaacccttcatgctaaaaactctcaataaattaggtattgatgggacgtatttcaaaataataagagctatctatgacaaacccacagccaatatcatactgaatgggcaaaaactggaagcattccctttgaaaactggcacaagacagggatgccctctctcaccactcctattcaacatagtgttggaagttctggccagggcaattaggcaggagaaggaaataaagggtattcaattaggaaaagaggaagtcaaattgtccctgtttgcagatgacatgattgtatatctagaaaaccccattgtctcagcccaaaatctccttaagctgataagcaacttcagcaaagtctcaggatacaaaatcaatgtacaaaaatcacaagcattcttatacaccaacaacagacaaacagagagccaaatcatgagtgaactcccattcacaattgcttcaaagagaataaaatacctaggaatccaacttacaagggatgtgaaggacctcttcaaggagaactacaaaccactgctcaaggaaataaaagaggatacaaacaaatggaagaacattccatgctcatgggtaggaagaatcaatatcgtgaaaatggccatactgcccaaggtaatttacagattcaatgccatccccatcaagctaccaatgactttcttcacagaattggaaaaaactagttgtggatctctcaccgaaaagccgcatgcaggattttgccgatttcggaaccaccatcaaacaggattttcgcctgctggggcaaaccagcgtggaccgcttgctgcaactctctcagggccaggcggtgaagggcaatcagctgttgcccgtctcactggtgaaaagaaaaaccaccctggcgcccaatacgcaaaccgcctctccccgcgcgttggccgattcattaatgcagctggcacgacaggtttcccgactggaaagcgggca

SEQ ID NO: 13057 - DNA, 2155 bp, Homo sapiens
  SIMILAR (120)..(1): 721254mologous to Homo sapiens Human secreted protein, SEQ ID NO: 7420,accession number G03339,Smith-Waterman Score=136.
atgaaggcagaaataaagatgttctttgaaaccaacaagaacaaagacacaacataccagaatctctgggacgcattcaaagcagtgtgtagagggaaatttatagcactaaatgcccacaagagaaagcaggaaagatccaaaattgacaccctaacatcacaattaaaagaactagaaaagcaagagcaaacacattcaaaagctagcagaaggcaagaaataactaaaatcagagcagaactgaaggaaatagagacacaaaaaacccttcaaaaaattaatgaatccaggagctggttttttgaaaggatcaacaaaatagatagaccactagcaagactactaaagaaaaaaagagagaagaatcaaatagacgcaataaaaaatgataaaggggatatcaccaccgatcccacagaaatacaaactaccatcagagaatactacaaacacctctacgcaaataaactagaaaatctagaagaaatggataaattcctcgacacatacactctcccaagactaaaccaggaagaagttgaatctctgaatagaccaataacaggagctgaaattgtggcaataatcaatagcttaccaaccaaaaagagtccaggaccagatggattcacagccgaattctaccagaggtacaaggagaagctgatagtgttggaagttctggccagggcaatcaggcaggagaaagaaataaagggtattcaattaggaaaagaggaactcaaattgtccctgtttgcagatgacatgattgtatatctagaaaaccccatcgtctcagcccaaaatctcctcaagctgataagcaacttcagcaaagtctcaggatacaaaatcaatgtgcaaaaatcacaagcattcttatacagtaataacagacaaacagagagccaaatcatgagtgaactcccattcacaattgcttcaaagagaataaaatacctaggaatccaacttacaagggatgtgaaggacctcttcaaggagaactacaaaccactgctcaatgaagttaaagaggatacaaacaaatggaagaacattccatgctcatggataggaagaatcaatattgtgaaaatggccatactgcccaaggtaatttacagattcaatgccatccccatcaagctaccaatgactttcttcacagaattggaaaaaaactacttaaaagttcatatggaaccaaaaaagagcccgcatcgccaagtgaatcctaagccaaaagaacaaagctggaggcatcacactacctgacttcaaactatactacaaggctacagtaaccaaaacagcatggtactggtaccaaaacagagatatagatcaatggaacagaacagagccctcagaaataacgccgcatacctacaactatctgatctttgacaaacctgagaaaaacaagcaatggggaaaggattccctatttaataaatggtgctgggaaaactggctagccatatgtagaaagctgaaactggatcccttccttacaccttatacaaaaatcaattcaagatggattaaagatttaaatgttagacctaaaaccataaaaaccctagaagaaaacctaggcattaccattcaggacataggcgtgggcaaggacttcatgtccaaaacaccaaaagcaatggcaaccaaagccaaaattgacaaatgggatctaattaaactaaagagcttctgcacagcaaaagaaactaccatcagagtgaacaggcaacctacaacatgggagaaaattttcgcaacctactcatctgacaaagggctaatatccagaatctacaatgaactcaaacaaatttacaagaaaaaagcaagaagccccgtccctaggggagaggggagagcgccacataaagagagcaccccatgggataaaagaatctcaacagcagcgctggagtcccagatcttccctctgacacagtctacccacatgagaaggaacgagaaaaacatttctggtaatgtgacaaaacgagattctttaacacccccaaaagatcacactagttcaccagcaatggatccaaaccaagacaaaatctctgaatcgtcagaaaaagaattcagaatgtcaactattaagctaatcaagaaggcaccagaaaaa

SEQ ID NO: 13058 - DNA, 3314 bp, Homo sapiens
  SIMILAR (3)..(716): 971254mologous to Escherichia coli put. mal G protein (aa 1- 296),accession number X02871,Smith-Waterman Score=1183.
atggtaaagggatcaattcaacaagaggagctaactatcctaaacatttatgcacccaatacaggagcacccagattcataaagcaagtcctgagtgacctacaaagagacttagactcccacacattaataatgggagactttaacaccccactgtcaacattagacagatcaacgagacagaaagtcaacaaggatacccaggaattgaactcagctctgcaccaagcagacctaatagacatctacagaactctccaccccaaatcaacagaatatacatttttttcagcaccacaccacacctattccaaaattgaccacatagttggaagtaaagctctcctcagcaaatgtaaaagaacagaaattataacaaactatctctcagaccacagtgcaatcaaactagaactcaggattaagaatctcactcaaagccgctcaactacatggaaactgaacaacctgctcctgaatgactactgggtacataacgaaatgaaggcagaaataaagatgttctttgaaaccaacgagaacaaagacaccacataccagaatctctgggacgcattcaaagcagtgtgtagagggaaatttatagcactaaatgcctacaagagaaagcaggaaagatccaaaattgacaccctaacatcacaattaaaagaactagaaaagcaagagatcaacaaaattgatagaccgctagcaagactaataaagaaaaaaagagagaagaatcaaatagacacaataaaaaatgataaaggggatatcaccaccgatcccacagaaatacaaactaccatcagagaatactacaaacacctctacacaaataaactagaaaatctagaagaaatggatacattcctcgacacatacactctcccaagactaaaccaggaagaagttgaatctctgaatagaccaataacaggatctgaaattgtggcaataatcaatagtttaccaaccaaaaagagtccaggaccagatggattcacagccgaattctaccagaggtacaaggaggaactggtaccattccttctgaaactattccaatcaatagaaaaagagggaatcctccctaactcattttatgaggccagcatcattctgataccaaagccgggcagagacacaaccgaaaaagagaattttagaccaatatccttgatgaacattgatgcaaaaatcctcaataaaatactggcaaaccgaatccagcagcacatcaaaaagcttatccaccatgatcaagtgggcttcatccctgggatgcaaggctggttcaatatacgcaaatcaataaatgtaatccagcatataaacagagccaaagacaaaaaccacatgattatctcaatagatgcagaaaaagcctttgacaaaattcaacaacccttcatgctaaaaactctcaataaattaggtattgatgggatgtatttcaaaataataagagctatctatgacaaacccacagccaatatcatactgaatgggcaaaaactggaagcattccctttgaaaactggcacaacacagggatgccctctctcaccgctcctattcaacatagtgttggaagttctggccagggcaatcaggcaggagaaggaaataaagggtattcaattaggaaaagaggaagtcaaattgtccctgtttgcagacgacatgattgtttatctagaaaaccccatcgtctcagcccaaaatctccttaagctgataagcaacttcagcaaagtctcaggatacaaaatcaatgtacaaaaatcacaagcattcttatacaccaacaacagacaaacagagagccaaatcatgagtgaactcccattcacaattgcttcaaagacaataaaatacctaggaatccaacttacaagggatgtgaaggacctcttcaaggagaactacaaaccactgctcaaggaaataaaagaggacacaaacaaatggaagaacattccatgctcatgggtaggaagaatcaatatcgtgaaaatggccatactgcccaaggtaatttacagattcaatgccatccccatcaagctaccaatgactttcttcacagaattggaaaaaactactttaaagttcatatggaaccaaaaaagagcccgcatcgccaagtcaatcctaagccaaaagaacaaagctggaggcatcacactacctgacttcaaactatactacaaggctacagtaaccaaaacagcatcggtactggtaccaaaacagagatatagatcaatggaacagaacagagccctcagaaataatgccgcatatctacactattctgatcctttggacaaacctgagaaaaacaagcatgggggaaaggcatccctaatttataaaatggctgctggggaaaactggctagcccatatgtaggaagctgaaactggatcccttccttacaccttatacaaaaatcaatccaagatggattaaagatttaaacgttagacctaaaaccataaaaaccctagaagaaaacctaggcattacctttcaggacataggcgtgggcaaggacttcatgtccaaaacaccaaaagcaatggcaacaaaagccaaaattgacaaatgggatctaattaaactaaagagcttctgcacagcaaaagaaactaccatgagagtgaacaggcaacctacaacatgggagaaaattttcgcaacctacgcatctgacaaagggctaatatccagaatctacaatgaactcaaacaaatttacaagaaaaaaacaaacaaccccatcaaaaagtgggcgaaggacatgaacagacacttctcaaaagaagacatttatgcagccaaaaaacacatgaagaaatgctcatcatcactggccatcagagacaatgcaaatcaaaaccactatgagatatcatctcacaccagttagaatggcaatcattaaaaagtcaggaaacaacagaatcagaaggcatttccagccaagatcagccatgttcttctgctgctgccctgggggcgagggctcagggctgcagtgggagctgctgctggcagcatggactgtgctcccctacccctgccctgcagccacagttgggagattcctcaagcaggcacagactgctgaccattccttcctgggccatgtttggagggtgcccagcagcaggagctggactgataaagaaatcctgagcttggtcgtcaacagacagaaccaggaagttgtgcagctcatagggggcctctgtgggacacacaccatctcgcccacacagcacccagccacgggttga

SEQ ID NO: 13059 - DNA, 2697 bp, Homo sapiens
  SIMILAR (469)..(627): 961254mologous to Escherichia coli put. mal G protein (aa 1- 296),accession number X02871,Smith-Waterman Score=259.
atgccgatggtagaggagctttacggcaactatggcatcatggccgataccacggagcgagtgggccagcataaagatgcctatcaagtgatactggatggtgtgaaaggtggtactaaggaaaaacgattagcagctcaatttattctgaaattctttaagcattttacagaattggctgattctgctatcaatgcacacttacagacagtaagtggaagacagcaacttgtaaagttggtggctgaacaggccgacctagaacagaccttcaatccctcagatcctgagtgtgtgggcaggctcttacagtgcactcagcaggcagtacccttcttctctaaaactgtccattccacaaggtctgtgacatatttctgtgagcaggttctccctaaccttggtatcttgactaccgcagtggaaggtcttgacatacagttggaggtattgaaattgttggtggagatgagttcattttgtggtgacatggaaaaactagaaacaaatttagggaaactatttgataagttattggaatacatgcccctccctccagaagaagcagaaaatggagggaatgctggtgatgaagaacccaaactacagttcagttatgtggaatgtttgttgtacagttttcaccagttgggccaaaaacttccagatttcttaacagccaaactgaatgcagaaaaactcaaagatttcaaaatcaggctgcaatactttgcacgaggcctgcaagtttatatcagacaacttcacttagctctccaggtgaaacagcatataaacagagccaaagacaaaaaccacatgattatctcaatagatgcagaaaaagcctttgacaaaattcaacaacccttcatgctaaaaactctcaataaattaggtattgatgggacgtatttcaaaataataagagctatctatgacaaacccacagccaatatcatactgaatgggcaaaaactggaagcattccctttgaaaactggcacaagacagggatgccctctctcaccgctcctattcaacatagtgttggaagttctggccagggcaatcaggcaggagaaggaaataaagggtattcaattaggaaaagaggaagtcaaattgtccctgtttgcagatgacatgattgtttatctagaaaaccccatcgtctcagcccaaaatctccttaagctgataagcaacttcagcaaagtctcaggatacaaaatcaatgtacaaaaatcacaagcattcttatacaccaacaacagacaaacagagagccaaatcatgggtaaactcccattcacaattgcttcaaagagaataaaatacctaggaatccaacttacaagggatgtgaaggacctcttcaaggagaactacaaaccactgctcaacgaaatgaaagaggacacaaacaaatggaagaacattccatgctcatggataggaataatcaatatcgtgaaaatggtcatactgcccaagaattggaaaaaaactactttaaagttcatatggaaccacaaaagagcctgcattgccaagtcaatcctaagccaaaggaacaaagctggaggtatcacgctacctgacttcgaactatactacaaggctacagtaaccaaaacagcatggtactggtaccaaaacagagatatagatcaatggaacagaacagaaccctcagaaataacaccacacatctacaaccatatgatctttgataaacctgacaaaaacaagaaatggggaaacgattccctatttgacaaatggtgctgggaaaactggttagccatatgtagaaagctgaaactggatcccttccttacaccttatacaaaaattaattcaagatggattaaagacttaaatgttagacctaaaaccataaaaaccctagaagaaagcctaggcaataccattcaggacataggcataggcaaggacttcatgtctaaaacatcaaaagccatgacaacaaaagccaaaattgacaaatgggatctaattaaactaaagagcttctgcacagcaaaagaaactaccatcagagtgaacaggcaacctacagaatgggagaacatttttgcaatctactcatctgacaaaggactaatatccagaatctacaaagagctcaaacaaatttacaagaaaaaaacaaccccatcaaaagcccaaaatctccttaagctgataagcaacttcagcaaagtctcaggatacaaaatcaatgtacaaaaatcacaagcattcttatacaccaataacagacaaacagagagccaaatcatgagtgaactcccattcacaattgcttcaaagagaataaaatacctaggaatccaacttacaagggatgtgaaggacctcttcaaggagaactacaaaccactgctcaaggaaataaaagaggatacaaacaaatggaagaacattccatgctcatgggtaggaagaatcaatatcgtgaaaatggccatactgcccaagaagaagaagaagaagaagaagaagaaggagaaggagaagaagggaggagaaggagggaaaagagagggaggagggagagaggaggggggaggaggaggaggagaaggagaagaaggagaaggaggagaaggaggaggaaggaaggaggaagaagaaggaaggaagaaggaagaaagaagaagaaaataa

SEQ ID NO: 13060 - DNA, 2962 bp, Homo sapiens
  SIMILAR (3880)..(4452): 821254mologous to Escherichia coli Pyruvate-flavodoxin oxidoreductase (EC 1.-.-.-),accession number D90775,Smith-Waterman Score=773.
atggatacattcctcgacacatacactctcccaagactaaaccaggaagaagttgaatctctgaatagaccaataacaggctctgaaattgtggcaataatcaatagtttaccaaccaaaaagagtccagcaccagatggattcacagccgaattctaccagaggtacaaggaggaactggtaccattccttctgaaactattccaatcaatagaaaaagagggaatcctccctaactcattttatgaggccagcatcattctgataccaaagccgggcagagacacaaccaaaaaagagaattttagaccaatatccttgatgaacattgatgcaaaaatcctcaataaaatactggcaaaccgaatccagcagcacatcaaaaagcttatccaccatgatcaagtcagcttcatccctgggatgcaaggctggttcaatatacgcaaatcaataaatgtaatccagcatataaacagagccaaagacaaaaaccacatgattatctcaatagatgcagaaaaagcctttgacaaaattcaacaacccttcatgctaaaaactctcaataaattagatattgatgggttggaagttctggccagggcaatcaggcaggagaaggaaataaagggcattcaatcaggaaaagaggaagtcaaattgtccctgtttgcagatgacatgattgcatatctagaaaaccccatcgtctcagcccaaaatctccttaagctgataagcaacttcaacaaagtctcaggatacaaaatcaatgtgcaaaaatcacaagcattcttatgcaccaataacagacaaacagaaagccaaatcatgagtgaactcccattcacaattgcttcaaagagaataaaatacctaggaatccaacttacaagggatgtgaaggacctcttcaaggagagctacaaaccactgctcaatgaaataaaagaggatacaaacaaatggaagaacattccatgctcatgggtaggaagaatcaatatcgtgaaaatggccatactgcccaaggtaatttatagattcaatgccatccccatcaagctaccaatgactttcttcacagaattggaaaaaactaccttaaagttcatatggaaccaaaaaaagagcccacattgccaagacaatcctaagccaaaagaacaaagctggaggcatcacactacctgacttcaaactatactacaaggctacagtaaccaaaacagcatggtactggtaccaaaacagagatatagatcaatggaacagaacagagccctcagaaataatgccgcatatctacaaccatctgatctttgacaaacctgagaaaaacaagcaatggggaaaggattccctatttaataaatggtgctgggaaaactggctagccatatgtagaaagctcaaactggatcccttccttacaccttatacaaaaatcaattcaagatggattaaagacttaaacgttcgacctaaaaccataaaaaccctagaagaaaacctaggcaatatcattcaggacataggcatgggcaaggacttcatgtctaaaacaccaaaagcaatggcaacaaaagccaaagttgacaaatgggatctaattaaactaaagagcttctgcacagcaaaagaaactaccatcagagtgaacaggcaacctacaacatgggagaaaattttcgcaacctactcatctgacaaagggctaatatccagaatctacaatgaactcaaacaaatttacaaaaaaaacaacaacaacaacaacaacatcaaaaagtgggcaaaggatatgtacagacacttctcaaaagaaggcatttatgcagccaatcgacatatgaaaacatgctcatcatcactggtcatcagagaaatgcaaatcaaaaccacaatgagataccatctcacaccagttagaatggagatcattaaaaagtcaggacacaacaggcaaacagggtctggagtggacctccagcaaactccaacagacctgcagctgacggtcttcactgttagaaggaaaatcaacaaacagaaaggacatccacaccaaaacaccatcgtgttggatgttctagccagggcaatcaggcaggagaaagaaataaagcgtattcaattaggaaaagagggagtcaaattgtccctgtttgcagatgacatgattgtatatttagaaaaccccatcatcccagcccaaagtctctttaagctgataagcaacttcagcaaagtctcaggatacaaaatcaatgtgcaaaaatcacaggcatttttatacagcaacaacagacaaacagagagccaaatcataagtgaactctcaatcacaatttcttcacagagaataaaatacttaggaatccaacttacaagggatgtgaaggacttcttcaaggagaattacaaaccactgctcaacgaaataaaagaggatacaaacaaatggaggaacattccatgctcatggataggaagaatcaatatcatgaaaatggtcatactgcccaaggtaatttatagattcaatgccatccccatcaagctaccaatgactttctccacagaattggaaaaaactactttaaagttcacatggaaccaaaaaaaagcctgcattgccaagacaatcctaagccacaagaacaaagctggaggcatcatgctacctgacttcaaactatactacaaggctacagtaaccaaaacagcatggtactggtaccaaaacagagatatagaccaatggaacagaacagagccctcagaaatcatatcacacatctactaccacctgatctttgacaaatctgacaaaaacaagaaatggggaaaggattccctatttttaaaaagctgctgggaaaactggctagtcatatgcagaaagctgaaactggatcccttccttacaccttatacaaaaattaattcaagatga

SEQ ID NO: 13061 - DNA, 8214 bp, Homo sapiens
  SIMILAR (351)..(4): 1001254mologous to Escherichia coli phnB protein,accession number J05260,Smith-Waterman Score=619.
ttaggtgtaggggcttcggtggagccggggagtttcggatattacaggtgccggtggtctgttgacgggggttggggcccatggaggaggggtccgcgaaggggacacgaagtaggagcgacgagaggcagcgtagaagtgggggtgtaactgaatagttgtggagtaaccatgtaccagaaccgtgcccaaacgagccagtttaccgtagctatggcagcgtgaggaagctccatcagcctgcctctgggaattgtcagctgcagttagtgggacagctaggctgggtcgagagaggcagccctctccagagccaccaaaatcatcagacagtgagaatgcagcagacacggtcctgcagtagatgtggtccttctctgaaggacatgctgctttggttactggagtcttgtagtatagtttgaagtcaggtagcatgatgcctccagctttgttcttttggcttaggatcgtcttggtaatgcgggctcttttttggttccatatgaactttaaagtagttttttccaattctgtgaagaaagtcattggtagcttgatggggttggcattgaatctataaattaccttgggcagtatggccattttcatgatattgattcttcctatccatgggcatggaatgttctcccatttgtttgtatcctcttttatttcgttgagcagtggtttgtagttctccttgaagaggtccttcacatcccttgtaagttggattcctaggtattttattctctttgaagcaatgaatgttgtagggcacagtactaggattgagtaccccatacatagtgaagcctttatagagagggttcctgaagtctggtttcctctgaaccaagaaaggccacacagaatgtgttttctcatagactcttagatcttcccgatccttctggcagttaccaaggaagtttccaaactggcaggagaaaacatggtcatgaatctccagcaggaagttttcattaaactcaaaggcacagggaaactgttccattaattgccagatacagtctaggaactgggtgaagataggggacacttctttagagtccccatcgaggtggccacaccttctgatataattacaacctggctcacaacgataccacctttccatgagtcctttgaatgtcctataaaatggatctaggaggatgctagccactgagcagacttgtgctgtgcggtcccatccatcagaacaatggactaagacactggccttttctaccttcactgcctttgtaatgaaaattccagcatccataatagctttaatgtgtcttaaccaccctgagctctccaggccgctaagaaattcactcattgttggagttttcaattcacaaacttccaagagtttctgcagactgctccgcattacatggatgttctcaatgcccatgaatctgaagcgaatgttggcatagttgtcttcattttcataccccttcccagctgctcggttggccatggcattcaactttggtcttgtgtctacaacatacataaactggctccctgggtttgtttggctaatggcctccaacaagagctcatcatctacacagcgagtgtaaaatccagagagaggctggctacagcggcaaatggcagcattgttctctttgtagaggtaggagagcacagggacacgttctttacttctgaactttgaacttccaaccaccgttcccaaggtaacagatttaggaaccactatttcaggagggtaggtgctgcatatctcatagtttctgttggcatctgttatggtccagtttctgttgggtattcccatacgcccaaagtctgatattgggtcaatcagtttccatccactttccctcatctcttttgaggatttgggattataagaaaaagcataaagatcttcaggtaatgctggctgagaaagcttgagcagtgaaatataaacctcatggcacacaaggtcagaatctaaaacaaagtgggccacccggaaattcttgcagcggagggtcaggggacaacccaggctagtgatgggtaacttctccacagtggcaatgtgatggagtgcaatccatgtttctttccgggctgcacctgaagcctccacatagatcaggtgggttgcagtaagataaagaatcccattagctggtttcttactcacataacgatccaccaatttcacgttttctaccttttctgaaatcagtgcgggaaaaactggttcatctaattgggactggttggacagtgggtgcaggccatggagggcaagctgaagcagggtggggcatcgcctaaaccaggaagtgcaaggggtgggagatttccatttcctagccaagggaagacgtgacggactgtacctggaaaatcgggacactccctcccaaatactgtgcttttccaacagtataagcaaatggcacaccaggagattatatcccacacctggccttcggagggtcctacgcccacggaatctcgctgattgctagcacagcggtctgagatcaaactgcaaggccgcagcaaggctgggggaggggcgcccgccattgcccaggcttgcttaggtaaacaaagcagccggggaagctcgaactgggtgcagcccaccacagctcaaggaggcctgcctgcctctgtaggctccacctctgggggcagggcacagacaaacaaaaagacagcagtaacctctgcagacttaaatgtccctgtctgacagctttgaagagagcagtggttctcccagcacgcagctggagatctgagaacgggcagactgcctcctcaagtgggtccctgacccctgacccccgagcagcctaactgggaggcaccccccagcaggggcacactgacacctcacacggcagggtattccaacagacctgcagctgagggtcctgtctgttagaaggaaaactaacaaacagaaaggacatccacaccgaaaacgcatctgtacatcaccatcatcaaagaccaaaagtagataaaaccacaaagatggggaaaaaacagaacagaaaaactggaaactctaaaacgcagagcacctctcctcctccaaaggaacgcagttcctcaccagcaacggaccaaagctggatggagaatgattttgacgagctgagagaagaaggcttcagacgctcaaattactctgagctacgggaggacattcaaaccaaaggcaaagaagttgaaaactttgaaaaaaatttagaagaatgtataactagaataaccaatacagagaagtgcttaaaggagctgatggagctgaaaaccaaggctcgagaactacgtgaagaatgcagaagcctcaggagccaatgcgatcaactggaagaaagggtatcagcaatggaagatgaaatgaatgaaatgaagcaagaagggaagtttagagaaaaaagaataaaaagaaacgagcaaagcctccaagaaatatgggactatgtgaaaagaccaaatctacgtctgattggtgtacctgaaagtgatgcggagaatggaaccaagttggaaaacactctgcaggatattatccaggagactttccccaatctagcaaggcaggccaacgttcagattcaggaaatacagagaacgccacaaagatactcctcgagaagagcaactccaagacacataattgtcagattcaccaaagttgaaatgaaggaaaaaatgttaagggcagccagagagaaaggtcgagttaccctcaaagggaagcccatcagactaacagcggatctctcggcagaaaccctacaagccagaagagagtgggggccaatattgaacattcttaaagaaaagaattttcaacccagaatttcatatccagccaaactaagcttcataagtgaaggagaaataaaatactttacagacaagcaaatgctgaccgattttgtcaccagcaggcctgccctaaaagagctcctgaaggaagcgctaaacatggaaaggaacaaccggtaccagccactgcaaaatcatgccaaaatgtaaagaccatcgagactaggaagaaactgcatcaactaacgagcaaaatcaccagctaacatcataatgacaggatcaaattcacacataacaatattaactttaaatgtaaatggactaaattctccaattaaaagacacagactggcaagttggataaagagtcaagacccatcagtgtgctgtattcaggaaacccatctcatgtgcagagacacacataggctcaaaataaaaggatggaggaagatctaccaagcaaatggaaaacaaaaaaaggcaggggttgcaatcctagtctctgataaaacagactttaaaccaacaaagatcaaaagagacaaagaaggccattacatgatggtaaagggatcaattcaacaagaggagctaactatcctaaatatgtatgcacccaatacaggagcacccagattcataaagcaagtcctgagtgacctacaaagagacttagactcccacacattaataatgggagactttaacaccccactgtcaacattagacagatcaacgagacagaaagtcaacaaggatacccaggaattgaactcagctctgcaccaagcagacctaatagacatctacagaactctccaccccaaatcaacagaatatacatttttttcagcaccacaccacagctattccaaaattgaccacatacttggaagtgaagctctcctcagcaaatgtaaaagaacagaaattataacaaactatctctcagaccacagtgcaatcaaactagaactcaggattaagaatctcactcaaagccgctcaactacatggaaactgaacaacctgctcctgaatgactactgggtacataacgaaatgaaggcagaaataaagatgttctttgaaaccaacgagaacaaagacacaacataccagaatctctaggacgcattcaaagcagtgtgtagagggaaatttatagcactaaatgcccacaagagaaagcaggaaagatccaaaattgacaccctaacatcacaattaaaagaactagaaaagcaagagcaaacacattcaaaagctagcagaaggcaagaaataactaaaatcagagcagaactgaaggaaatagagacacaaaaaacccttcaaaaaatcaatgaatccaggagctggttttttgaaaggatcaacaaaattgatagaccgctagcaagactaataaagaaaaaaagagagaagaatcaaatagacacaataaaaaatgataaaggggatatcaccaccgatcccacagaaatacaaactaccatcagagaatactacaaacacctctacgcaaataaactagaaaatctagaagaaatggatacattccttgacacatacactctcccaagactaaaccaggaagaagttgaatctctgaatagaccaataacaggagctgaaattgtggcaataatcaatagtttatcaaccaaaaagagtccaggaccagatggattcacagccgaattctaccagaggtacaaggaggaactggtaccattctttctgaaactattccaatcaatagaaaaagagggaatcctccctaactcattttaatgaggccagcatcattctgataccaaagccgggcagagacacaaccaaaaaagagaattttagaccaatatccttgatgaacattgatgcaaaactcctcaataaaatactggcaaaccgaatccagcagcacatcaaaaagcttatccaccatgatcaagtgggcttcatccctgggatgcaaggctggttcaacacacgaaaatcaataaacgtaatccaacatataaacggaaccaaagacaaaaaccacatgattatttcaatagatgcagaaaaggcctttgacaaaattcaaagggttcttcatgctaaaaactctcaataaattaggtattgatgggacatatctcaaaataataagagctatctatgacaaatccacagccaatatcatactgaatgggcaaaaactggaagcattccctttgaaaactggcacaagacagggatgccctctctcccccactcctattcaacatagtgttggaagttctggccagggcaattaggcaggagaaggaaataaagggtattcaattaggaaaagaggaagtcaaattgtccctgtttgcagatgacatgattgtatatctagaaaaccccattgtcctcagccccaaaatctcccttaaggctgataagcaacgtcagccaaagtctgaggatacaaaatcaatgtgcaaaaatcaccaagcattcctatacaccaataacacagacaaacaagagagccaaatcatgagtgaactcccattcacaactgcttcaaagagaataaaatacctaggaatccaacttacaagggatgtgaaggacctcttcaaggagaactacaaaccactgctcaaggaaaataaaagaggatacaaacaaatggaagaacattccatgctcatgggtaggaagaatcaatatcatgaaaatggccatactgcccaaggtaaatttatagatttataaattcaatgccatccatccccatcaagctaaccaatgactttcttcacagaattggaaaaaaactactttaaagttcatatggaaccaaaaaagagcccgcattgccaagtcaatcctaagacaaaagaacaaagctggaggcatcaacgctacctgacttcaaactatatactacaaggctacagtaaccaaaagagcacgatcagcatggtactggtaccaaaacagcatggtactggtaccaaaacagagataatagatcaatggaacagaacagagccctcagaaataacgccgcatatctacaactatctgatctttgacaaacctttgcttgagaaaaacaagcaatggggaaaaggattccctatttaataaatggtgctgggaaaactggctagccatatgtagaaagctgaaactggatcccttccttacaccttatacaaaaattaattcaagttggattaaagacttaaatgttagacctaaaaccataaaaactctagaagaaaacctaggcaataccattcaggacataggcatgggcaaggacttcatgtctaaaacactaaaagcaatggcaacaaaagccaaaattgacaaatgggatctaattaaactcaagaagcttctgcacagcaaaagcaactaccatcagagtgaacaggcaacccacaaaatgggagaaaattttcaccacctactcatctgacaaagggctaatatccagaatctacaaagaactcaagataatttacaagaaaaaaacaaaacaactgcatcaaaaagtgggcgaaggacatgaacagacacttctcaaaagaagacatttatgcagccaaaaaaacacatgaaaaaaatgctcaccatcactggccatgcagggagatgcaaatcaataccactatgagatatcatctcacaccagttagaatggcaatcattaaaaagtcaggaaacaacaggtgctggagaggatgtggagaaataggaacacttttacactgttggtgggactgtaaactagttcaaccattgtggaagtcagtgtggcgattcctcagggatctagaattagaaataccattttacccagccatcccattactgggtatatacccaaaggactataaatcatgctgctataaagacacatgcacacgtatgtttattgaggcactattcacaatagcaaagacttggaaccaacccaaatgtccaacaatgatagactggattaagaaaatgtggcacatatacaccatggaatactatgcagccataaaaaatgatgagttcatatcctttgtagggacatggatgaaattggaaaccatcattctcagtaaactatcgcaagaacaaaaaaccaaacaccgcatattctcactcataggtgggaattgaacaatgagatcacatggacacaggaaggggaatatcacactctggggactatggtggggaggggggaggggggagggatagcattgggagatatacctaatgctagatgacgagttagtggtgcagtgcaccagcatggcacatgtatacatatgtaactaacctgcacaatgtgcacatgtaccctaaaac

SEQ ID NO: 13062 - DNA, 389 bp, Homo sapiens
  SIMILAR (75)..(4): 371254mologous to Homo sapiens super cysteine rich protein; SCRP,accession number U63332,Smith-Waterman Score=62.
tggcatgtgagatacaggtaagcttgaaaccaagaagcagaagcagcagatcaggcacagacactcacacagacaagccactcttgcaggcaaaaagaggaatcaccaggctgcacatgagcagccctacaactgcacatggcactgggtgtagtcctcgcttcttctcccacacaaacctctggcaaatagatggttgaagaaaaacttaccttgcccaaagatgagaaataaaaaagcaaacagcgcagcatctacaggaagacactgcaagaattaaaaaataaaaacgagaaaaggaacaggaaaaacaagtggcaagtgaaaactcactagtaaaaatgttgtcatagaacagatgaaaattgccagcaaacttttcgctgaaa

SEQ ID NO: 13063 - DNA, 648 bp, Homo sapiens
  SIMILAR (27)..(317): 341254mologous to Rubrivivax gelatinosus hypothetical cytochrome with 4 heme binding sites,accession number AB034704,Smith-Waterman Score=92.
atgtggaggctggcagccctcgctcctgtgaactggcggctggggctgcatctcgcccacgtcgctgtcatgtgcggggcccacgttcgcatgctcctcgctctgcccctgctgcagtgtcttcctgtagatgctgcgctgtttgcttttttatttctcatctttgggcaaggaccacccgtgcagaccacccccgcctgccagaccagtctcagggcatctgatggcttccctgcctgctccgcccacatctcaggccaaacccctggacgtcaggacactgcaccatgcagcccactgtattttcagtctttcctggagccctgcccccgccagccctgctcgcaccccaggttcctggtggccgatgcgcttaggtcagccgactggcttctgtgctctgcccctgaacaccaagctgccctgaacagagcctggtctctcagggtgagggtgggtcagggataccgcgtgtgctccctgctgtctgcgtccgtgtctggcaaattgaaaagtgctcataggcgctgtgaaggccttgatgtcctctggtgccaacgcaacagagaagccagcaaaatgctctgcatgggacaggttctggtttttgctacagagactgtaagagatgcaaagccaggacgctga

SEQ ID NO: 13064 - DNA, 363 bp, Homo sapiens
  SIMILAR (1)..(156): 711254mologous to Homo sapiens 1-8U,accession number X57352,Smith-Waterman Score=197.
atgaaccacgctgtccaaaccgtcttcactcccgccaacaccagccaccccctcaactatgaaatgctcaaggaggagcatgaggtggctgtgctgagggtgccccacaaccctgttcccccgacatccaccgtgatccacatccacacattcacctactccgtgaagtctagggacaggaagatggttggcgacctgactggggcccaggcctacgcctccactgccaagtgcctgaacgtttgcaccctcatcctgggcatccgtgtgaccacaacactcatcatccttttcaccagtagttctatgataatattccaagcaatttctcaaatgataaagaatctccaaggccagcagtag

SEQ ID NO: 13065 - DNA, 376 bp, Homo sapiens
  SIMILAR (154)..(678): 991254mologous to Escherichia coli mglC,accession number M59444,Smith-Waterman Score=889.
ggaggtctcactgagcaccgtcccagcatccggacaccacagcggcccttcgctccacgcagaaaaccacacttctcaaaccttcactcaacacttccttccccaaagccagaagatgcacaaggaggaacatgaggtggctgtgctgggggcaccccccagcaccatccttccaaggtccaccgtgatcaacatccacagcgagacctccgtgcccgaccatgtcgtctggtccctgttcaacaccctcttcttgaactggtgctgtctgggcttcatagcattcgcctactccgtgaagtctatggacaggaagatggttggcgacgtgaccggggcccaggcctatgcctccaccgccaagtgcctgaacatt

SEQ ID NO: 13066 - DNA, 363 bp, Homo sapiens; identical to SEQ ID NO: 13064
  SIMILAR (1)..(156): 711254mologous to Homo sapiens 1-8U,accession number X57352,Smith-Waterman Score=197.

SEQ ID NO: 13067 - DNA, 376 bp, Homo sapiens; identical to SEQ ID NO: 13065
  SIMILAR (64)..(279): 1001254mologous to Escherichia coli K12 putative oxidoreductase,accession number AE000303,Smith-Waterman Score=426.

SEQ ID NO: 13068 - DNA, 470 bp, Homo sapiens; identical to SEQ ID NO: 12997
  SIMILAR (341)..(445): 411254mologous to Pan troglodytes putative,accession number M57946,Smith-Waterman Score=74.

SEQ ID NO: 13069 - DNA, 448 bp, Homo sapiens; identical to SEQ ID NO: 12998
  SIMILAR (245)..(409): 381254mologous to Xenopus laevis upstream binding factor 1,accession number X57201,Smith-Waterman Score=109.

SEQ ID NO: 13070 - DNA, 678 bp, Homo sapiens; identical to SEQ ID NO: 12999
  SIMILAR (511)..(675): 381254mologous to Xenopus laevis upstream binding factor 1,accession number X57201,Smith-Waterman Score=109.

SEQ ID NO: 13071 - DNA, 373 bp, Homo sapiens
  SIMILAR (253)..(26): 301254mologous to Barbatia lima hemoglobin (2 domain),accession number D58417,Smith-Waterman Score=83.
cggcacgaggccattgttccctctgccctgaacatgcgtggtcaaccccttcctgtctcatgtcacccttcagcgaggccttcccgctaagctggtccatctgatctacaatggcagcccaagagctatttcccacaccctccttttccacttctctgcttaacacgggtacactataaggtgtctttcttgctcagttgatggtttcacctgctgttgcctggtttgtaagccccataagaggaagaccagagatcttggtcattgctgtaccctcaccattcatagcagtccctgtacctctgtaggtacttaagggacaccttttaaaagaagggtgagaggaagggcaagggagacagggaggaaaagg

SEQ ID NO: 13072 - DNA, 1674 bp, Homo sapiens
  SIMILAR (416)..(544): 621254mologous to Homo sapiens Human secreted protein, SEQ ID NO: 7305,accession number G03224,Smith-Waterman Score=144.
atggctggaggatcatgggaacaatatccctggggggtgtccactttctgcgatatatgtagtcatatcaccccctacgcctttgaatattacgaaggaccatctcacacgggggtgtacacttcctgcgatattgggagtaatatcaacctctcggcctctgaatatgaggaagaaaatcacaggggctatggcgtgtgctcggtggggctggagcggctggcttacgtcttcggtgcttacagcctggggcctcagccgcctcactcctgggcctgctgggcctgtggctgccacgcccagtgcccctcgtggctgcagcaggggtattctgtgagcgcctccaggaatgagaatacagcattattcaaaatagcaaagacgtggaaccaacccaaatgcccatcaatgataggactggaaaaagagtatgtggtacatatacgccatggaatgctatgcagccatcaaaaggaacaagagaatatcctctgcagggacatggatgaagctgaaagccattatcctcagcaaactaatgcagaaacagaaaaccaaacaccacatgttctcacttacaagtggaagccgaacaatgagaacacacggacacagagaggggaacaacacacactggggcctactggagggcagcggtttggagtgatccactcggtgttcaccaacctgcttctgtgggccaatggcgtcctcaatgagtcaaagcaccaactcaatgagcacaaggaacggctcatcactctgggttttgggaacataacaacagttttagatgaccacacaccgcagtgtaactgcacgcccccaactctgtgcactgccatctcccacgggatctactacctctaccccttcaacatagagtatcagatcctggcctccacaatgctctacgtcctgtggaagaacatcgggcgcaaagttgacagccatcagcaccagaagatgcagttcaagtctgatggggtcatgaccaagagcgagtcggcactcatcatgttctacctgtatgccatcaccctgctgatgcttatgggggctgcggggctggctggaatccggatttacaggatagacgagaagtcactggatgagtccaaaaatccggcccgcaaactggactcggacctcttggtgggcactgcctcgggctcctggcttatctcctggggctcaatcttggccatcctctgtgctgagggccacccccgctacacctggtacaacctgccctactccatcctggcgatcgtggagaagtacatccagaacctcttcatctttgaatccattcaccgagagcctgaaaaactctctgaggacatccaaacccttcgggtggtcacagtctgcaatggcaacaccatgccccttgcttcttcctgccccaagagtggaggtgtggccagagatgtggctccccagggcaaggacatgccaccagcagccaatggaaatgtgtgcatgagagaaagccatgacaaggaggaggagaagcaggaggagagcagctggggagggagcccaagcccagtccgccttccccgtttcttacagggcaacgccaagagaaaagtcctgaggaatattgcagccttcttgttcctctgcaatatttcggtaatctgcaccaagttattcttattcttttaa

SEQ ID NO: 13073 - DNA, 1659 bp, Homo sapiens
  SIMILAR (4469)..(5521): 961254mologous to Escherichia coli glutamate synthase, large subunit,accession number U18997,Smith-Waterman Score=1723.
atgagggagcacaaaggagggcatttcggcagcttggggtttggggtgatccacttggtgttcaccaacctgcttctgtgggccaacggcgtcctcaatgagtcaaagcaccaactcaatgagcacaaggaatggctcatcactctgggctttgggaacataacaacagttttagatgaccacacaccgcagtgtaactgcacgcccccaactctctgcaccaccatctcccacgggatctactataactactacctctaccccttcaacatagagtatcagatcctggcctccacagtgctctacgtcctatggaagaacatcgggcgcaaagttgacagccatcagcaccagaagatgcagttcaagcctgatggggtcacggtgggcacagtcctgggcctgaccgcgctggctgccaccattgccgtggtgaccaagagcgagtcagcactcatcacgttctacctgtatgtcatcaccctgatgatgcttatgggggctgcggggctggctggaatccggatttacaggacagatgagaagtcactggatgagtccaaaaatccgccccgcaaactggactcggacctcttggtgggcactgcctcaggctcctggcttatctcctggggctcaatcttggccatcctttgtgccgaggaccacccccactacacctggtacaacctgccctactccatcgtggtgatcatggagaagtacatccagaacctcttcatctttgaatccattcaccgagagcctaaaaaactctctgaggacatccaaacccttcggatggtcacagtctgcaatggcaacaccatgtcccttgcttcctcctgcctcaagagtggagttgtggccggagacgtggctccctggggcagggacatgccaccagcagccaatggaaatgtgtgcctgagagaaagttgtgacaaggaggagaagcaggaggagagcagctggggagggaacccaagcccagtccaccttcctcgtttcttacagggcaacgccaagagaaaagtcctgaggaatattgcagccttcttgttcctctgcaatactttggttcaaggggtacgcatgcagatttgttacatgggtaaattgcgtgtcgctgaggtttggtgcacaaatgatcccgtcacccaggtggtgccaaaggcatctggcagagagcaagagctgtcttctccagcatcgggagccagtccagaggccccagctgcaggtgctgatgtgcatgtccaggtggagtgggctccactccagagacggacatggaaatgtgcctctgtggcatccaaatggacgaacccagtagacagagaagtggaaaaggagggtgtgggaaatagctcttgggctgccattgtagatcagatggaccagcttagcgggaaggcctcgctgaagggtgacatgagacaggaaggggttggccacgcatgttcagggcagagggaacaacggctgctttggatacctcccgcttttggctgtcgacctgagtatgacaacggattggaggagattgtctttggctttgaaccctggataattgtggtcaacctggccatgcctttttctattttctatggaatgcacgcagctgcctccctctttgaggtctattgtaagatatag

SEQ ID NO: 13074 - DNA, 1297 bp, Homo sapiens
  SIMILAR (1139)..(1294): 511254mologous to Homo sapiens Human secreted protein, SEQ ID NO: 6720,accession number G02639,Smith-Waterman Score=158.
atgtggcaagtggagacagtgtgcacagctgtgaactgcaatgaactgaggtttggggtgatccacttggtgttcaccaacctgcttctgtgggccaacggcgtcctcaatgagtcaaagcaccaatgagcacaaggaatggctcatcactctgggctttgggaacataacaacagttttagatgaccacacaccgcaatgtaactgcacgcccccaactctctgcaccaccatctcccacgggatctactatatctactacctctaccccttcaacatagagtatcagatcctggcctccacagtgctctacgtcctatggaagaacatcgggcgcaaagttgacagccatcagcaccagaagatgcagttcaagcctgatggggtcacagtgggcacagtcctgggcctgaccgcgctggccgccaccattgccgtggtgaccaagagcaagtcagcactcatcacgttctacctgtatgtcatcaccctgatgaagcttatgggggctgcggggctggctggaatccggatttacaggacagatgagaagtcactggatgagtccaaaaatccgccccgcaaactggactcggacctcttggaccacccccactacacctggtacaacctgccctactccatcgtggtgatcgtggagaagtacatccagaacctcttcatctttgaatccattcaccgagagcctaaaaaactctctgaggacatccaaacccttcggatggtcacagtctgcaatggcaacaccatgccccttgcttcctcctgcctcaagagtggaggtgtggccggagacgtggctccctggggcagggacatgccaccagcagccaatggaaatgtgtgcctgagagaaagctgtgacaaggaggagaagcacgaggagagcagctggggagggaacccaagcccagtccaccttcctcgtttcttacagggcaacgccaagagaaaagtcctgaggaatattgcagccttcttgttcctctgcaatactttggttcaaggggtacgcatgcagatttgttacatgggtaaattgcgtgtcgctgaggtttggtgcacaaatgatcccgtcacccagagtgctgggattacagtgcctggccctgtaaggttcatcacagcacgacttacaataggaaagtcatggaatcaacctagttgcccatcagtggggtaccggataaagcaaaagtggttcttctacagcatcgaatactacacagccatgaaaaagaataaaatcatgtcctttgcagccacatggatgtag

SEQ ID NO: 13075 - DNA, 363 bp, Homo sapiens
  SIMILAR (333)..(286): 561254mologous to Homo sapiens PRO1768,accession number AF118074,Smith-Waterman Score=46.
tgtgtggagagcgaggaggggcctgcaaactctgcttaaaacaaacaagtgctaaattaaaaagaatgttaaatacagatcagctgcctggctcctgacagcagatttaattcttccctcctctcacctgatggagcttcgcctgcagggtttgcatcaattactcgacgacatgtggaaaatgattgatgagctgcctgcggcactgaagtacactttgtcaaccgctcatcatttatacatcttatctctgccagaacaaaagataggacaacctcacactgaagttggggatggcaaggggggagatgaggatgggggtgagggaggcaagtcaggcaaagttgttgggtgcccacaggg

SEQ ID NO: 13076 - DNA, 849 bp, Homo sapiens
  SIMILAR (750)..(325): 981254mologous to Escherichia coli 37KD protein, similar to YI22-ECOLI,accession number D85613,Smith-Waterman Score=748.
ctagaacataagaacacgtaaacaggagtagctgctgctgctgctgctgctgctgctgctgctgctgctgctgctgctgctgttgttaaagtggttttgtcctgtcagccaaaggcatatggcagctgtcagctccggaaaaccacttttggacccaggaatctgttttgctgttattgaggggtacacatcatcagatgccccaatttcccaaaagctggccccaacagccgctgctgcctgggcagctccccccgaaattctctcagaaactggatccacgggccgtgattcgtctttgtcagggatggttacaaaccccccatcctcatctccccccttcccatccccaacttcagtgtgaggttgtcctatcttttgttctggcagagataagatgtataaatgatgagcggttgacaaagtgtacttcagtgccgcaggcagctcatcaatcattttccacatgtcgtcgagtaattgatgcaaacccttcatcagtcctcccactgtgaactctcccttctgaacaaactcactgtgtcccttatatctctctttcttcaccattagctccttctcccacctgaaagatgaagtttcattgatcctgccaggaatttggtaaacttcatagcatagagccttctgtctggggtatccgtggtcatttgctgccagctctaagttttcttttgtgatttctggcctcatttcccactgttctgcagtgtattttttcagtttaactagatcagtgtatgtctcaagttcttcttcctcctcctcctcccttcccacttgttctttttttccaatgaaagtatctggcaggatgcggtgactcat

SEQ ID NO: 13077 - DNA, 417 bp, Homo sapiens; identical to SEQ ID NO: 1912
  SIMILAR (28)..(417): 991254mologous to Homo sapiens ubiquitin,accession number X63237,Smith-Waterman Score=686.

SEQ ID NO: 13078 - DNA, 440 bp, Homo sapiens
  SIMILAR (32)..(439): 881254mologous to Homo sapiens ubiquitin,accession number X63237,Smith-Waterman Score=681.
ggtcgaccatctgcggtggagccgcaccaaaatgcagattttcgtgaaaacccttacggggaagaccatcaccctcgaggttgaaccctcggatacgatagaaaatgtaaaggccaagatccaggataaggaaggaattcctcctgatcagcagagactgatctttgctggcaagcagctggaagatggacgtactttgtctgactacaatattcaaaaggagtctactcttcatcttgtgttgagacttcgtggtggtgctaagaaaaggaagaagaagtcttacaccactcccaagaagaataagcacaagagaaagaaggttagtcgccttcgtcgagagtgcccttctgatgaatgtggtgctggggtgtttatggcaagtcactttgacagacattattgtggcagatgttgtctgacttactgtttcaacaaac

SEQ ID NO: 13079 - DNA, 874 bp, Homo sapiens
  SIMILAR (265)..(777): 381254mologous to Homo sapiens Human ubiquitin,accession number R26915,Smith-Waterman Score=116.
atattatagacttgccttcgtcagcttcagcaatatcattcatagttctgaatcttctaagaattcttagaacatttgtgaatgataattgtttcccgggaaatatgagtacacttggaagaagcatattccaccaaagtgattctaaatccctaccacgtttttaaagttttcttttaagcttgttaagaaatagtaagagaaggggcttccttttcgatccgccatctgcggtggagccgccaccgaaaatgcagattttcggtgaaaacccttaccggggaagacccatccaccctcgaggttggaaccctccggatacgatagaaaaatgtaaaggccaagactccaggataaggaaggaatttcctcctgatcagcagagacttgatcttttgctggcaagcagctcggaagatggacgtgactctctgtctggctacacatattcaaaaaggaagtctactccttcatccttgtgtttaagacttccgtggtggtgctaagaaaaaggaagaagaaagtctttacaccacttccccaaggaaggattaaggcacaaggaggaaaggaaggtttaaggcttggcttgtcctggaaatatttattaaggtgagtggatgagaattggccaaaatttagttcgcctttcgttcgaggagttgccctttcttgattgaatgttgggtgctgggggtgtttatggccaagtcacttttgacagacattattggtggcaaatggttgtcctgacttacctgtttccacaaaccagaatgacaagtaactgcgtatgagttaataaaaggacatgaacctaaaaaaagaagaagaaaaaaaaaagttttgccctatagggagtcgattacaattg

SEQ ID NO: 13080 - DNA, 415 bp, Homo sapiens
  SIMILAR (11)..(301): 771254mologous to Mus musculus Pro-Pol-dUTPase polyprotein,accession number Y12713,Smith-Waterman Score=374.
ctccagttaaataggggcttaaggaggtcaggtaattaatggagttttagctcaggtctgacttacagtgggtccagtgggtccccggactcatcctgtggtcattttcccagtgccagaatgcagaattggcagagacatacttagcagctggcagaacccccacactggctccctgactggtagggtgagggcttttatggttggaaaggccaaatggaagccatgagagctgcctctacctagaaaaacagtaaatcaaaaacaatatcgtattcccggagggattgcagagattagtgtccatcaaaaacttgagacgcggggtggtgattcccaccacatcccggttcaactctcccatttggcctgtgcagaagacagatggatcttggtgaacggcagcggattatcg

SEQ ID NO: 13081 - DNA, 405 bp, Homo sapiens
  SIMILAR (14)..(361): 791254mologous to Mus musculus Pro-Pol-dUTPase polyprotein,accession number Y12713,Smith-Waterman Score=502.
ttagcactgttgtggtattccacacagcattgcctctgaacaagatacttactttatggctaaagaagtgtggcagtgggctcatgctcatggaattcactggtcttaccatgttccccatcatcttgaagcagctggattgatagaacagtggaatggccttttgatgtcacaattacaacaccaactaggtgacaatactttgcagggctggggcaaagttctccagaaggttgtgtatgctctgaatcagcgttcaatatatggtactgtttctcccatagccaggattcatgggtccaggaatcaaggggtagaagtggaagtggcactacttaccgtaacgcccaatgatccactagcaaatattagcttcctgttcctgtgacattacattctgatagg

SEQ ID NO: 13082 - DNA, 598 bp, Homo sapiens
  SIMILAR (472)..(1146): 721254mologous to Mus musculus Pro-Pol-dUTPase polyprotein,accession number Y12713,Smith-Waterman Score=829.
ccaaaacagagcatccaacgcaacatgtctgccatggaacgcttccgcaacatggacaagagagccacaactgaggaccgcaacacggccttggagacgctgcaccagaatagcatcactcaagtctctatttatgaggtggacaagcaagattgtcgcaaattttgcactactggcatcgatggagccatgacaatttgggatttcaagaccctcgagtcttccatccagggcctccggataatgtgaagctgagtgagcctccgccatccagcatgacaaacttgtggccgaccgcagctgtgccgtggcacgatggcgaggaagccagccccaaggaaacactgaaaacacatatcacgccaatgccgtgtggttttgtttgaatataaaattggtgaaagtgttggtttttttaaggcagtaatttttttgtttgtttttttgcgatttcattccattcttgaccaaagcttctctttaagtagtttattatggaaaattgtcacactaacttaaaagacagggtgagggagatatgtaaattgtccactaaaaaatcccataaaagaactgaatgtggaaaaaaaaaaaaaaa

SEQ ID NO: 13083 - DNA, 409 bp, Homo sapiens
  SIMILAR (265)..(110): 421254mologous to Homo sapiens codes for truncated alpha heavy Ig mRNA of alpha heavy chain disease patient AYO,accession number Z14960,Smith-Waterman Score=69.
  misc_feature (1)...(409): n = a,t,c or g
tggccttccgctctgacgcagggccgaggtgggcagtccaggccgagacgacnggccgtgaaggtctgcgctggggccgggacgaagcacttggtaacaggcacatcttcctcccgagtgactgcctcctaggaggacatttaggggagggcagaggcctgcagtttggcttcacggctggctatgtggacagcaagagtcgttttcgcggaaccgactggcagccaggcctgtcgggcccccgacgccgccccatttcccttccagcaaactcaactcggcaatccaagcacctagataccagcacaagtcggttaatccctgtctggactgagcctccgttggcttctgaactggaattctgcagctaacccttccacgactagaaccttaggcattggggagtttt

SEQ ID NO: 13084 - DNA, 598 bp, Homo sapiens
  SIMILAR (1)..(429): 971254mologous to Homo sapiens histone H2A.X,accession number X14850,Smith-Waterman Score=694.
  misc_feature (1)...(598): n = a,t,c or g
atgtcgggccgcggcaagactggcggcaaggcccgcgccaaggccaagtcgcgctcgtcgcgcgccggcntccagttcncagtgggccgtgtacaccggctgctgcggaagggccactacgccgagcgcgttggcgccggcgcgccagtgtacctggcggcagtgctggagtacctcaccgctgagatcctggagctggcgggcaatgcggcccgcgacaacaagaagacgcgaatcatcccccgccacctgcagctggccatccgcaacgacgaggagctcaacaagctgctgggcggcgtgacgatcgcccagggaggcgtcctgcccaacatncaggccgtgctgctgcccaagaagaccagcgccaccgtggggccgaaggcgccctcgggcggcaagaaggccacccaggcctcccaggagtactaagagggcccgcgccgcggccggccgccaggcctccccatgccaccacaaaggcccttttaagggccaccaccgccctgaaggtgagtgaggccctcggcagctgcaaccggggtgtttggtaaccccccggggtggtggttagcccaggaattttaaaagcggcccc

SEQ ID NO: 13085 - DNA, 870 bp, Homo sapiens
  SIMILAR (1)..(426): 1001254mologous to Homo sapiens histone H2A.X,accession number X14850,Smith-Waterman Score=706.
atgtcgggccgcggcaagactggcggcaaggcccgcgccaaggccaagtcgcgctcgtcgcgcgccggcctccagttcccagtgggccgtgtacaccggctgctgcggaagggccactacgccgagcgcgttggcgccggcgcgccagtgtacctggcggcagtgctggagtacctcaccgctgagatcctggagctggcgggcaatgcggcccgcgacaacaagaagacgcgaatcatcccccgccacctgcagctggccatccgcaacgacgaggagctcaacaagctgctgggcggcgtgacgatcgcccagggaggcgtcctgcccaacatccaggccgtgctgctgcccaagaagaccagcgccaccgtggggccgaaggcgccctcgggcggcaagaaggccacccaggcctcccaggaggttcgggccttccggatgcggcttgggcgctcttcggggacctccgtggcgcggaagacccgagcctgccggggggaggccggcggcgccgcacctgcccgcctcggcgttcgtgactcagccgccccatcccgagtcgctaaggggctgcggggaggccgcagcaccttctggaagacttggccttccgctctgacgcagggccgaggtctgcgctggggccgggacgaaccacttggtaacaggcacatcttcctcccgagtgactgcctcctaggaggacatttaggggagggcagaggcctgcagtttggcttcacggctggctatgtggacagcaagagtcgttttcgcggaagccgactggcagccaggcctgtcgggccccccgacgccgccccatttcccttccagcaaactcaactcggcaatccaagcacctag

SEQ ID NO: 13086 - DNA, 1701 bp, Homo sapiens
  SIMILAR (74)..(526): 441254mologous to Homo sapiens histone H2A.X,accession number X14850,Smith-Waterman Score=222.
acagcagttacactgcggcgggcgtctgttctagtgtttgagccgtcgtgcttcaccggtctacctcgctagcatgtcgggccgcggcaagactggcggcataggcccgcgcctaaggccatgtcgcgctcgtcgcgcgcgggccgtccgagttcccaggtgggccggtgtacaccggctgctgcggaagggccactacgccgagcgcgttcggccgcaggcagccatgctgctaccttggcggctagtgcatggagtacctcaccagctgagagtcatggagcatggcgggtcaatgcggcccgaaacaacagagaagacgcgaatcatcccccagccacctgcaagctggccaatccgcaacgacgaggagctcaacaagcttgcttgggcggcgttgacgatcgcccagggaagccgttcctgccaaacattcaagcccgttgttgtggcccaagatagactagcgccaccgttggggccgaaggcgccctcggggggcgaagaaagggccacccaggcctccgcaaggagtactaagagggcccgcgccgcggccggccgccccagcgtccccatgccaccacaaaggcccttttaagggccaccaccgccctcatggaaagagctgagccgcttcagactgcggggcaagcgggccgcggctcccttcccctcccctcccctcgcccgccttcgccgcccggcctcgagtccccgcccgcccccgctcccgtcccgcaccgcctgccgcgtcgggctcggggccttgccctgtccgccgtccgccctccggtagggttcgggccttccggatgcggcttgcggcgctcttcgggtgacctccgtggcgcggaagacccgagcctgccggggggaggccggcggcgccgcaccctgccccgcctcggcgttcgtgactcagccgccccatcccgagtcgctaagggcgactcggggaggccgcagcaccttctggaagatcttggccttccgctctgacgcagggccgagcgtgcgcagtcccaggccggagcagccgccgcccctgaaggtgagtgaggccctcggcagctgcagccggggtgtctggtacccccccggcgtggtgcttagcccaggactttcagacggccgctggccgggaggctttggtgggagagacgctgatcgccaaatttcggtctggcgccccttctgcggccgggaacccaggccttttcacatcagcctactccctccatctttcattcataggtctgcgctggggcccgggacgaaagccacttggtaaacaggcaacatcttccctcccgaatgaactgccctccctaaggaggacattttaggggaagggcagaggctctgcagtttggcttccacggctgggctatgtgggacagcaagagtcgttttcgcggaaagccgaactggcagcccaggccctgtcgggaccccccgacggccgccccatttcccttaccagacaaactcaactcggacaatccaagcacctaggataccagcacaagtcggttaatccctgtctgggactggagcctccgttgggctttctgaactggaatttctggcagctaaccctttccacggattagaaaccttagggcatttggggaatttttagatggactaatttttatttaaaggattgttttttttttaaaaaaaaaaaaaaaaaaa

SEQ ID NO: 13087 - DNA, 392 bp, Homo sapiens
  SIMILAR (2)..(391): 841254mologous to Homo sapiens putative p150,accession number U93565,Smith-Waterman Score=613.
caaaaccacaatgagatactatctcacaccagttagaatggcaatcattaaaaagtcagaaaacaacagatgctggagaggatgtggagaaacaagaatgcttttacactgttggtttgagtgtaaactagttcaactattgtggaagacagtgtggcgattcctcaaggatctagaatcagaaataccatttgacctagcaatcccattactgtgtatatacccaaaggattatacatcattctgctataaagacacatgcacatgtatgtttattgcagcactattcacaatagcaaagacttggaactgacccaaatgctcatcagtgatagactggataaagaaaatgtggcacatatacaccatggaatactatgcagccataaaaa

SEQ ID NO: 13088 - DNA, 715 bp, Homo sapiens
  SIMILAR (423)..(656): 1001254mologous to Homo sapiens Human secreted protein encoded by gene 45,accession number Y36268,Smith-Waterman Score= 427.
atggctcggcttatactggagaggtttctacaggaacacgaggaaactccaccctccaagtctattataaatagtatgctacgggacccttctcagattccagatggagttctagcaaatcaggtctatcagtgcattgtgaacgactgctgttacggaccactagtggactgcatcaagcatgccattggtcatgagcatgaggtcctgctgagagacttgcttctagagaaaaacctgtccttcctagatgaagatcagcttcgtgcaaagggttatgacaaaacaccagacttcattttacaagtaccagttgctgtagaagggcacataattcactggattgaaagcaaagcctcatttggtgatgaatgtagccaccacgcctacctgcatgaccagttctggagctactggaatagatttgggccaggcttagtcatctattggtatggatttatccaggagctggactgcaaccgggaaaggggcatcctgctcaaagcctgtttccccacgaacattgtcaccttatgccacagcatagcttgaccctgaagatcctggaagagaagctgggaggaaaaggtgaatccggaagcaattttactttcctgcactgtaagatcctggcaacatctgccctgaacttcagctgaactcttgctgcccgtagtcacaccactacctctttagacaaacatatcaagaggtt

SEQ ID NO: 13089 - DNA, 624 bp, Homo sapiens
  SIMILAR (1977)..(1405): 301254mologous to Drosophila melanogaster tudor protein,accession number X62420,Smith-Waterman Score=157.
atggctgacaaaagcaatgtaaaaatgtggtctggggatcatctctacttgcaaacaagtacagaaagggaacttgaaattgatgggtctcatctgttcctctgtgctgtagaatctagagatgaagatcagcttcgtgcaaagggttatgacaaaacaccagacttcattttacaagtaccagttgctgtagaagggcacataattcactggattgaaagcaaagcctcatttggtgatgaatgtagccaccacgcctacctgcatgaccagttctggagctactggaatagcactattcacaatagcaaagacgtggaatcaacccaaatgcccatcaatgatacagtgaataaagaaaatgtggtacatatacaccatggaatactatgcagccataaaaaggaacaagatcatgtccttcgcagggtcatggatggagctggaagccattatgctcagcaaactaacgcaggaacagaaaaccaaacactgcatgttgtcacttgttttcatcgagagcagaataagcattccaccccaccaagatacatcgaggggtgcaggaccccagcagtaggctcagggacatcaggagcaattgaggagtcacagaaggagtaa

SEQ ID NO: 13090 - DNA, 395 bp, Homo sapiens
  SIMILAR (118)..(294): 501254mologous to Homo sapiens Human secreted protein sequence encoded by gene 4 SEQ ID NO:51,accession number B08894,Smith-Waterman Score=125.
caactcaggggtaaatgacccctttacaggatggctagaaaagtagttcagtaaatggaaaggaataatagcctcaattcttacttccctcgcagccgtaataggtgtacttattcttgttgggtgccgtgtcataccatgcatcctgggttggtgcagaggctcataaaaatatcacttactaaaacctcccttcactatcctccaccttatccagagaagctgcttcttttggaaaatcaagcaaaacaactaagccaggacatgttaaaaaaacttttgaaaagaaagctgtaaagaaatacaagggaaggggttgttatatatgagttctaaatttcttttgaaagaatatgtcagtatgttcaattctttgccttctacttttaaactta

SEQ ID NO: 13091 - DNA, 1185 bp, Homo sapiens
  SIMILAR (349)..(498): 561254mologous to Homo sapiens Amino acid sequence of a human secreted protein,accession number Y19566,Smith-Waterman Score=148.
atggaccattgttcctggatcaagccttaccaaattaaagctaagaaaagcttagtctatctatcttttccttcctttcctaacacagtgcctatatccattactgttcctaccactagcaactctaaccccactttagagcgtttctatggtttaggagcagaagtcactggaaaggaccctataggcttctttaagatgcgctttgttctccctgctctacctcctacaactgcccctttcacaaacctacgaaataaaactatgcctcgcctcatgccaaatgacaaaagcaaggtctcagtagtagaaataggagacctaaggcaaaccatagctattgacaggagcagtagttatgctctagttcaattggctatcccttttactctggcatttcatcaaccagaggaaggaaaaataagacatcataaagtgagagaagctccttataggtcattcaactctcatgtctatttagatgcaattggagtcccacggggaataccagatcaatttaaagcccgaaatcaaatagctgcaggatttgagtcaatattttggtgggtcacaattaataaaaacatagattggataaactacatctattataaccaacagcaatttatgaactacactagagatgctgttaaaggaatagctgagcaattagggactaactgccagatggcttgggaaaataggatagccttagacatgatattagcagaaagaggaggagtttgcatcatgattaaaactgaatgttgtgccttcatcccaaacaacactgcccctaatggaagtataacaaaggcattgcaaggtctgactgctctgtccaatgagttagccagcagctcaggggtaaatgacccctttacaggatggctagaaaagtggttcggtaaatggaaaggaataacagcctcaattcttacttccctcacagctgtaatgggtgtacttattcttgtcgggtgctgtgtcataccatgcatctgtgggttggtgcagagacaccggggaccgccccttgtggtcatagagacgaagccgctcggcctagagcgcctcgccggcctcccggtcggccacgcactaaaactgggctcaggaatccaagctacaccccaaaatggggagaacgcggatcgaagggaggccttcccggccgcgtcctag

SEQ ID NO: 13092 - DNA, 543 bp, Homo sapiens; identical to SEQ ID NO: 8516
  SIMILAR (543)..(469): 681254mologous to Homo sapiens Human secreted protein sequence encoded by gene 4 SEQ ID NO:51,accession number B08894,Smith-Waterman Score=85.

SEQ ID NO: 13093 - DNA, 381 bp, Homo sapiens
  SIMILAR (38)..(106): 691254mologous to Homo sapiens super cysteine rich protein; SCRP,accession number U63332,Smith-Waterman Score=131.
tcatttggatacaattcggaggtggctggtagctggctgctttgtgttttgcatgtgtctatattgttgctgctgctgctgctgctgttgttgttgtttttcatgccagttcaccgtgactttggtctggattctgtgctgatccaactcaaatccctctgactcagccaggctgccagctctagaattcctggtcatcagaatcattgtggttagaatacttgggtcttgatcatttgttatatgcaaggatattaaggtcaaagccatggcgacacgaagggcattggtgaggaaaccagcgaggagtctgcatgagcctgagatgttgctaagctctctgatatctgcggtgagagtgtctacgcgaagattacccat

SEQ ID NO: 13094 - DNA, 421 bp, Homo sapiens
  SIMILAR (264)..(380): 1001254mologous to Homo sapiens similar to 45 kDa secretory protein ; similar to CAA10644.1 (PID:g4164418),accession number AC004832,Smith-Waterman Score=201.
cgacaatgggatgtaatgaccattgttctcgatgccagtaaagccatgcctgggcacatgccaagaggaggttggtgtctgtttacaggacctgcttgggttggcagttcccatggggaagggaagaggcgtggtgggagcttggcccagcttggcaaacaaagccagtgggaacacaagcctgtcctcctccatggccaggggtggaaaaaagagtgtgtaaagccaagccctatgcccctctttccatctgtcccccagatgtcctacgcttcgacaacacctatagctttgtccacgccaagaaggtcagcttcacagtggaggtcctgctccctgacgagggcatgcagaaatatgataaggagctcacccctgtctaggtggctccctcatttctcagagacctcctaaccctttg

SEQ ID NO: 13095 - DNA, 570 bp, Homo sapiens
  SIMILAR (258)..(320): 951254mologous to Rattus norvegicus 45 kDa secretory protein,accession number AJ132352,Smith-Waterman Score=105.
aacatttaataaacagtagtcattattattatactaccattattataatatttactaaaaacaattattatgtaattattattagagtatggttataatagtatgaggtgagaaggttccctccagaggccaggggaggtgatggcatgaagggaaaccctccagagccatctgaaacctcccaacaggagattgcacaggagatggaggtaggagaagatgtgatgtgctctctgaagggttctctcttggttccacagttctttggcctccttgaagagaattacccagagaccctgaagttcatgctcatcgtgaaaggtatgtgacaaattgacttcacttacttgtgcctctgtttcctcatctgtacgctgagggtgataacactgtctttgtcccaggattgttgtgaggcaggttggtttcttggctgtatgcaaatcacttagaatgcctggcatagagtaagttctcaataaatggtaacttctagtgttggccttactgcaagagaaggcagctccagtcccagctctcccagggatcctcccttatttctcctgtcca

SEQ ID NO: 13096 - DNA, 1260 bp, Homo sapiens
  SIMILAR (139)..(1257): 951254mologous to Homo sapiens similar to 45 kDa secretory protein ; similar to CAA10644.1 (PID:g4164418),accession number AC004832,Smith-Waterman Score=1882.
atgagcggccgagttggagacctgagccccaaacaggcagagaccctggccaagttccgagaaaacgtccaggatgtgcttcctgccctgcccaaccctgatgattatttccttctacgctggctccgaggtgagggcagagctcggaattttgacttgcagaagtcggaggctttgctccgcaagggcactgggagcccagtgggatcttaccactcatttccctttcagtacatggagttccggaagaccatggatattgaccatatccttgattggcagcccccagaggtgatccagaagtacatgcctgggggcctgtgtggctatgaccgtgatggctgccccgtgtggtatgacatcattgggccacttgatcccaaggggttgctcttctcagtcaccaagcaggacctgctcaagaccaagatgagggactgtgagcgcatcctgcatgagtgtgacctgcagacagagaggctagggaagaagattgagaccatcgtgatgatatttgactgtgagggcctgggactgaaacacttctggaaacctctggtagaagtgtaccaggagttctttggcctccttgaagagaattacccagagaccctgaagttcatgctcatcgtgaaagctaccaaactgttccctgtgggctacaacctcatgaagccattcctgagtgaggacactcgcaggaaaattattgtgttgggaaataactggaaggaaggtttgctgaaactcatcagtcctgaggaactgcctgcccagtttgggggcaccctgactgacccagatgggaaccccaaatgtttaaccaagattaactatggcggggagatccccaagtccatgtacgtgcgggaccaggtgaagactcagtacgagcactcggtgcagatcaaccgcggctcatcacaccaagtggaatacgagatcctatttccaggctgcgttctcaggtggcagttctcatctgatggtgcggacatcggcttcggagttttcctgaagaccaagatgggggagcgacagcgggcaggggagatgacagatgttctacccagccagcgctataacgcccacatggtgcccgaggatgggaacctcacctgctcagaggccggcgtctatgtcctacgcttcgacaacacctatagctttgtccacgccaagaaggtcagcttcacagtggaggtcctgctccctgacgagggcatgcagaaatatgataaggagctcacccctgtctag

SEQ ID NO: 13097 - DNA, 381 bp, Homo sapiens
  SIMILAR (3489)..(655): 361254mologous to Gallus gallus synemin,accession number U28143,Smith-Waterman Score=1205.
atgaagttcaatcccttcgtgaacttggaccgcagcaaaaaccgcaaacgtcacttccatgcccccttgcacgtgcaccggaagatcatgtcatccccgctctccaaggagctgcggcagaagtacaatgtccgctccacacccatccgcaaggacgacgaggtccaggtagttcaaggacactacaaaggtcagcaaattggcaaggtagtccaggtgtacagaaagaaagatgtcatctacactgagcaggtggttatcaccaggctaaatctcaacaaggatcggaaaaaaattattgaacacaaagccaagtctcgacaagtcagaaaagagaaaggcaaatataaggaggaacttattgagaaaatgcaggaataa

SEQ ID NO: 13098 - DNA, 1146 bp, Homo sapiens
  SIMILAR (367)..(939): 931254mologous to Homo sapiens pyrophosphatase,accession number AB026723,Smith-Waterman Score=988.
atggtatacagcaatgtcctggttcttcacattcactcaccagtcactgactcactcacagcaatttccagtcctgcaagctccattcatggacccttagggatgaaccaaggcaccaagaagccgacgaagccccagaacacgctcatcacaatgagaggcacaagggtcaccatgaagttcaatcccttcgttacctcggaccgcagtaaaaaccgcaaacgtcacttcaatgccccctcacacgtgcgcaggaagatcatgtcatccccgctctccaaggagctgcggcagaagtacaatgtccgctccatgcccatccgcaaggacgacgaggtccagtggtggcggctggactccggcaccatgagcggcttcagcactgaggagcgcgccacgcccttctccctgaagtaccgagtcttcctcaaaaatgagaaaggacaatatatgtctccatttcaagatattccaatttatgcagataaggatgtgttccacgtggtagttgaagtaccactgtggtctaatgcaaaaatggaggttgctacaaaggaccctttaaaccccattaaacaagatgtgaaaaaaagaaaacttcgctatgttgcgaatttgttcccgtataaaggatatgtctggaactatggtgccatccctcagacttgggaagacccagggcacaatgataaacatactggctgttgtggtgacaatgacccaattgatgtgtgtgaaattggaagcaaggtatgtgcaagaggtgaaataattggtgtgaaagttctaggcatattggctatgattgacgaaggggaaaccgactggaaagtcattgccattaatatggatgatcctgatgcaggcaattatactgatatcagtgatgtcaaacggctgaaacccggctacttagaggctactgtggactggtttagaagcactcatgaccattggaaagcattagtgactaagaaaatgaatggaaaaggaatcagctgcatgaacaaaactgtgtctgagagcctgttcaagtgtgatcctgatgctgccagagccattgtggatgctttaccaccaccctgtgaatctgcctgcacagtaccaacagacgtggatacgtggttccatcaccagaagaactaa

SEQ ID NO: 13099 - DNA, 712 bp, Homo sapiens
  SIMILAR (244)..(690): 681254mologous to Rattus norvegicus nuclear RNA helicase,accession number AF063447,Smith-Waterman Score=545.
tcggacagtgaactcaaccgccccagggtcaccatgaagttcaatcccttcgttacctcggaccgcagtaaaaaccgcaaacgtcacttcaatgccccctcacacgtgcgcaggaagatcatgtcatccccgctctccaaggagctgcggcagaagtacaatgtccgctccatgcccatccgcaagaccgacgaggtcccaggtagttcgaggacactacaaaggtcagcaaattggccaaggtagtcccaggtgtaccagaaagaaatatgtcatctacatcgagcggggtgcagcgtgagaaaggccaacggcaccaactgttccacgtggggcatttcacccaaggcaaggtggttattcaccaggctaaaactggacaaggatcggaaaaaaattcttgaacgcaaagccaagtctcgacaagttggaaaagagaaaggcaaatataaagaagaacttattgagaaaatgcaggaataaatagaacctgttgtgcaaccacggtttaaccggagattttgaggctagggtgtgtttctttcgaacttttcggaatgtctggaacatttcatttcctgttttgttacctgtgcctctgtaaatctacttttgcaattttaagtaataattttatgaataaaaatgggaaatgcttcctaattccacatagtatttgcattgttttataaataaattccacttactatca

SEQ ID NO: 13100 - DNA, 556 bp, Homo sapiens
  SIMILAR (450)..(1313): 971254mologous to Homo sapiens nuclear RNA helicase (DEAD family),accession number Z37166,Smith-Waterman Score=1447.
agcttagaagcaaagttaagagactcatcagattctgagctgctgcgggatattttgcagaagactgtgaagcatcctgtgtgtgtgtgaagcacccgccgtcagtcaagaaagcccggtgctttctctcagaactcatcaaaaagccctcgggaggctcagtcacactctccgagagcacagccatcatctcccatggtaccacaggcctggtcacatgggatgccaccctctaccttgcagaatgggccatcgagaacccagcagccttcactaacaggactgtcctagagcttggcagtggtgccggcctcacaggctggccatctgcaagatgtaccgcccccgggcattcatcttcagtgactgtcacagccgggtcctcgagcagctccgagggaatgtccttctcaatggcctctcattagaggcagacatcactgccaacttagacagccccagggtgacagtggcccagctggactgggacgtagcgacggtccatcagctctctgccttccagccagatgttgtcattgcagcagacgtgctgtat

SEQ ID NO: 13101 - DNA, 231 bp, Homo sapiens
  SIMILAR (20)..(196): 321254mologous to Lycopersicon chilense proline-rich protein,accession number U19098,Smith-Waterman Score=75.
ctttttggtgagttctgagagaaagcaccgggcatacttgactgacagccggtgcttcacacacacaggatgcttcacagtctgccaggggaaggaacgcagtgcgcgcgccgccaggaagcggcgctcgaaactctgcagcaagagttcggtccccgcgttctcctcgggcaccaagacgggggcggggccgcagcgttgccgggagaccgggcggaagccgagcctgga

SEQ ID NO: 13102 - DNA, 1506 bp, Homo sapiens; identical to SEQ ID NO: 9565
  SIMILAR (436)..(272): 421254mologous to Onchocerca volvulus pyrrolidone-rich antigen,accession number AF055985,Smith-Waterman Score=90.

SEQ ID NO: 13103 - DNA, 538 bp, Homo sapiens
  SIMILAR (84)..(149): 951254mologous to Homo sapiens unnamed protein product,accession number AK001523,Smith-Waterman Score=96.
tttttttttttgccaacacattctattgcgtgtttaatgttcttgtgaatgcacccttgagatttctctctctcccctccacacagagcttagaagcaaagttaagagactcatcagattctgagctgcggcgggatattttgcagaaggtaagaatcccagagtccctgggactcatgactctgcctcctgaatctctccggaagacctgagagaagaaccgcaggtgtgcttgtaccctttaaaaacacccctgttcaaagaacaaaaccattgagtcagcactgcaggtgggtgtgggcacctccgacggctccagctctttcattttctaagacttagacaaagacatcagaatatacaaaaatctgcatgagagggggggaatctagggaaagttttttaaaccatccacagcaaaaacagagatgacaggtgcaagacagcttctagcatttggtagatgctcagagactttcttttttgcattcatgaggcctgtcctgcccactcctgtctcttctaaacctaaatgggc

SEQ ID NO: 13104 - DNA, 737 bp, Homo sapiens
  SIMILAR (736)..(638): 391254mologous to Homo sapiens Human secreted protein encoded by gene 62,accession number Y36285,Smith-Waterman Score=67.
caattcctgggtcgagcagctccgagggaatgtccttctcaatggcctctcattagaggcagacatcactgccaacttagatagccccagggtgacagtggcccagctggactgggacgtagcgacggtccatcagctctctgccttccagccagatgttgtcattacagcagacgtgctgtattgcccagaagccatcgtgtcgctggtcgggatcctgcggaggctggctgcctgccgggagcaccagcaggctcctgaggtctacgtggcctttaccgtccacaacccagagacgtgccagctgttcaccaccgagctaggccagggtgggatcatatggggaagcggaagttcattcatgaccagaaactgtttccctatgggagagcacttggagatgggcaatgctgaatctcaccctgtaggactcacacacgactccaacgggattgtgagaatcaagtcactctcatgggaagaatttttatatgggaaagcggataaaactttcattggactggaatgtttggagaatgttaatttccaaatcaggaaccacaaactgccctctaataagacatcggctatctaagcgtgtgggtgccccctttctgccagcagttctggttcttaagaaaatcaccataaatcagacatgaaaattctggctccaaaaacagcattttctttgtgcaaataaaaacgtgtgtatcaagtaaaaaaaaaaaaaaaaa

SEQ ID NO: 13105 - DNA, 1473 bp, Homo sapiens
  SIMILAR (1777)..(3156): 911254mologous to Homo sapiens putative p150,accession number U93564,Smith-Waterman Score=2320.
atggcgcctgaggagaacgcgggtaccaaactcttgctgcagagtttcgagcgccgcttcctagcggcgcgcacactgcgctccttcccctggcaggtgggcggcggggcgagcggagaggcctgcggggcttgcggaagtccaggggcagacgggatgggtctccctgctgaaacccccggcgctcctgccacggagggatcacatagcgctttgccaacacattctattgcgtgttttaatgttcctgtgaatgcgcccttgagatttctctctctcccgtccacacggagcttagaagcaaaattaagagactcatcagattctgagctgctgcgggatattttgcagaagcacgaggctgtccacacggagcttttggacgagctgtacgaggcgctggcagagaccctgatggccaaggagtccacccagggccactggagctatttgctgcccagatacccttcctgcacagacaaagtgaaaacccctcggaaggctcggtcacactctccgagcacagccatcatctcccacggtaccacaggcctggtcacatgggacgctgcccgctaccttgcagaatgggccatcaagaacctggcagccttcactaacaggactgtcctagagcttggcagtggcgccggccttacaggcctgtccatctgcaagatgtgccacccccggacatacatcttcagcgactgtcacagccgggtcctcgagcagctccgagggaatgtccttctcaatggcctctcattagaggcagacatcactgccaacttagatagccccagggtgacagtggcccagctggactgggacgtagcgacggtccatcagctctctgccttccagccagatgttgtcattacagcagacgtgctgtattgcccagaagccatcgtgtccctggtcggggtcctgcggaggctggctgcctgctgggagcaccagtgggctcctgaggtctacatggcctttaccgtccgcaacccagagacttgccagctgttcaccaccgagctagcccccagcacctgtgagggtgttctgtcattgtcccatctcaccgacaaaaacactaggacacacagaggccaagagacccccgagctcccgcagattgcagcccggccacctggctttagtgccttcacagtacacccaagccccccattgccaccagattttgccccagctccccctgagcacagcccctcctggcagccatgtgcaaagatgcacccgcagcagcctctgcctgcacacagagacatggacgacccagtgcctgtccacgtggggcagcccgttaactacagagccaacaaacaagccagcacgcgaagacatactgggttccacgacagagtcccgcacaacctcgcacaggaggctggccaggcgtggggctcaggcctgtcatctcagcactttaggaggctaaggcaggaggactaa

SEQ ID NO: 13106 - DNA, 1355 bp, Homo sapiens
  SIMILAR (481)..(621): 741254mologous to Homo sapiens Human secreted protein sequence encoded by gene 10 SEQ ID NO:63,accession number B25674,Smith-Waterman Score=183.
gcagagagctgatcaaaacagcaaaagcaaagcagtgccccggcccagttctaaagccaaccttccttaatcacccagacccatcccagtccaggctcggcttccgcccggtctcccggcaacgctgcggccccgcccccgtcttggtgcccgaggagaacgcggggaccgaactcttgctgcagagtttcgagcgccgcttcctggcggcgcgcgcactgcgttccttcccctggcagagcttagaagcaaagttaagagactcatcagattctgagctgcggcgggatattttgcagaagactgtgaagcatcctgtgtgtgtgaagcacccgccgtcagtcaagtatgcccggtgctttctctcagaactcatcaaaaagcacgaggctgtccacacagagcctttggacgagctgtatgaagcgctggcggagaccctgatggccaaggagtccacccagggccaccggagctatttgctgccctcgggaggctcggtcacactctccgagagcacggccatcatctcctacggtaccacaggcctggtcacatgggacgccgccctctaccttgcagaatgggccatcgagaacccggcagtcttcactaacaggactgtcctagagcttggcagtggtgctggcctcacaggcctggccatctgcaagatgtgccgcccccgggcatacatcttcagcgactgtcacagccgggtcctcgagcagctccgagggaatgtccttctcaatggcctctcattagaggcagacatcactgccaacttagacagccccagggtgacagtggcccagctggactgggacgtagcgacggtccatcagctctctgccttccagccagatgttgtcattgcagcagacgtgctgtattgcccaaaagccatcgtgtcgctggtcgggatcctgcggaggctggctgcctgccgggagcaccagcaggctcctgaggtttacgtggcctttaccgtccacaacccagagacgtgccagctgttcaccaccgagctagcccccagcacctgtgagggtgtgctgtcattgtcccatctcaccgacaaagacattaggacacacagaggccaagcgaccctcgagctcctgcagactgcagcccggccaccaggctctcgtgcctccacaatacacccaagcctcccaatgccacgagcctctgccccagctccccctgagcacagcccctcctggcagccatgtgcacagatgcacccgcagcagcctctgcctgcacacagagacacagacaacccagtgcctgtccacgtggggcagcccgttaactacagagccaacaaacaagccagcacatga

SEQ ID NO: 13107 - DNA, 569 bp, Homo sapiens
  SIMILAR (257)..(538): 581254mologous to Homo sapiens clone 22,accession number AF009424,Smith-Waterman Score=233.
gactcttggagttcctagtgtgttctgtttccaaggggaaaatgcacacgtagcacgcacagaaactcccaggagcccaagctttccattacccacagctctccattgctcagccctcctggatgcgctgggatttggcaaggtgagtggtctgtcataaggaatcagaaaagtacacttttttttctggaattggattttcctgttttcttttttttttcctgggagatggtgttcaaactggtaggaacacacaccaagcgtaactttccttgattctgacacatttatggtcatcattgcgctcaaactgtcttcaagcctctcctcttttccttccagatcatgcatgccccgcggtccagggacaggttcacagcgccgtccttcatccagagggatcgcttcagccgcctctttcctccatcaccagcgcagcaacgcacacaggggcagcagactgcagtttcagcagaacaatgcagagagcacaatagtacccatcaaaggcaaagataggaagcctgggaacctggtctgattccttccaacgtgcacttcagctggag

SEQ ID NO: 13108 - DNA, 8494 bp, Homo sapiens
  SIMILAR (871)..(1968): 891254mologous to Homo sapiens putative p150,accession number U93569,Smith-Waterman Score=1773.
agcggttcaagctctacgttcgtgacatcaaacctcctgttgggccatttccgagaactcccatcagtttctgtatagtgtaaaagtttcagaggcggacacgagagagctgcggctgggacaaggagcacccgcgtgcaggtgcgaccctgcaggatgctggcagcggcgtggccaggggcgcccgtgttctgagggcctgagggccagcccctccacccgcgccatggcctccgcgccctggctggacggctgacgggagcagggaccgccgccgcccaggtgccacacccaggtaccgcccgcccgctgcgagagccgggcaggtgggccgcggatgctcccagaggccggcccagcagagcgatggacttggacaggctaagatggaagtgacctgagcctcgcccggcggcttcctcgacgggacagcgcaagagttggagcacaggcttgtccggggagcagtatgccggaagctggttttcaggccacaaatgctttcacagagtgcaaattcacctgcaccagtggtaaatgcttgtatcttggttcgctggtctgtaaccaacagaacgactgtggggacaacagtgacgaagagaactgtctcctggtgaccgagcacccgcctccgggcatcttcaactcggagctggagttcgcccaaatcatcatcatcgtcgtggtggtcacggtgatggtggtggtcatcgtctgcctgctgaaccactacaaagtctccacgcggtccttcatcaaccgcccgaaccagagccggaggcgggaggacgggctgccgcaggaagggtgcctgtggccttcagacagcgccgcaccgcggctgggcgcctcggagatcatgcatgccccgcggtccagggacaggttcacagcgccgtccttcatccagagggatcgcttcagccgcttccagcccacctacccctatgtgcagcacgagattgatcttcctcccaccatctccctgtccgacggtgaagagccacctccttaccaggggccctgcaccctgcagctccgggaccctgaacagcagatggaactcaaccgagagtccgtgagggccccacccaaccgaaccatatttgacagtgatttaatagacattgctatgtatagcgggggtccatgcccacccagcagcaactcgggcatcagtgcaagcacctgcagcagtaacgggaggatggaggggccaccccccacatacagcgaggtgatgggccaccacccaggcgcctctttcctccatcaccagcgcagcaacgcacacaggggcagcagactgcagtttcagcagaacaatgcagagagcacaatagtacccatcaaaggcaaagataggaagcctgggaacctggtctgattccttccaacgtgcacttcagctggagaaagaaaccaagaagggaagcggccgctgggcccctcctgcgcacagtgttgttcagtttcacatggtacaaataagtaaaaccaaatgagcaaacacggtctttgtttctgattccttttaggggaattgcatgcaaactagactgaaatgatacaaacttccatctggtctgaccgcaaacagtgtttatttggggacaggggttgggatgggggtgtgggcaggggaaaacagagaacgggatgctttgaagataccatgaaataaaacccacagaggtatttgatgtatttaattgtgaaaggagactttgcagataaatgaggccagaatggcatgttttataattaactgaataaagaaggaagcattattatatattattgtggggaagaaccagccagttcgctttttctcctaaggtgtggacttttattttgttttaaaaatatgaatcaaaattcctgtgttgtgtgccaaggtataaagtggagaagttagatgagtgcaaggagctcctttgtgttgtgatgatgtgttttaaaagttgcactatcttaatgttgaaaatatttacaagggaactgttttacgtgaagttctgtatgttgtcttttcacctgtggattgtaatcaggcccaaggaatatcctggagtggtccccagaagcatccaagaaaagatatttggggacgtagcctaacattttaccaacttacgtaaatcaaaaaagtcattattgttgcaggagtttgcatcaaatagcagtgcatcgctgaagcttttggagacttttggatggaagataagatagggaagattaagttccagcatttctgacttgttattttgagttactctgctactcttaggctgcatagtttatgagaaaatgaacacatgcatttatggatccagtatcatgcagtgctgccctcatcctccagcagtgcaatttcttcagtaatttagatttttttcactatagcatgaaatatattcaaatacataccttattttatgcaataaattgtttaaaatgcaaggtggttattctgcatactgttgaaatatgtgactcctcagtatattcccattgcctctccccctttcctcgacagcttagttcagttctgcagggctgctcagttcacaggaggctcccagcagccaccccacatccagcctacacagaactttcgtgtgggagtggtgtgggtggtggttttcttatgctttggaagcccctagaaataatgacggaagaatgccatgttgctgatcgtggtaataagccattgtgggttattgtatgtcactagtattagcatagcattcttaaaggaatgcagtgttcaaaacctacccaaattccccgcaggattttaccaaacccttccccaggccagttttgtactgaaggcaagaactggacagtcagagaacagtggagggggcaagtgactgaagagcaccgggtaaaaagcacaacatgcagttaaaatgcaaactagaaaactaattttaaatattgttagttttaatatttcctgatatttacaaatattcattcttatatacaatgaaaaaaataactttcttctgcagatgtaagcactggcttttataagagcagcagccaacacgtttagcagacactgcgcgtggagaagggcttatctgcagtacactctgccatgtggagggtgggcctctgtggcctcttcacataacaagatgagctggaatgatgattccatgactcccacctatgcagccttaaagccaaatccgcgtgtgtgtgtttgtgtctgtctgtgggtctcgaaggtgatccgtcggtgcggtggctctgtgctgtaactggagagactgttccaaaccccaagagttgtctgatcctagtctgttcccttctgcttcttacctctgtagataggtcactggtttttgtttgtttgttttgaggattggaatttccattacattcatcctttgcacacagtaacatccacagaactagtccaactcttaaaaggagagaggaaaaacacaggcaccagttgtcagctcatgcttacaacctgtgtggaagtatatacagttgagagtcacagtggaggttctgagactggattcagtcttgttccagtgacagttggaaggcctctgctggagagacaccagctctcagggcagagattggcttggggccagaaggaccctccccaaccctggagacaccctgaaggttcactggctctccagattagcctctcttcctctgtcaggcaaagatgaggagcccgtgttcccatcgggccctgctggcagggacttgcagtggattcttggtcaggtgtgcccacagatgcggaggcgaggtgagtgattccatcatttcagttctcacctgcagttttggtgaagcaggagatgcaccccacagctctagctctcaaatggcttcacagtccttacttctctacctgcctcaagaaggggctcagagcagagacttgtgaattccttagtaactgtgagtatatgaatgtgttgcacatgtccacagtattggcgagataattacataattcagatacctttaatcatctttcaagaaagaggctcctcccattcaaccaccctagagaactgcctttgttaaatagttatttaaagactcatacatatcaaaccatgactttgaaaggtcttcgaggctggggctctgtaatgaattagtttaaaagccaaggtcataacatgaattgatggtcaatttcccttcagcagaaggaaaaggtgatttagatcagtagctcttttgaaggttgtggctgacctgttcataccgtgtcgcctcatggctagtgtggcgttgaaagagtagcgactgggaagatacaacttacacagtggggcctattgttctttcaagaaccctttttttagcttatagaacccatgggtccagtttagtaacgagtgatttaggcaatcaatgataggtttataatcttagattattccagcaaagtgtggattgcattgttaggaagaacatttggtgggaatgaacactcctgggcataccgctgacttttgtcccttgttcccggtgtaggagacccaaggcatcttgaatcccatctataagaacacaatcttccagcatacgtttgctttttcagaaactctagcattctctttaaatactgacgcaatccttaatggaaaagagatttcatgaagcaaattatgtatttcaatagttcttctatttttagtgtccaaaatttactaatacagaagcttgacaagcatgtcctcaccctccccaccacataaacacatggacacacacccaagccacaagaaatcccaagagagcagaagcgaatttttaaaagatttatcgtgaggactgcatttccattcactaattttggctcaaacttatgaggcaggaaataggggccaacagtaaatgggggaggcctcctgacaccagcagaggaattttgtacccaggcgaggacttcttgaacttctgcgtatctccgtttgatctctttcacctttatttcatcttcataagaatgagaaaggctcaaaaggaagcacttttagaaatcttctctgacctagaagaatccatccaaatccctgccttcctctctgaaccaacagttcccttctctgacagggggccatcctctatcttccatccagcggctcttccttttaggaaggctctggtgcagagcacttcaaatatgtcctcaggccagatactgattgctagtagagagacacccggcacccagtccgaagccctccctcaaaggaccggcttatggcgttggtcactggcaggctcagagacattctactgtgggcgcagggagcccggccccccatgcagccatgactggatgcgcccccatctcgggggcttgctgcactgcttgtttattgaattttgctacttagaatggcaacattaactttgtgtaccattcattttttaaaaattttccaaagctcggcagtgtatgaaagaaaaaactgggaaagatacttggtttctgttaacttttgtgttgcttgcttaagtgattaaagccagtgcttggagccaagccttcatgccacgaacatgctccacagcctgccctttgctctcctgctcacactgaccaagaatgccgcgtgcttggcctactgaggtgaaaggacaattgaatgacaggtgggcaaagggagaacttccccttcttggtgcgaggaaagtcacaaatttaaaaatgttgcttccagcccagatcctaaatgctagttctcagcagctgcgtggcttaccgttcgccatttccaccaccgccagctgccagcaccgctacagatcacagagatgtgaacagacaatggaaagcactcttagccttgcagtggtctacattttttaggaaccaatatttcagcattctttattacccggcacgctgtgtcctttgcagagttcaagtttatgttactgccagggtcagacagtcatttgctgctgctgctgctgctgctgctgcttctcgaactggatgcattaggaagctgctgtctgagtgtaggaatgtcttgctaagaaagcaatgtcttccttcatccttttctttcttccctctgcgtgtccttgtttttgtgtaatgcgggagagggttagagctatagagattatatatacactatccgtgcacattatatatatgtagatatacccctatcatgtcagagatctgcatgtcagtttttcagcaactaaggtgcctcatgttctgagttcagcagatataggaaccaagccgccccctcctgcacttgatgctcccacctttgttgtgcctcacttaaaatggtgcttttttcagttgtctgtcttttcttatgtttttatttgtaaggtgctgtatataagttgaatatattatgcacatatcctacccaatgggtagaacaaaaagttgttaatactgtaatataatgtatagatgataccaattttaacagaaatggcatagaatttgtgaatgcctatgtgctttgtcctcttttgtaaggaaatttgcaaatggatgcatacagattaaagtctatgtagtttattttcctattaaatatcaatattataacacaagagaaagaagtgtgaacaaacaagcaacagtttatgaccagcgtatatatagcaatggaaagttgcatctttgctgtgaaaacactttaaagaaaatactttttaaaaaatcccacagctttttggttgccactagacgcttcttattttaatcattttagtaatgctcagctggaccagtgttagttatatttgagtcagaaaaatgttgtttttcaacttgctttataatctcctgcatctatctcctgctgtagcatcaygaaggtgtcaggcaacagtgaaaagtgcacatttttgttgttgcagaaactgtgtcagaggaataagtaaatcagcctgcagcagaagactttgttcagctccagaggcatctgtgaccgtctgtgtccaagtctctctgtgcctttttcttttacaaactgaagctgtggagccaatgaagtaacagtagagattgtagggaaagaatacctcaggaaaaacaaatacacttacaagaagaccctgttcttagaaaatgtgtttagttatgggttagcactagaagagacttggctgtcagccagccaagtgaaggacctctcatccattcccattcatgtcccatcataatacggacmcaaaaagcaaactcggttttgccatcagttagaaattacgttttggattgtatattgttacatctctcttccagcttagtttttagtgtctgattgtgacctctgcatttatcttcaaataccctaattttaaaacaaaagaacaagaaaagtttataacaccatgttcactaaaaccacggttgaatcttgggtgtgggcatcctttcgagtgttgtccataagagcagttcgtggaattttgcccatctgacccatattatcagcttattctgccaccagagtagagtctaataaattccaaagtttttatttgctccatggtgtatgttctgactttgaaaatgtcagattctataatcatacccctaacatccaggagacaaatgacagattatctttaaactgaaattgactctacaatgcaacccttaatgctgaatggattaaaaaagtcagcccttttagtatctgtttgaaagggccgtaaaaagttgacacttttgttgttgtggatcctgcgtgtctagacccacgtgttgtttccatcgtatactgtagggtgcaccccttgggattcatcattaagaactgaggctcactgttgtcagaaacaaagctcccaccccccaggttcaaccttgtgggagaactgttgagcatgagaatgttctagactcagaggtactaaaatttgttaccacatcattgcttcctttctacaggacgaattgaggcttaaactttactgttaatgatactggttcattttaatgtgcttgttggtatgttgctatttttcatttcatagctttcaaaaatcatgctaattgtatacttgtctagtttaaggctattttaaaatatgtacaatactattcacagcatttagttcgtttaatttttattataaagcaatctactaaaaaagtacaactgtatttgaacttttcaatagttgtttgtgagctatgataatcaaaagtcattaaagtcttttttaacaaacattcgtgcttacttttcaacataattcccagttatatacagaaaaagatttccacctgtcacgtatctgcctcttttacctgagcaatggtgtagttcttagacctaaggtctgtaattgcaatacttttaaagaaagatgttgctctaagtgctgtttgttagttatgaaatcagatttttctgcttgttcttaatgctgtggtcaaaccatagcacaaaatcattaaaaataatcagcggcatac

SEQ ID NO: 13109 - DNA, 8440 bp, Homo sapiens
  SIMILAR (201)..(365): 981254mologous to Homo sapiens dJ75K24.1 (novel protein similar to SH3BGR (SH3 domain binding glutamic acid-rich protein) and SH3BGRL),accession number AL035700,Smith-Waterman Score=289.
agcggttcaagctctacgttcgtgacatcaaacctcctgttgggccatttccgagaactcccatcagtttctgtatagtgtaaaagtttcagaggcggacacgagagagctgcggctgggacaaggagcacccgcgtgcaggtgcgaccctgcaggatgctggcagcggcgtggccaggggcgcccgtgttctgagggcctgagggccagcccctccacccgcgccatggcctccgcgccctggctggacggctgacgggagcagggaccgccgccgcccaggtgccacacccaggtaccgcccgcccgctgcgagagccgggcaggtgggccgcggatgctcccagaggccggcccagcagagcgatggacttggacaggctaagatggaagtgacctgagcctcgcccggcggcttcctcgacgggacagcgcaagagttggagcacaggcttgtccggggagcagtatgccggaagctggttttcaggccacaaatgctttcacagagtgcaaattcacctgcaccagtggtaaatgcttgtatcttggttcgctggtctgtaaccaacagaacgactgtggggacaacagtgacgaagagaactgtctcctggtgaccgagcacccgcctccgggcatcttcaactcggagctggagttcgcccaaatcatcatcatcgtcgtggtggtcacggtgatggtggtggtcatcgtctgcctgctgaaccactacaaagtctccacgcggtccttcatcaaccgcccgaaccagagccggaggcgggaggacgggctgccgcagatcatgcatgccccgcggtccagggacaggttcacagcgccgtccttcatccagagggatcgcttcagccgcttccagcccacctacccctatgtgcagcacgagattgatcttcctcccaccatctccctgtccgacggtgaagagccacctccttaccaggggccctgcaccctgcagctccgggaccctgaacagcagatggaactcaaccgagagtccgtgagggccccacccaaccgaaccatatttgacagtgatttaatagacattgctatgtatagcgggggtccatgcccacccagcagcaactcgggcatcagtgcaagcacctgcagcagtaacgggaggatggaggggccaccccccacatacagcgaggtgatgggccaccacccaggcgcctctttcctccatcaccagcgcagcaacgcacacaggggcagcagactgcagtttcagcagaacaatgcagagagcacaatagtacccatcaaaggcaaagataggaagcctgggaacctggtctgattccttccaacgtgcacttcagctggagaaagaaaccaagaagggaagcggccgctgggcccctcctgcgcacagtgttgttcagtttcacatggtacaaataagtaaaaccaaatgagcaaacacggtctttgtttctgattccttttaggggaattgcatgcaaactagactgaaatgatacaaacttccatctggtctgaccgcaaacagtgtttatttggggacaggggttgggatgggggtgtgggcaggggaaaacagagaacgggatgctttgaagataccatgaaataaaacccacagaggtatttgatgtatttaattgtgaaaggagactttgcagataaatgaggccagaatggcatgttttataattaactgaataaagaaggaagcattattatatattattgtggggaagaaccagccagttcgctttttctcctaaggtgtggacttttattttgttttaaaaatatgaatcaaaattcctgtgttgtgtgccaaggtataaagtggagaagttagatgagtgcaaggagctcctttgtgttgtgatgatgtgttttaaaagttgcactatcttaatgttgaaaatatttacaagggaactgttttacgtgaagttctgtatgttgtcttttcacctgtggattgtaatcaggcccaaggaatatcctggagtggtccccagaagcatccaagaaaagatatttggggacgtagcctaacattttaccaacttacgtaaatcaaaaaagtcattattgttgcaggagtttgcatcaaatagcagtgcatcgctgaagcttttggagacttttggatggaagataagatagggaagattaagttccagcatttctgacttgttattttgagttactctgctactcttaggctgcatagtttatgagaaaatgaacacatgcatttatggatccagtatcatgcagtgctgccctcatcctccagcagtgcaatttcttcagtaatttagatttttttcactatagcatgaaatatattcaaatacataccttattttatgcaataaattgtttaaaatgcaaggtggttattctgcatactgttgaaatatgtgactcctcagtatattcccattgcctctccccctttcctcgacagcttagttcagttctgcagggctgctcagttcacaggaggctcccagcagccaccccacatccagcctacacagaactttcgtgtgggagtggtgtgggtggtggttttcttatgctttggaagcccctagaaataatgacggaagaatgccatgttgctgatcgtggtaataagccattgtgggttattgtatgtcactagtattagcatagcattcttaaaggaatgcagtgttcaaaacctacccaaattccccgcaggattttaccaaacccttccccaggccagttttgtactgaaggcaagaactggacagtcagagaacagtggagggggcaagtgactgaagagcaccgggtaaaaagcacaacatgcagttaaaatgcaaactagaaaactaattttaaatattgttagttttaatatttcctgatatttacaaatattcattcttatatacaatgaaaaaaataactttcttctgcagatgtaagcactggcttttataagagcagcagccaacacgtttagcagacactgcgcgtggagaagggcttatctgcagtacactctgccatgtggagggtgggcctctgtggcctcttcacataacaagatgagctggaatgatgattccatgactcccacctatgcagccttaaagccaaatccgcgtgtgtgtgtttgtgtctgtctgtgggtctcgaaggtgatccgtcggtgcggtggctctgtgctgtaactggagagactgttccaaaccccaagagttgtctgatcctagtctgttcccttctgcttcttacctctgtagataggtcactggtttttgtttgtttgttttgaggattggaatttccattacattcatcctttgcacacagtaacatccacagaactagtccaactcttaaaaggagagaggaaaaacacaggcaccagttgtcagctcatgcttacaacctgtgtggaagtatatacagttgagagtcacagtggaggttctgagactggattcagtcttgttccagtgacagttggaaggcctctgctggagagacaccagctctcagggcagagattggcttggggccagaaggaccctccccaaccctggagacaccctgaaggttcactggctctccagattagcctctcttcctctgtcaggcaaagatgaggagcccgtgttcccatcgggccctgctggcagggacttgcagtggattcttggtcaggtgtgcccacagatgcggaggcgaggtgagtgattccatcatttcagttctcacctgcagttttggtgaagcaggagatgcaccccacagctctagctctcaaatggcttcacagtccttacttctctacctgcctcaagaaggggctcagagcagagacttgtgaattccttagtaactgtgagtatatgaatgtgttgcacatgtccacagtattggcgagataattacataattcagatacctttaatcatctttcaagaaagaggctcctcccattcaaccaccctagagaactgcctttgttaaatagttatttaaagactcatacatatcaaaccatgactttgaaaggtcttcgaggctggggctctgtaatgaattagtttaaaagccaaggtcataacatgaattgatggtcaatttcccttcagcagaaggaaaaggtgatttagatcagtagctcttttgaaggttgtggctgacctgttcataccgtgtcgcctcatggctagtgtggcgttgaaagagtagcgactgggaagatacaacttacacagtggggcctattgttctttcaagaaccctttttttagcttatagaacccatgggtccagtttagtaacgagtgatttaggcaatcaatgataggtttataatcttagattattccagcaaagtgtggattgcattgttaggaagaacatttggtgggaatgaacactcctgggcataccgctgacttttgtcccttgttcccggtgtaggagacccaaggcatcttgaatcccatctataagaacacaatcttccagcatacgtttgctttttcagaaactctagcattctctttaaatactgacgcaatccttaatggaaaagagatttcatgaagcaaattatgtatttcaatagttcttctatttttagtgtccaaaatttactaatacagaagcttgacaagcatgtcctcaccctccccaccacataaacacatggacacacacccaagccacaagaaatcccaagagagcagaagcgaatttttaaaagatttatcgtgaggactgcatttccattcactaattttggctcaaacttatgaggcaggaaataggggccaacagtaaatgggggaggcctcctgacaccagcagaggaattttgtacccaggcgaggacttcttgaacttctgcgtatctccgtttgatctctttcacctttatttcatcttcataagaatgagaaaggctcaaaaggaagcacttttagaaatcttctctgacctagaagaatccatccaaatccctgccttcctctctgaaccaacagttcccttctctgacagggggccatcctctatcttccatccagcggctcttccttttaggaaggctctggtgcagagcacttcaaatatgtcctcaggccagatactgattgctagtagagagacacccggcacccagtccgaagccctccctcaaaggaccggcttatggcgttggtcactggcaggctcagagacattctactgtgggcgcagggagcccggccccccatgcagccatgactggatgcgcccccatctcgggggcttgctgcactgcttgtttattgaattttgctacttagaatggcaacattaactttgtgtaccattcattttttaaaaattttccaaagctcggcagtgtatgaaagaaaaaactgggaaagatacttggtttctgttaacttttgtgttgcttgcttaagtgattaaagccagtgcttggagccaagccttcatgccacgaacatgctccacagcctgccctttgctctcctgctcacactgaccaagaatgccgcgtgcttggcctactgaggtgaaaggacaattgaatgacaggtgggcaaagggagaacttccccttcttggtgcgaggaaagtcacaaatttaaaaatgttgcttccagcccagatcctaaatgctagttctcagcagctgcgtggcttaccgttcgccatttccaccaccgccagctgccagcaccgctacagatcacagagatgtgaacagacaatggaaagcactcttagccttgcagtggtctacattttttaggaaccaatatttcagcattctttattacccggcacgctgtgtcctttgcagagttcaagtttatgttactgccagggtcagacagtcatttgctgctgctgctgctgctgctgctgcttctcgaactggatgcattaggaagctgctgtctgagtgtaggaatgtcttgctaagaaagcaatgtcttccttcatccttttctttcttccctctgcgtgtccttgtttttgtgtaatgcgggagagggttagagctatagagattatatatacactatccgtgcacattatatatatgtagatatacccctatcatgtcagagatctgcatgtcagtttttcagcaactaaggtgcctcatgttctgagttcagcagatataggaaccaagccgccccctcctgcacttgatgctcccacctttgttgtgcctcacttaaaatggtgcttttttcagttgtctgtcttttcttatgtttttatttgtaaggtgctgtatataagttgaatatattatgcacatatcctacccaatgggtagaacaaaaagttgttaatactgtaatataatgtatagatgataccaattttaacagaaatggcatagaatttgtgaatgcctatgtgctttgtcctcttttgtaaggaaatttgcaaatggatgcatacagattaaagtctatgtagtttattttcctattaaatatcaatattataacacaagagaaagaagtgtgaacaaacaagcaacagtttatgaccagcgtatatatagcaatggaaagttgcatctttgctgtgaaaacactttaaagaaaatactttttaaaaaatcccacagctttttggttgccactagacgcttcttattttaatcattttagtaatgctcagctggaccagtgttagttatatttgagtcagaaaaatgttgtttttcaacttgctttataatctcctgcatctatctcctgctgtagcatcaygaaggtgtcaggcaacagtgaaaagtgcacatttttgttgttgcagaaactgtgtcagaggaataagtaaatcagcctgcagcagaagactttgttcagctccagaggcatctgtgaccgtctgtgtccaagtctctctgtgcctttttcttttacaaactgaagctgtggagccaatgaagtaacagtagagattgtagggaaagaatacctcaggaaaaacaaatacacttacaagaagaccctgttcttagaaaatgtgtttagttatgggttagcactagaagagacttggctgtcagccagccaagtgaaggacctctcatccattcccattcatgtcccatcataatacggacmcaaaaagcaaactcggttttgccatcagttagaaattacgttttggattgtatattgttacatctctcttccagcttagtttttagtgtctgattgtgacctctgcatttatcttcaaataccctaattttaaaacaaaagaacaagaaaagtttataacaccatgttcactaaaaccacggttgaatcttgggtgtgggcatcctttcgagtgttgtccataagagcagttcgtggaattttgcccatctgacccatattatcagcttattctgccaccagagtagagtctaataaattccaaagtttttatttgctccatggtgtatgttctgactttgaaaatgtcagattctataatcatacccctaacatccaggagacaaatgacagattatctttaaactgaaattgactctacaatgcaacccttaatgctgaatggattaaaaaagtcagcccttttagtatctgtttgaaagggccgtaaaaagttgacacttttgttgttgtggatcctgcgtgtctagacccacgtgttgtttccatcgtatactgtagggtgcaccccttgggattcatcattaagaactgaggctcactgttgtcagaaacaaagctcccaccccccaggttcaaccttgtgggagaactgttgagcatgagaatgttctagactcagaggtactaaaatttgttaccacatcattgcttcctttctacaggacgaattgaggcttaaactttactgttaatgatactggttcattttaatgtgcttgttggtatgttgctatttttcatttcatagctttcaaaaatcatgctaattgtatacttgtctagtttaaggctattttaaaatatgtacaatactattcacagcatttagttcgtttaatttttattataaagcaatctactaaaaaagtacaactgtatttgaacttttcaatagttgtttgtgagctatgataatcaaaagtcattaaagtcttttttaacaaacattcgtgcttacttttcaacataattcccagttatatacagaaaaagatttccacctgtcacgtatctgcctcttttacctgagcaatggtgtagttcttagacctaaggtctgtaattgcaatacttttaaagaaagatgttgctctaagtgctgtttgttagttatgaaatcagatttttctgcttgttcttaatgctgtggtcaaaccatagcacaaaatcattaaaaataatcagcggcatac

SEQ ID NO: 13110 - DNA, 4317 bp, Homo sapiens; identical to SEQ ID NO: 3622
  SIMILAR (123)..(551): 251254mologous to Homo sapiens alias DLC1; candidate tumor suppressor gene,accession number AB020522,Smith-Waterman Score=98.

SEQ ID NO: 13111 - DNA, 510 bp, Homo sapiens; identical to SEQ ID NO: 12007
  SIMILAR (2)..(439): 651254mologous to Homo sapiens putative oncogene protein hlc14-06-p,accession number AF026816,Smith-Waterman Score=432.

SEQ ID NO: 13112 - DNA, 333 bp, Homo sapiens
  SIMILAR (121)..(258): 931254mologous to synthetic construct chloramphenicol acetyltransferase,accession number A02739,Smith-Waterman Score=244.
aatcgaagctgtaaaactaaaaatgttcttcaaatggagccccagatgcagtccatgaataagatctaccgtggacccctggaccggcctgctagcccatgctccaatgttaatgagggggggcaaatatatacgcaaggcgacaaggtgctgatgccgctggcgatcagggttcatcatgccgtttgtgatggcttccatgtcggcagaatgcttaatgaattacaacagtactgcgatgagtggcagggcggggcactggccaaaggaactcgattgttcgtgctgtcttatcaggcaaaaagtgagcgacagtatcaggtggttggttga

SEQ ID NO: 13113 - DNA, 477 bp, Homo sapiens
  SIMILAR (7)..(183): 331254mologous to Homo sapiens salivary proline-rich protein 1,accession number K02576,Smith-Waterman Score=92.
atggcgccagcccatgccatcaccctcacagagccccgggtatgcttgaccattgagggccaggaggttaactgtctcctggacactgcaatatggagagaaagggaattcctaacttccaagggaacacctatcaaacatcaggaagccattaagagattattattggctgtacagaaacctaaagaggtggcagtcttacactgctgggatcatcagaaaggaaaggaaagggaaatagaagggaaccaccaagcggatattgaaactaaaagagctgcaagaattgaagctgtaaaactacaaatcgttcttcaaatggagccccagatgcagtccatgactaagatctactgcggacccctggaccggcccactagcccatgctttgatgttgatgacattgaaggcacccctcacgaggaaatctcaactgcacgacccctactatgccccaattcagcaggaagcagttaa

SEQ ID NO: 13114 - DNA, 8041 bp, Homo sapiens
  SIMILAR (130)..(414): 1001254mologous to Homo sapiens dJ1103G7.2 (novel protein),accession number AL034548,Smith-Waterman Score=484.
ctcagctccctgtggtgggggatggcagaggcttcccgctccccgcagctggtttgcacagcctcccgactgtgccgtggtgtctccttccctaaagtgggacagtcgtttctgtgtcctgctggcctctgaggaacagacgtgtgtgagaggccttcagggcctgatggctggggtggtgacagtgcctggagaatgggtggggactggaggggccaggtggctaaccactctcctcttccatggcagcggagctggagttcgcccaaatcatcatcatcgtcgtggtggtcacggtgatggtggtggtcatcgtctgcctgctgaaccactacaaagtctccacgcggtccttcatcaaccgcccgaaccagagccggaggcgggaggacgggctgccgcagatcatgcatgccccgcggtccagggacaggttcacagcgccgtccttcatccagagggatcgcttcagccgcttccagcccacctacccctatgtgcagcacgagattgatcttcctcccaccatctccctgtccgacgggtgaagagccacttctttaccaggtgccttgcaccttgcagctccgggaccctgaacagcagatggaactcaaccgagagtccgtgagggccccacccaaccgaaccatatttgacagtggatttaatagacattgctatgtatagcgggggtccatgcccacccagcagcaactcgggcatcagtgcaagcacctgcagcagtaacgggaggatggaggggccaccccccacatacagcgaggtgatgggccaccacccaggcgcctctttcctccatcaccagcgcagcaacgcacacaggggcagcagactgcagtttcagcagaacaatgcagagagcacaatagtacccatcaaaggcaaagataggaagcctgggaacctggtctgattccttccaacgtgcacttcagctggagaaagaaaccaagaagggaagcggccgctgggcccctcctgcgcacagtgttgttcagtttcacatggtacaaataagtaaaaccaaatgagcaaacacggtctttgtttctgattccttttaggggaattgcatgcaaactagactgaaatgatacaaacttccatctggtctgaccgcaaacagtgtttatttggggacaggggttgggatgggggtgtgggcaggggaaaacagagaacgggatgctttgaagataccatgaaataaaacccacagaggtatttgatgtatttaattgtgaaaggagactttgcagataaatgaggccagaatggcatgttttataattaactgaataaagaaggaagcattattatatattattgtggggaagaaccagccagttcgctttttctcctaaggtgtggacttttattttgttttaaaaatatgaatcaaaattcctgtgttgtgtgccaaggtataaagtggagaagttagatgagtgcaaggagctcctttgtgttgtgatgatgtgttttaaaagttgcactatcttaatgttgaaaatatttacaagggaactgttttacgtgaagttctgtatgttgtcttttcacctgtggattgtaatcaggcccaaggaatatcctggagtggtccccagaagcatccaagaaaagatatttggggacgtagcctaacattttaccaacttacgtaaatcaaaaaagtcattattgttgcaggagtttgcatcaaatagcagtgcatcgctgaagcttttggagacttttggatggaagataagatagggaagattaagttccagcatttctgacttgttattttgagttactctgctactcttaggctgcatagtttatgagaaaatgaacacatgcatttatggatccagtatcatgcagtgctgccctcatcctccagcagtgcaatttcttcagtaatttagatttttttcactatagcatgaaatatattcaaatacataccttattttatgcaataaattgtttaaaatgcaaggtggttattctgcatactgttgaaatatgtgactcctcagtatattcccattgcctctccccctttcctcgacagcttagttcagttctgcagggctgctcagttcacaggaggctcccagcagccaccccacatccagcctacacagaactttcgtgtgggagtggtgtgggtggtggttttcttatgctttggaagcccctagaaataatgacggaagaatgccatgttgctgatcgtggtaataagccattgtgggttattgtatgtcactagtattagcatagcattcttaaaggaatgcagtgttcaaaacctacccaaattccccgcaggattttaccaaacccttccccaggccagttttgtactgaaggcaagaactggacagtcagagaacagtggagggggcaagtgactgaagagcaccgggtaaaaagcacaacatgcagttaaaatgcaaactagaaaactaattttaaatattgttagttttaatatttcctgatatttacaaatattcattcttatatacaatgaaaaaaataactttcttctgcagatgtaagcactggcttttataagagcagcagccaacacgtttagcagacactgcgcgtggagaagggcttatctgcagtacactctgccatgtggagggtgggcctctgtggcctcttcacataacaagatgagctggaatgatgattccatgactcccacctatgcagccttaaagccaaatccgcgtgtgtgtgtttgtgtctgtctgtgggtctcgaaggtgatccgtcggtgcggtggctctgtgctgtaactggagagactgttccaaaccccaagagttgtctgatcctagtctgttcccttctgcttcttacctctgtagataggtcactggtttttgtttgtttgttttgaggattggaatttccattacattcatcctttgcacacagtaacatccacagaactagtccaactcttaaaaggagagaggaaaaacacaggcaccagttgtcagctcatgcttacaacctgtgtggaagtatatacagttgagagtcacagtggaggttctgagactggattcagtcttgttccagtgacagttggaaggcctctgctggagagacaccagctctcagggcagagattggcttggggccagaaggaccctccccaaccctggagacaccctgaaggttcactggctctccagattagcctctcttcctctgtcaggcaaagatgaggagcccgtgttcccatcgggccctgctggcagggacttgcagtggattcttggtcaggtgtgcccacagatgcggaggcgaggtgagtgattccatcatttcagttctcacctgcagttttggtgaagcaggagatgcaccccacagctctagctctcaaatggcttcacagtccttacttctctacctgcctcaagaaggggctcagagcagagacttgtgaattccttagtaactgtgagtatatgaatgtgttgcacatgtccacagtattggcgagataattacataattcagatacctttaatcatctttcaagaaagaggctcctcccattcaaccaccctagagaactgcctttgttaaatagttatttaaagactcatacatatcaaaccatgactttgaaaggtcttcgaggctggggctctgtaatgaattagtttaaaagccaaggtcataacatgaattgatggtcaatttcccttcagcagaaggaaaaggtgatttagatcagtagctcttttgaaggttgtggctgacctgttcataccgtgtcgcctcatggctagtgtggcgttgaaagagtagcgactgggaagatacaacttacacagtggggcctattgttctttcaagaaccctttttttagcttatagaacccatgggtccagtttagtaacgagtgatttaggcaatcaatgataggtttataatcttagattattccagcaaagtgtggattgcattgttaggaagaacatttggtgggaatgaacactcctgggcataccgctgacttttgtcccttgttcccggtgtaggagacccaaggcatcttgaatcccatctataagaacacaatcttccagcatacgtttgctttttcagaaactctagcattctctttaaatactgacgcaatccttaatggaaaagagatttcatgaagcaaattatgtatttcaatagttcttctatttttagtgtccaaaatttactaatacagaagcttgacaagcatgtcctcaccctccccaccacataaacacatggacacacacccaagccacaagaaatcccaagagagcagaagcgaatttttaaaagatttatcgtgaggactgcatttccattcactaattttggctcaaacttatgaggcaggaaataggggccaacagtaaatgggggaggcctcctgacaccagcagaggaattttgtacccaggcgaggacttcttgaacttctgcgtatctccgtttgatctctttcacctttatttcatcttcataagaatgagaaaggctcaaaaggaagcacttttagaaatcttctctgacctagaagaatccatccaaatccctgccttcctctctgaaccaacagttcccttctctgacagggggccatcctctatcttccatccagcggctcttccttttaggaaggctctggtgcagagcacttcaaatatgtcctcaggccagatactgattgctagtagagagacacccggcacccagtccgaagccctccctcaaaggaccggcttatggcgttggtcactggcaggctcagagacattctactgtgggcgcagggagcccggccccccatgcagccatgactggatgcgcccccatctcgggggcttgctgcactgcttgtttattgaattttgctacttagaatggcaacattaactttgtgtaccattcattttttaaaaattttccaaagctcggcagtgtatgaaagaaaaaactgggaaagatacttggtttctgttaacttttgtgttgcttgcttaagtgattaaagccagtgcttggagccaagccttcatgccacgaacatgctccacagcctgccctttgctctcctgctcacactgaccaagaatgccgcgtgcttggcctactgaggtgaaaggacaattgaatgacaggtgggcaaagggagaacttccccttcttggtgcgaggaaagtcacaaatttaaaaatgttgcttccagcccagatcctaaatgctagttctcagcagctgcgtggcttaccgttcgccatttccaccaccgccagctgccagcaccgctacagatcacagagatgtgaacagacaatggaaagcactcttagccttgcagtggtctacattttttaggaaccaatatttcagcattctttattacccggcacgctgtgtcctttgcagagttcaagtttatgttactgccagggtcagacagtcatttgctgctgctgctgctgctgctgctgcttctcgaactggatgcattaggaagctgctgtctgagtgtaggaatgtcttgctaagaaagcaatgtcttccttcatccttttctttcttccctctgcgtgtccttgtttttgtgtaatgcgggagagggttagagctatagagattatatatacactatccgtgcacattatatatatgtagatatacccctatcatgtcagagatctgcatgtcagtttttcagcaactaaggtgcctcatgttctgagttcagcagatataggaaccaagccgccccctcctgcacttgatgctcccacctttgttgtgcctcacttaaaatggtgcttttttcagttgtctgtcttttcttatgtttttatttgtaaggtgctgtatataagttgaatatattatgcacatatcctacccaatgggtagaacaaaaagttgttaatactgtaatataatgtatagatgataccaattttaacagaaatggcatagaatttgtgaatgcctatgtgctttgtcctcttttgtaaggaaatttgcaaatggatgcatacagattaaagtctatgtagtttattttcctattaaatatcaatattataacacaagagaaagaagtgtgaacaaacaagcaacagtttatgaccagcgtatatatagcaatggaaagttgcatctttgctgtgaaaacactttaaagaaaatactttttaaaaaatcccacagctttttggttgccactagacgcttcttattttaatcattttagtaatgctcagctggaccagtgttagttatatttgagtcagaaaaatgttgtttttcaacttgctttataatctcctgcatctatctcctgctgtagcatcaygaaggtgtcaggcaacagtgaaaagtgcacatttttgttgttgcagaaactgtgtcagaggaataagtaaatcagcctgcagcagaagactttgttcagctccagaggcatctgtgaccgtctgtgtccaagtctctctgtgcctttttcttttacaaactgaagctgtggagccaatgaagtaacagtagagattgtagggaaagaatacctcaggaaaaacaaatacacttacaagaagaccctgttcttagaaaatgtgtttagttatgggttagcactagaagagacttggctgtcagccagccaagtgaaggacctctcatccattcccattcatgtcccatcataatacggacmcaaaaagcaaactcggttttgccatcagttagaaattacgttttggattgtatattgttacatctctcttccagcttagtttttagtgtctgattgtgacctctgcatttatcttcaaataccctaattttaaaacaaaagaacaagaaaagtttataacaccatgttcactaaaaccacggttgaatcttgggtgtgggcatcctttcgagtgttgtccataagagcagttcgtggaattttgcccatctgacccatattatcagcttattctgccaccagagtagagtctaataaattccaaagtttttatttgctccatggtgtatgttctgactttgaaaatgtcagattctataatcatacccctaacatccaggagacaaatgacagattatctttaaactgaaattgactctacaatgcaacccttaatgctgaatggattaaaaaagtcagcccttttagtatctgtttgaaagggccgtaaaaagttgacacttttgttgttgtggatcctgcgtgtctagacccacgtgttgtttccatcgtatactgtagggtgcaccccttgggattcatcattaagaactgaggctcactgttgtcagaaacaaagctcccaccccccaggttcaaccttgtgggagaactgttgagcatgagaatgttctagactcagaggtactaaaatttgttaccacatcattgcttcctttctacaggacgaattgaggcttaaactttactgttaatgatactggttcattttaatgtgcttgttggtatgttgctatttttcatttcatagctttcaaaaatcatgctaattgtatacttgtctagtttaaggctattttaaaatatgtacaatactattcacagcatttagttcgtttaatttttattataaagcaatctactaaaaaagtacaactgtatttgaacttttcaatagttgtttgtgagctatgataatcaaaagtcattaaagtcttttttaacaaacattcgtgcttacttttcaacataattcccagttatatacagaaaaagatttccacctgtcacgtatctgcctcttttacctgagcaatggtgtagttcttagacctaaggtctgtaattgcaatacttttaaagaaagatgttgctctaagtgctgtttgttagttatgaaatcagatttttctgcttgttcttaatgctgtggtcaaaccatagcacaaaatcattaaaaataatcagcggcatac

SEQ ID NO: 13115 - DNA, 1629 bp, Homo sapiens
  SIMILAR (1629)..(436): 921254mologous to Homo sapiens G-protein coupled receptor HUVCT36,accession number W51251,Smith-Waterman Score=1943.
  misc_feature (1)...(1629): n = a,t,c or g
acacacgcccggaattcccgggtcgacgggaggcaggagggggcagccgttgccaggtttatatcccgatcattgtccctcctgctgtgccctgaggagatagatgattggctattgtttacctcctgttttagcctaattagcattttagtgagctcgctttactacctgactggtcgggtgtgagctaagttgcaagccccctgcttaaaggtggatgtggtcacctttcccagctaggcctaggaattcttagtcagcctaggaaatccagctagtcctgtctcttagtagnnnnnnnnnnnnnnnnnnnnnnnnnnnnnnnnnnnnnnnnnnnnnnnnnnnnnnnnnnnnnnnnnnnnnnnaattggggcatagtaagggtcgtgcagttgaaatttccttgggaggggtgccttcgatgtcatcaacttcggagcatgggctagcaggccggtccaggggtccatggtagatcttagtcatggactgcatctggggctccatttgaagaatgatttgtagttttacagctttgattctgcccgtggggaacccgcccgaccctggcgagttaggggtctggaaggccgggtggagcttggtcaacagctcgggctcctcaccctgggccccgcttttcccggaggcctcgggggcacccagcgggtaggcctccctggcccggccggtcctggagcaggtgaggaaggccaggcaggccccgcggaggcgggccaggtcccggtgggtggtctcgctgacgaagcagtagagcacggggtcggcgacgcagttgaagctggtgagcaggagggagaagtggtaggcgttgaaaacgcccttggcgaagtcgcagctggcctcccagacgctgcgcaccagcagcaacacgtggtagggcaggaagcaggccaggaagatgaccacggtgctgagcaccagccgctggatctggtccttgcggctcttctgggtgccgtggctccggcgcacggcgcgcaggatgccctggtaggacgccagcagcaggcagatggggaagaggaagcccaccaggaagcggtagtagttgatggcacgctgccatgcctggatggggtagtgctcaaagcacacgcggtgctggttctcgtcctcgatgacctcctcgtgcatcaggaagtagatgctggtcagcagctccttggcccagatgaccacgctgacgccgacggccgccttcagggtccggaactggtggaagcggaagggatgggccacagccaggtagcggtccacggagatgcagcagaggaagcccacgctgatgtagatgttctcgtacaggaggatgccgcacacctggcaggacaggtcgccgtgagaccagttgtcgtgctgcagcacgtactgcagccagaagggcagcgagcagatgtagaagaggtcggccaccgtcaggttgcacaggtacacgcccagctcgttccgggccttgatctgcaggtagccgaagtagagggacaggcagttggccgggaagcccaccaccagcacggtaacatagaccaccggggccagcgtctggtggatggtatggtcgatggtacagctcatcgaggagttgtctgcagtgatgttccccat

SEQ ID NO: 13116 - DNA, 8103 bp, Homo sapiens
  SIMILAR (4846)..(2570): 991254mologous to Homo sapiens Human transcription regulator MOP8,accession number Y06296,Smith-Waterman Score=3963.
gtatgccgctgattatttttaatgattttgtgctatggtttgaccacagcattaagaacaagcagaaaaatctgatttcataactaacaaacagcacttagagcaacatctttctttaaaagtattgcaattacagaccttaggtctaagaactacaccattgctcaggtaaaagaggcagatacgtgacaggtggaaatctttttctgtatataactgggaattatgttgaaaagtaagcacgaatgtttgttaaaaaagactttaatgacttttgattatcatagctcacaaacaactattgaaaagttcaaatacagttgtacttttttagtagattgctttataataaaaattaaacgaactaaatgctgtgaatagtattgtacatattttaaaatagccttaaactagacaagtatacaattagcatgatttttgaaagctatgaaatgaaaaatagcaacataccaacaagcacattaaaatgaaccagtatcattaacagtaaagtttaagcctcaattcgtcctgtagaaaggaagcaatgatgtggtaacaaattttagtacctctgagtctagaacattctcatgctcaacagttctcccacaaggttgaacctggggggtgggagctttgtttctgacaacagtgagcctcagttcttaatgatgaatcccaaggggtgcaccctacagtatacgatggaaacaacacgtgggtctagacacgcaggatccacaacaacaaaagtgtcaactttttacggccctttcaaacagatactaaaagggctgacttttttaatccattcagcattaagggttgcattgtagagtcaatttcagtttaaagataatctgtcatttgtctcctggatgttaggggtatgattatagaatctgacattttcaaagtcagaacatacaccatggagcaaataaaaactttggaatttattagactctactctggtggcagaataagctgataatatgggtcagatgggcaaaattccacgaactgctcttatggacaacactcgaaaggatgcccacacccaagattcaaccgtggttttagtgaacatggtgttataaacttttcttgttcttttgttttaaaattagggtatttgaagataaatgcagaggtcacaatcagacactaaaaactaagctggaagagagatgtaacaatatacaatccaaaacgtaatttctaactgatggcaaaaccgagtttgctttttgkgtccgtattatgatgggacatgaatgggaatggatgagaggtccttcacttggctggctgacagccaagtctcttctagtgctaacccataactaaacacattttctaagaacagggtcttcttgtaagtgtatttgtttttcctgaggtattctttccctacaatctctactgttacttcattggctccacagcttcagtttgtaaaagaaaaaggcacagagagacttggacacagacggtcacagatgcctctggagctgaacaaagtcttctgctgcaggctgatttacttattcctctgacacagtttctgcaacaacaaaaatgtgcacttttcactgttgcctgacaccttcrtgatgctacagcaggagatagatgcaggagattataaagcaagttgaaaaacaacatttttctgactcaaatataactaacactggtccagctgagcattactaaaatgattaaaataagaagcgtctagtggcaaccaaaaagctgtgggattttttaaaaagtattttctttaaagtgttttcacagcaaagatgcaactttccattgctatatatacgctggtcataaactgttgcttgtttgttcacacttctttctcttgtgttataatattgatatttaataggaaaataaactacatagactttaatctgtatgcatccatttgcaaatttccttacaaaagaggacaaagcacataggcattcacaaattctatgccatttctgttaaaattggtatcatctatacattatattacagtattaacaactttttgttctacccattgggtaggatatgtgcataatatattcaacttatatacagcaccttacaaataaaaacataagaaaagacagacaactgaaaaaagcaccattttaagtgaggcacaacaaaggtgggagcatcaagtgcaggagggggcggcttggttcctatatctgctgaactcagaacatgaggcaccttagttgctgaaaaactgacatgcagatctctgacatgataggggtatatctacatatatataatgtgcacggatagtgtatatataatctctatagctctaaccctctcccgcattacacaaaaacaaggacacgcagagggaagaaagaaaaggatgaaggaagacattgctttcttagcaagacattcctacactcagacagcagcttcctaatgcatccagttcgagaagcagcagcagcagcagcagcagcagcaaatgactgtctgaccctggcagtaacataaacttgaactctgcaaaggacacagcgtgccgggtaataaagaatgctgaaatattggttcctaaaaaatgtagaccactgcaaggctaagagtgctttccattgtctgttcacatctctgtgatctgtagcggtgctggcagctggcggtggtggaaatggcgaacggtaagccacgcagctgctgagaactagcatttaggatctgggctggaagcaacatttttaaatttgtgactttcctcgcaccaagaaggggaagttctccctttgcccacctgtcattcaattgtcctttcacctcagtaggccaagcacgcggcattcttggtcagtgtgagcaggagagcaaagggcaggctgtggagcatgttcgtggcatgaaggcttggctccaagcactggctttaatcacttaagcaagcaacacaaaagttaacagaaaccaagtatctttcccagttttttctttcatacactgccgagctttggaaaatttttaaaaaatgaatggtacacaaagttaatgttgccattctaagtagcaaaattcaataaacaagcagtgcagcaagcccccgagatgggggcgcatccagtcatggctgcatggggggccgggctccctgcgcccacagtagaatgtctctgagcctgccagtgaccaacgccataagccggtcctttgagggagggcttcggactgggtgccgggtgtctctctactagcaatcagtatctggcctgaggacatatttgaagtgctctgcaccagagccttcctaaaaggaagagccgctggatggaagatagaggatggccccctgtcagagaagggaactgttggttcagagaggaaggcagggatttggatggattcttctaggtcagagaagatttctaaaagtgcttccttttgagcctttctcattcttatgaagatgaaataaaggtgaaagagatcaaacggagatacgcagaagttcaagaagtcctcgcctgggtacaaaattcctctgctggtgtcaggaggcctcccccatttactgttggcccctatttcctgcctcataagtttgagccaaaattagtgaatggaaatgcagtcctcacgataaatcttttaaaaattcgcttctgctctcttgggatttcttgtggcttgggtgtgtgtccatgtgtttatgtggtggggagggtgaggacatgcttgtcaagcttctgtattagtaaattttggacactaaaaatagaagaactattgaaatacataatttgcttcatgaaatctcttttccattaaggattgcgtcagtatttaaagagaatgctagagtttctgaaaaagcaaacgtatgctggaagattgtgttcttatagatgggattcaagatgccttgggtctcctacaccgggaacaagggacaaaagtcagcggtatgcccaggagtgttcattcccaccaaatgttcttcctaacaatgcaatccacactttgctggaataatctaagattataaacctatcattgattgcctaaatcactcgttactaaactggacccatgggttctataagctaaaaaaagggttcttgaaagaacaataggccccactgtgtaagttgtatcttcccagtcgctactctttcaacgccacactagccatgaggcgacacggtatgaacaggtcagccacaaccttcaaaagagctactgatctaaatcaccttttccttctgctgaagggaaattgaccatcaattcatgttatgaccttggcttttaaactaattcattacagagccccagcctcgaagacctttcaaagtcatggtttgatatgtatgagtctttaaataactatttaacaaaggcagttctctagggtggttgaatgggaggagcctctttcttgaaagatgattaaaggtatctgaattatgtaattatctcgccaatactgtggacatgtgcaacacattcatatactcacagttactaaggaattcacaagtctctgctctgagccccttcttgaggcaggtagagaagtaaggactgtgaagccatttgagagctagagctgtggggtgcatctcctgcttcaccaaaactgcaggtgagaactgaaatgatggaatcactcacctcgcctccgcatctgtgggcacacctgaccaagaatccactgcaagtccctgccagcagggcccgatgggaacacgggctcctcatctttgcctgacagaggaagagaggctaatctggagagccagtgaaccttcagggtgtctccagggttggggagggtccttctggccccaagccaatctctgccctgagagctggtgtctctccagcagaggccttccaactgtcactggaacaagactgaatccagtctcagaacctccactgtgactctcaactgtatatacttccacacaggttgtaagcatgagctgacaactggtgcctgtgtttttcctctctccttttaagagttggactagttctgtggatgttactgtgtgcaaaggatgaatgtaatggaaattccaatcctcaaaacaaacaaacaaaaaccagtgacctatctacagaggtaagaagcagaagggaacagactaggatcagacaactcttggggtttggaacagtctctccagttacagcacagagccaccgcaccgacggatcaccttcgagacccacagacagacacaaacacacacacgcggatttggctttaaggctgcataggtgggagtcatggaatcatcattccagctcatcttgttatgtgaagaggccacagaggcccaccctccacatggcagagtgtactgcagataagcccttctccacgcgcagtgtctgctaaacgtgttggctgctgctcttataaaagccagtgcttacatctgcagaagaaagttatttttttcattgtatataagaatgaatatttgtaaatatcaggaaatattaaaactaacaatatttaaaattagttttctagtttgcattttaactgcatgttgtgctttttacccggtgctcttcagtcacttgccccctccactgttctctgactgtccagttcttgccttcagtacaaaactggcctggggaagggtttggtaaaatcctgcggggaatttgggtaggttttgaacactgcattcctttaagaatgctatgctaatactagtgacatacaataacccacaatggcttattaccacgatcagcaacatggcattcttccgtcattatttctaggggcttccaaagcataagaaaaccaccacccacaccactcccacacgaaagttctgtgtaggctggatgtggggtggctgctgggagcctcctgtgaactgagcagccctgcagaactgaactaagctgtcgaggaaagggggagaggcaatgggaatatactgaggagtcacatatttcaacagtatgcagaataaccaccttgcattttaaacaatttattgcataaaataaggtatgtatttgaatatatttcatgctatagtgaaaaaaatctaaattactgaagaaattgcactgctggaggatgagggcagcactgcatgatactggatccataaatgcatgtgttcattttctcataaactatgcagcctaagagtagcagagtaactcaaaataacaagtcagaaatgctggaacttaatcttccctatcttatcttccatccaaaagtctccaaaagcttcagcgatgcactgctatttgatgcaaactcctgcaacaataatgacttttttgatttacgtaagttggtaaaatgttaggctacgtccccaaatatcttttcttggatgcttctggggaccactccaggatattccttgggcctgattacaatccacaggtgaaaagacaacatacagaacttcacgtaaaacagttcccttgtaaatattttcaacattaagatagtgcaacttttaaaacacatcatcacaacacaaaggagctccttgcactcatctaacttctccactttataccttggcacacaacacaggaattttgattcatatttttaaaacaaaataaaagtccacaccttaggagaaaaagcgaactggctggttcttccccacaataatatataataatgcttccttctttattcagttaattataaaacatgccattctggcctcatttatctgcaaagtctcctttcacaattaaatacatcaaatacctctgtgggttttatttcatggtatcttcaaagcatcccgttctctgttttcccctgcccacacccccatcccaacccctgtccccaaataaacactgtttgcggtcagaccagatggaagtttgtatcatttcagtctagtttgcatgcaattcccctaaaaggaatcagaaacaaagaccgtgtttgctcatttggttttacttattttgtcccatgtgaaactgaacaacactgtgcccaggagggggcccagcggccgcttcccttcttggttttctttctccagctgaagtgcacgttgagaaggaatcagaccagattcccaggcttcctaatctttgcctttgatgggtacttattgtgctctctgcattgttcatgctgaaactgcagtctgctgccccttgtgtgcgcttgctgcgctggtgatggaggaaagaggcgcctgggtggtggcccatcacctcgctgtatgtggggggtggcccctccatcctcccgttactgctgcaggtgcttgcactgatgcccgagttgctgctgggtgggcatggacccccgctatacatagcaaatgtctattaaatcactgtcaaatatggttcggttgggtggggccctcacggactctcggttgagttccatctgctgatcagggtcccggagctgcatggtgcagggcccctggtaaggaggtggctctacaccgtgcgacagggaaatggtgggaggaagatcagtctcttgctgcacataggggtaagtgggctggaagcggctgaagcgatccctctggatgaaggacggcgctgtgaacctgtccctggaccgcggggcatgcatgatctccgaggcgcccagccgcggtgcggcgctgtctgaaggccacaggcacccttcctgcggcagcccgtcctcccgcctccggctctggttcgggcggttgatgaaggaccgcgtggagactttgtagtggttcagcaggcagacgatgaccaccaccatcaccgtgaccaccacgacgatgatgatgatttgggcgaactccagctccgctgccatggaagaggagagtggttagccacctggcccctccagtccccacccattctccaggcactgtcaccaccccagccatcaggccctgaaggcctctcacacacgtctgttcctcagaggccagcaggacacagaaacgactgtcccactttagggaaggagacaccacggcacagtcgggaggctgtgcaaaccagctgcggggagcgggaagcctctgccatcccccaccacagggagctgag

SEQ ID NO: 13117 - DNA, 2942 bp, Homo sapiens
  SIMILAR (1016)..(1894): 521254mologous to Homo sapiens Human chaperone protein 6 (HCHP-6),accession number Y91945,Smith-Waterman Score=532.
cggacgcgtgggcggacgcgtgggctggtatgaacacacaccaagcgtaactttccttgattctgacacatttatggtcatcattgcgctcaaactgtcttcaagcctctcctcttttccttccagatcatgcatgccccgcggtccaaggacaggttcacagcgccgtccttcatccagagggatcgcttcagccgcttccagcccacctacccctatgtgcagcacgagattgatcttcctcccaccatctccctgtccgacggagaagagccacctccttaccaggggccctgcaccctgcagctccgggaccctgaacagcagatggaactcaaccgagagtccgtgagggccccacccaaccgaaccatatttgacagtgatttaatagacattgctatgtatagcgggggtccatgcccacccagcagcaactcgggcatcagtgcaagcacctgcagcagtaacgggaggatggaggggccaccccccacatacagcgaggggcacgagaaaggagaaaagaatgggcatttcagtacagctgggctggctcgttccacagcccaagacaagcgccaggacggtccagctcaagactggaaccttgtccagttcctcctgcagctggtgtggccttacgaatgtggattgtctctctgttcatgggctctgctgggctctctgagctcagaaccttcagatttgttgggtgggaccacagatagtcatgggtgtgggcagcagacgcacacagtcgtagccactggggaggcaccacctgatctctgcctgcatcgccccacgtatgagcggatacacttgacagatatgcctccccactggccggggcctgagccctgctgcggcacatcggagctggagttcgcccaaatcatcatcatcgtcgtggtggtcacggtgatggtggtggtcatcgtctgcctgctgaaccactacaaagtctccacgcggtccttcatcaaccgcccgaaccagagccggaggcgggaggacgggctgccgcaggtctcccctggatctttgctgcccgacgtggctttgccagcttctgagctgtgcacgaacgggaccggccctgggtggtccctcgtgcctggctcctctggcttggcagtgcacttcaccttgtgtcctgaacaccagcacactggccacacccttaccaaccaagaggcccagcagaaaagcaaaaagtgtcaaaaaagtgtcttctgtgtcatgtggcggcagatttgtgtgatgccctttcccgggaagcgctggctgccccacctgcagagcctcccttccctgaaatcaggaagaatcgaagctgtaaaactacaaatagttcttcaaatggagccccagatgcagtccatgactaagattcactgtggacccctggaccggcctgctagcccatgctccgatgttgatgacatcaaaggcacccctcctgaggaactctcaactgcacgacccctactatgccccaattcagcaggaagcagttagagtggtcattggccaacctccccaacagcacttgggttttcctgttgagagtggggactgagagacaggactagctggatttcctaggctgactaagaatccctaagcctagctgggaaggtgacggcatccacctttaaacacggggcttgcaacttagctcacacccgaccaatcagggagtaaagacagctcactaaaatgctaattaggctaaaacaggaggtaaagaaatagccaatcatctatcgcctgagagcacaacaggagggacaatgatcaggatataaacccaggcattcaagccagcggtggctaccctctttgggtcccctccctttgtatggaagctctgttttcactctattaaatcttgcaattgcacacttttctggtacgtgtgtgtcacagctcaagctgagctttcgctcaccgtccaccactgctgtctgcacgctgtcacagacccacagctgacttccatccctctggatccagcgaggcgcccattgctgctcctgatcgggctaaaggcttgcccttgttcctgcagggctaagtgcccaggattcgtcctaatctagctaaacactagtcactgggttccacgattctcttccatgacccacagcttctaatagagctataacactcactgcatggcccacagttccattccttggaatccgtgaggccaagaacccccaggtcacagaacatgaggcttgccaccatctcggaagaggcccgtcaccatcttggaagcgacctgccaccatcttgggaacttggggagcaaggacccccactaacatagggaccaggaggaaattcttcctctcaacagctaatgcagcaggatctcttacaccgtaccctccctcaccttgctcttgctcttcatggtagaacacggtaccatatcttagctgtactctatcaactgcgcatctgaagtaaagagtgaagtcttctttgtttccagtcatggagcaacaacttgctatgatactggccttctgtagctgactcttctttgtctacccaggcactcttaatggaactttaattctagctaaagttattttctcagactcctttgaagcaaggggcagccatttgacacacttcaagccaatgagttgaatgttgaacttattgctgaggcttctaagaaagcataatagatggaagggcttctgcgaatcagagctcatctttgccctacacctgtcctccaggaggaacgtgaagagctacagcactcatagttcactcatgaaacaacaaacaggagaacaatggcctcaattccaaggaattgcagagcagaaaactgtaaagaggctgggcatttgatggcattgtggtgccaccagacaagccctaagctatcttccctaagacttcttgttttg

SEQ ID NO: 13118 - DNA, 503 bp, Homo sapiens
  SIMILAR (1)..(111): 721254mologous to Homo sapiens Human secreted protein, SEQ ID NO: 6834,accession number G02753,Smith-Waterman Score=140.
  misc_feature (1)...(503): n = a,t,c or g
atggaatactatgcagccataaaaaggaatgagatcatgtcctttgcagggacatggatggagctggaggccattatcctcagcaaactaatgcaggaacggaaaaccaggtaccacatgttctcactcattgccttctctcagcacagcaattttatggacctggtacagttcttcgtgactttcttcagaagggtatttgatgaacaactttatgtgaatgaatttgaaaatgaaacagatggaatgggaccattaaaagaaaaatatgcaacttgccaaaactgacacagaagaagtaaggagcctgaatagttctgtatccatttttaaaacaacactaatttaagttttgtcatagtgaaaactctaggccccaggtggcttcattggtaacataacctttttaggnnnnnnnnnnnnnnnnnnnnnnnnnnnnnnnnnnnnnnnnnnnnnntgtatataaatgaaatcacaacataaattttaagatgatttgggtg

SEQ ID NO: 13119 - DNA, 565 bp, Homo sapiens
  SIMILAR (8)..(280): 781254mologous to Homo sapiens putative p150,accession number U93574,Smith-Waterman Score=389.
tcagacggaatataaatcattttgttataaagatacatgcatacatatgttcactgcagcactattcacagtagcaaagacatggaatcaacccaaatgtccattaatgatagacttcataaagaaaatgtggtacatatacaccacggaatactatgcagcaataaaaaggaatgagatcatgtcctttgcagggacatggatggagctggaagccattatcctcagcaaactaatgcaggaacagaaaaccaaacactgcatgttctcacttaaagggcagtcaaaactggaaacaggaaagcctattgaaataattcaagaatgggattttcgtgacttggaccagggtagtaacagtagagaagggaagaaaaggttggattttgcatatgttgtgaagatggctgttataacatattctcagtgtaaaaactcaaaaataatagagagcattacagatgacaaccatgggtttacttgtgataaaatagtcactcttcgttcagaaacaatgaagaccaaaccaaatcagcaagctcccatcagcatccacatatcttag

SEQ ID NO: 13120 - DNA, 774 bp, Homo sapiens
  SIMILAR (1753)..(2085): 501254mologous to Homo sapiens DNA binding protein RFX2,accession number X76091,Smith-Waterman Score=242.
atgctttacaagattatttttgaatgggctgcaatacataaaatcaactacaagctttcagatgagctgaatgatgctacagaacctgaacttgaactaccttgtcttggttgctctgctcctggctttgcccaggtcctgaacaagtcagcaaagctgaacagggtcttgatgctcccagcggtggctggtggtcaggcagccaagaaatgggaaaggaagcccctcacactggaagttcaatttttttcctatctaggaaacaacaaacagggatcaacaggaaactgcacagacacattcattcctttcggcaaatatggcaacaagatgatgatatccaacaggtctctaataaaagaatgcaggaaaagcacatatggaagaatagaagtgagtgagagcaagcaagtgcttacaggttctgtgctgatcgtgcctctgctaaaacaaaaacaaaacattttggttcatcaaggcgcgctggagaaagctgagctgctgctgctcagactctatcacagctccgctgactgtgacatggaaacaacaggagccccatcaacggatggaaagctcgaaatttctcagaccacatcaaagtctcacaaagccttgtctgaatgctgttctgagtgtttcattcagcaatatttggcaaatctcaaggctggagatgtagcaataggattaacagaaggaggagttgctgaatgcatttctcagtccatacacaaggagcaacaacacagaaagttaaaacatggccagtga

SEQ ID NO: 13121 - DNA, 592 bp, Homo sapiens
  SIMILAR (205)..(378): 861254mologous to Homo sapiens HSPC320,accession number AF161438,Smith-Waterman Score=268.
atgaaactcatggaaacacttaaccagtgcataaacgctggtcatgaaatgacgaaggctatcgccattgcacagtttaatgatgacagcccggaagcgaggaaaataacccggcgctggagaataggtgaagcaacggatttagttgggggttcttctcaggctatcagagatgccgagaaagcagggcgactaccgcacccggatatggaaattcgaggaacgcctcttagcaaatatccggctgtgatcaatgatatttcattctggttgccctctgagaattacgcagaaaatgatttctatgacttagtccgaacaattggaggagacctggtggaaaaggttgatctcatagacaagtttgtacatccaaaactcactccttgttccggggactgctggcctgccacttcctgctcacagtcgcagatggggcttcctgagtctgtgcactgtcagtcagagctgagatgctagaggacgcacaagaccagccactgctactcgatcacgtaccgccacatggaacggactctgtcccagagagagggaaggccattcaccagggctttgcggaagctgagcccac

SEQ ID NO: 13122 - DNA, 927 bp, Homo sapiens
  SIMILAR (562)..(849): 351254mologous to Homo sapiens Amino acid sequence of Huntington's gene exon 1 in GST-HD fusion protein,accession number W95071,Smith-Waterman Score=110.
atgagttctgagaagctgaaatgcacatgtgggaaatttgatacttcttcaatacaacaacagaatttctctatttccatcaaagaagtctgctgttacatcaagggtggcaaccctttagaatacccacaccgggcaggaatctcagttccaacttcttggttcatgtcggccaaagctttcattctcaggacgcacaagaccagccactgctaccgcatcacgtaccgccacatggaacggactctgtcccagagagaggtcaggcacatccaccaggccttgcaggaggctgcagtccagctgttggttttgcaaagggcaggcttcaaagagggcactaatgaaatgccagggctctcgtccaatgtgaagggaggttgctctgctcctggctttgcccaggtcctgaacaagtcagcaaagctgaacagggtcttgatgctcccagcggtggctggtggtcaggcagccaagaaatgggaaaggaagcccctcaacactggaagttcaatttttttcctatctaggaaacaacaacccatttccaagctcatgggctttgctcaggaggagagtggagcaggaacgctcctcggagccctggaccaagcccaagaccacgctggggacctcagcagcctggacttcactgtctatatcattatcagcattttggtcacaaccatttacccagactctaagaagcagcaaatttccctcatcttcctgtcttcttctgagtcctccaaactcttccaacctctgcacgttacccagttccaaagctacttccacatcatcagggacacccagctggtttcacttcggactagagtgtttcccaaggagaccggcttgtgggtcaatggaccaagtgtggggaaatctgccttcaatgtgggcaggtaccagccaaccgactga

SEQ ID NO: 13123 - DNA, 1551 bp, Homo sapiens
  SIMILAR (460)..(921): 1001254mologous to Homo sapiens differentiation-associated Na -dependent inorganic phosphate cotransporter,accession number AB032435,Smith-Waterman Score=832.
ggaatttctacaatggtgggctcagctctcaggagaggtgcccatgcatatgtctacctggtgagtaaggccagtcacatctccagaggccatcagcaccaggcctggggatcgaggcctcctgcagcagagtgtgccacccaaagagctccaggcagtgtggtggagctgctgggcaaatcctaccctcaggacgaccacagcaacctcacccggaaggtcctcaccagagttggcaggaacctgcacaaccagcagcatcaccctctgtggctgatcaaggagagggtgaaggagcacttctacaagcagtatgtgggccgctttgggaccccgttgttctcggtctacgacaacctttctccagtggtcacgacctggcagaactttgacagcctgctcatcccagctgatcaccccagcaggaagaagggggacaactattacctgaatcggactcacatgctgagagcgcacacgtctgcacaccagtgggacttgctgcacgcgggactggatgccttcctggtggtgggtgatgtctacaggcgtgaccagatcgactcccagcactaccctattttccaccagctggaggccgtgcggctcttctccaagcatgagttatttgctggtataaaggatggagaaagcctgcagctctttgaacaaagttctcgctctgcgcataaacaagagacacacaccatggaggccgtgaagcttgtagagtttgatcttaagcaaacgcttaccaggctcatggcacatctttttggagatgagctggagataagatgggtagactgctacttcccttttacacatccttcctttgagatggagatcaactttcatggagaaatggctggaagttcttggctgcggggtgatggaacaacaactggtcaattcagctggtgctcaagaccgaatcggctggggctttgggcctaggattagaaaggctagccatgatcctctacgacatccctgatatccgtctcttctggtgtgaggacgacgcgcttcctgaagcagttctgtgtatccaacattaatcagaaggtgaagtttcagcctcttagcaaatatccggctgtgatcaatgatatttcattctggttgccctctgagaattacgcagaaaaatgatttctagtacttagtccgaacaattggaagtgacctggtggaaagggttgatctcatagacaagtttgtacttccaaagacgcacaagaccagccactcgtaccgcatcatgtaccgcccacatggaaccgactctgtcccagtagagaggtcaggcacatcctatccaggccttgcaggaggctgcagtccagctgttgggtgtggagggcaggttctgatgtcaccacttcactccaggctgcagccctcttggggctccaggatttgctgaaagagaaaaagatatggtttgtgaactggggcatcaatcatcttttgataaatggatcagttttaggactttcagaaaataaaagatcgctcttgaaaaaaaaaaaaaaaaaaaaaaaaaaa

SEQ ID NO: 13124 - DNA, 405 bp, Homo sapiens
  SIMILAR (1)..(201): 881254mologous to Homo sapiens Human secreted protein, SEQ ID NO: 7284,accession number G03203,Smith-Waterman Score=307.
atgagtgaattcccattcacaattgctacaaagagaataaaatacctaggaatccaacttacaagggatgtgaaggacctcttcaaggagaacgacaaaccactgctcaatgaaataaaagaggacaccaacaaatggaagaacattccatggtcatggataggaagaatcagtaccgtgaaaatggccatactgcccaagtgggcaagttcccaggaccgggcctaccgtattccagatgtccagactccaagcgccagttccttcccggtgttcggctgctgcattgatcctccgcgggggcctgcagtgcactgctctgacgaggcgttccaccgaggcaaatgcctaccctggagcgctctcaggatccgcatcgctcaagctggccggagtcccccgtag

SEQ ID NO: 13125 - DNA, 914 bp, Homo sapiens
  SIMILAR (741)..(46): 971254mologous to Escherichia coli Probable penicillin- binding protein,accession number D90839,Smith-Waterman Score=1181.
tcagtaaagctgtttgctgttcacttccacgttgagcggcaatccggcttccgccagtcgcgtcactgcaatgagacgacgctgcccatctacagccgaagcaatgagattaaacccggcaccagaagtatgacccgttttcaggccgtcaacattcatggttttatcccacaacaacccgttacggttttgctgggtgataccgttccaggtgagacttttctcactgtacatatgataaaactcgggctcgccgtggatgatagcacgagaaagcacagctaaatcataagccgagctatgctggccaggtgcatccagaccatgcactgtttcaaaatgcgtatccttgagatgcagcttctcggcatagttgttcatcatttcaacagactgccgttgcccaccggcaatatagtcagccagagcaacacaagcgtcatttccggaatccacaattaaaccacggcttaaatcacgtaccgatacgcgatcgccctctttcaaaaacatcagtgaagaaccgacaaacaccggattatctttcgcccacgcatcgcgccccacggtgacaatatcgtctggcgtaatgcgatgactatcgatagcgcgatccacgacataacccgtcatcagctttgtcaggctggcgggattgcgctgttgatgctcattacccgcggtgaggatctgaccggtggtgtaatccatcaatacccaggacccggcatgaatctctggatgcagggcacagccggaaatcagcgtcgtgctgccgagaatgctgcacaacagcagacgtgaaagtcgacgattgatcattgcgtggctccttgtgcctgttccgtggcgggcgttaatgccggggctgtccagtctggcaagcgggcgaaaagctggcagacgtgttgctc
